United States Patent Application Publication US 2007/0224201 A1 - sequence listing, part 3

SEQ ID NO: 3401 - DNA, 3546 bp, Homo sapiens
aggctcttgcagccaatgccggaacaggatttgctgttgctgagcctcaaatcgcaatgttttgtgggaagttaaatatgcatgtgaacattcagactgggaaatgggaacctgatccaacaggcaccaagagctgctttgaaacaaaagaagaagttcttcagtactgtcaggagatgtatccagagctacagatcacaaatgtgatggaggcaaaccagcgggttagtattgacaactggtgccggagggacaaaaagcaatgcaagagtcgctttgttacacctttcaagtgtctcgtgggtgaatttgtaagtgatgtcctgctagttccagaaaagtgccagtttttccacaaagagcggatggaggtgtgtgagaatcaccagcactggcacacggtagtcaaagaggcatgtctgactcagggaatgaccttatatagctacggcatgctgctcccatgtggggtagaccagttccatggcactgaatatgtgtgctgccctcagacaaagattattggatctgtgtcaaaagaagaggaagaggaagatgaagaggaagaggaagaggaagatgaagaggaagactatgatgtttataaaagtgaatttcctactgaagcagatctggaagacttcacagaagcagctgtggatgaggatgatgaggatgaggaagaaggggaggaagtggtggaggaccgagattactactatgacaccttcaaaggagatgactacaatgaggagaatcctactgaacccggcagcgacggcaccatgtcagacaaggaaattactcatgatgtcaaagctgtctgctcccaggaggcgatgacggggccctgccgggccgtgatgcctcgttggtacttcgacctctccaagggaaagtgcgtgcgctttatatatggtggctgcggcggcaacaggaacaattttgagtctgaggattattgtatggctgtgtgtaaagcgatgattcctccaactcctctgccaaccaatgatgttgatgtgtatttcgagacctctgcagatgataatgagcatgctcgcttccagaaggctaaggagcagctggagattcggcaccgcaaccgaatggacagggtaaagaaggaatgggaagaggcagagcttcaagctaagaacctccccaaagcagagaggcagactctgattcagcacttccaagccatggttaaagctttagagaaggaagcagccagtgagaagcagcagctggtggagacccacctggcccgagtggaagctatgctgaatgaccgccgtcggatggctctggagaactacctggctgccttgcagtctgacccgccacggcctcatcgcattctccaggccttacggcgttatgtccgtgctgagaacaaagatcgcttacataccatccgtcattaccagcatgtgttggctgttgacccagaaaaggcggcccagatgaaatcccaggtgatgacacatctccacgtgattgaagaaaggaggaaccaaagcctctctctgctctacaaagtaccttatgtagcccaagaaattcaagaggaaattgatgagctccttcaggagcagcgtgcagatatggaccagttcactgcctcaatctcagagacccctgtggacgtccgggtgagctctgaggagagtgaggagatcccaccgttccaccccttccaccccttcccagccctacctgagaacgaagacactcagccggagttgtaccacccaatgaaaaaaggatctggagtgggagagcaggatgggggactgatcggtgccgaagagaaagtgattaacagtaagaataaagtggatgaaaacatggtcattgacgagactctggatgttaaggaaatgattttcaatgccgagagagttggaggcctcgaggaagagcgggaatccgtgggcccactgcgggaggacttcagtctgagtagcagtgctctcattggcctgctggtcatcgcagtggccattgccacggtcatcgtcatcagcctggtgatgctgaggaagaggcagtatggcaccatcagccacgggatcgtggaggttgatccaatgctcaccccagaagagcgtcacctgaacaagatgcagaaccatggctatgagaaccccacctacaaatacctggagcagatgcagatttaggtggcagggagcgcggcagccctggcggagggatgcaggtgggccggaagatcccacgattccgatcgactgccaagcagcagccgctgccaggggctgcgtctgacatcctgacctcctggactgtaggactatataaagtactactgtagaactgcaatttccattcttttaaatgggtgaaaaatggtaatataacaatatatgatatataaaccttaaatgaaaaaaatgatctattgcagatatttgatgtagttttcttttttaaattaatcagaaaccccacttccattgtattgtctgacacatgctctcaatatataataaatgggaaatgtcgattttcaataatagacttatatgcaggctgtcgttccggttatgttgtgtaagtcaactcttcagcctcattcactgtcctggcttttatttaaagaaaaaaaaggcagtattccctttttaaatgagctttcaggaagttgctgagaaatggggtggaatagggaactgtaatggccactgaagcacgtgagagaccctcgcaaaatgatgtgaaaggaccagtttcttgaagtccagtgtttccacggctggatacctgtgtgtctccataaaagtcctgtcaccaaggacgttaaaggcattttattccagcgtcttctagagagcttagtgtatacagatgagggtgtccgctgctgctttccttcggaatccagtgcttccacagagattagcctgtagcttatatttgacattcttcactgtctgttgtttacctaccgtagctttttaccgttcacttccccttccaactatgtccagatgtgcaggctcctcctctctggactttctccaaaggcactgaccctcggcctctactttgtcccctcacctccaccccctcctgtcaccggccttgtgacattcactcagagaagaccacaccaaggaggcggccgctggcccaggagagaacacggggaggtttgtttgtgtgaaaggaaagtagtccaggctgtccctgaaactgagtctgtggacactgtggaaagctttgaacaattgtgttttcgtcacaggagtctttgtaatgcttgtacagttgatgtcgatgctcactgcttctgctttttctttctttttattttaaatctgaaggttctggtaacctgtggtgtatttttattttcctgtgactgtttttgttttgtttttttcctttttcctcccctttgaccctattcatgtctctacccactatgcacagattaaacttcacctacaaactccttaatatgatctgtggagaatgtacacagtttaaacacatcaataaatactttaacttcca

SEQ ID NO: 3402 - protein, 763 aa, Homo sapiens
MAATGTAAAAATGRLLLLLLVGLTAPALALAGYIEALAANAGTGFAVAEPQIAMFCGKLNMHVNIQTGKWEPDPTGTKSCFETKEEVLQYCQEMYPELQITNVMEANQRVSIDNWCRRDKKQCKSRFVTPFKCLVGEFVSDVLLVPEKCQFFHKERMEVCENHQHWHTVVKEACLTQGMTLYSYGMLLPCGVDQFHGTEYVCCPQTKIIGSVSKEEEEEDEEEEEEEDEEEDYDVYKSEFPTEADLEDFTEAAVDEDDEDEEEGEEVVEDRDYYYDTFKGDDYNEENPTEPGSDGTMSDKEITHDVKAVCSQEAMTGPCRAVMPRWYFDLSKGKCVRFIYGGCGGNRNNFESEDYCMAVCKAMIPPTPLPTNDVDVYFETSADDNEHARFQKAKEQLEIRHRNRMDRVKKEWEEAELQAKNLPKAERQTLIQHFQAMVKALEKEAASEKQQLVETHLARVEAMLNDRRRMALENYLAALQSDPPRPHRILQALRRYVRAENKDRLHTIRHYQHVLAVDPEKAAQMKSQVMTHLHVIEERRNQSLSLLYKVPYVAQEIQEEIDELLQEQRADMDQFTASISETPVDVRVSSEESEEIPPFHPFHPFPALPENEDTQPELYHPMKKGSGVGEQDGGLIGAEEKVINSKNKVDENMVIDETLDVKEMIFNAERVGGLEEERESVGPLREDFSLSSSALIGLLVIAVAIATVIVISLVMLRKRQYGTISHGIVEVDPMLTPEERHLNKMQNHGYENPTYKYLEQMQI

SEQ ID NO: 3403 - DNA, 1479 bp, Homo sapiens
ctttcacaaaaggtgaaatgagctctttgtagtgtttcccgcccaggctgcattttagaatcacagaggagggtggcccgaggcagccgggatgacagctctccccaggaatcctgctgcctgctgagaaacatggtcagcaagtcccgctggaagctcctggccatgttggctctggtcctggtcgtcatggtgtggtattccatctcccgggaagacaggtacatcgagcttttttattttcccatcccagagaagaaggagccgtgcctccagggtgaggcagagagcaaggcctctaagctctttggcaactactcccgggatcagcccatcttcctgcggcttgaggattatttctgggtcaagacgccatctgcttacgagctgccctatgggaccaaggggagtgaggatctgctcctccgggtgctagccatcaccagctcctccatccccaagaacatccagagattgaacaatgccccagtggctggctatgagggtgacgtgggctccaagaccaccatgcgtctcttctaccctgaatctgcccacttcgaccccaaagtagaaaacaacccagacacactcctcgtcctggtagctttcaaggcaatggacttccactggattgagaccatcctgagtgataagaagcgggtgcgaaagggtttctggaaacagcctcccctcatctgggatgtcaatcctaaacagattcggattctcaaccccttcttcatggagattgcagctgacaaactgctgagcctgccaatgcaacagccacggaagattaagcaggatgcggaatttggtcagagccgttcatgtcagagctcagcagaatggcagctgaaccctgggagagcactgcctgttctgagaaaggcctgcaattgtgtcttcacgatgcttttccaagacagccaaggcaggtataattttcctcagcaagaaagaggaacctcggaggtgtgcaccgcctggctggccacccaggtattggcaaaagtgactgttgggctgctggcccggcccccgcccgccgtccctggagcactcacgatgcggtccggcggcggcgtgctccggatgaagcacttgatctggcccttctcgccgtggagggcgtgctgggtctgggtgctggagatgatggggggtcctgttgagaaacagcgtcccattaggcacccgggaagggcacgtccctgctggcgccctcttgggtgggttcagaagtgtattcattaatccaagcattcagcaaacatttgccgaaggcctgtatgtgcaaggtaaagtgcaaggtagaggactcagagataaattaggcattcagtcataaacctctcaagggatcatgagcgaatgcttctaagtcagaacccccagaagatacaaataactgtaataaaaggtggtgagtgttagtaccacaggagcggtgcagataaagtgctaaccgacttc

SEQ ID NO: 3404 - DNA, 1538 bp, Homo sapiens
ggagaaaggagagaaaggaaagcgcgaggagccgccgccaccaccagcgcagcagtcctggagctgtgaggagattcgggccgtcaccctgcctcccctgcgtcccgccaccggccgcttctgtcctcggacccattccaacaatctcgtaaaacatggtggattactatgaagttctaggcgtgcagagacatgcctcacccgaggatattaaaaaggcatatcggaaactggcactgaagtggcatccagataaaaatcctgagaataaagaagaagcagagagaaaattcaagcaagtagcggaggcatatgaagtgctgtcggatgctaagaaacaggacatctatgacaaatatggcaaagaaggattaaatggtggaggaggaggtggaagtcattttgacagtccatttgaatttggcttcacattccgtaacccagatgatgtcttcagggaattttttggtggaagggacccattttcatttgacttctttgaagacccttttgaggacttctttgggaatcgaaggggtccccgaggaagcagaagccgagggacggggtcgtttttctccgtgttcagtggatttccgtcttttagaagtggattttcttcttttgatacaggatttacttcatttgggtcactaggtcacgggggcctcacttcattctcttccacgtcatttggtggtagtggcatgggcaacttcaaatagatatcaacttcaactaaaatggttaatggcagaaaaatcactacaaagagaattgtcgagaacggtcaagaaagagtagaagttgaagaagatggccagttaaagtccttaacaataaatggtaaggagcagctgctgcgcttggataacaagtaattcaacgcacgcacttaacagaaatgttaaactataacaagcaccatttgaggattaacaggaacatttttttgaagatttcaaacgaactcgactttcagtataattgtacctaaagtatttataaacagctcatcggagcctctatttgtcatagacttttgagttgattgttgggaccacataataggaccattttttttttgtctttaaaattgttgtaaatctctgtatgcactttgcttttttattaaacgtactccaaggtgagtcttgactctttagtgtaggacaagattgtacactaacaccagcatggacctgcttttcattgtgtctgaaatgtgagccacgtagtgtcggcctgctgtgaagttaacattgccaggacgattcttctacagaaataatttcaaattttttcagcatttagtagtgaaagatattaatacattaatggtaatacatttctggtttaatataaattaaggatgttttctagttgtgcatgaatgctggcaacttagtaagttttgacaattgtttaaatatgtaatgttaagcttaggtttaaaaaagtaaagctggtaaactgggtctttgtcatttgctttaaaaaaaaaaaaagaaaataaatgcgaatgtgttggtgcattc

SEQ ID NO: 3405 - protein, 241 aa, Homo sapiens
MVDYYEVLGVQRHASPEDIKKAYRKLALKWHPDKNPENKEEAERKFKQVAEAYEVLSDAKKQDIYDKYGKEGLNGGGGGGSHFDSPFEFGFTFRNPDDVFREFFGGRDPFSFDFFEDPFEDFFGNRRGPRGSRSRGTGSFFSVFSGFPSFRSGFSSFDTGFTSFGSLGHGGLTSFSSTSFGGSGMGNFKRISTSTKMVNGRKITTKRIVENGQERVEVEEDGQLKSLTINGKEQLLRLDNK

SEQ ID NO: 3406 - DNA, 736 bp, Homo sapiens
cagcagtcctggagctgtgaggagattcgggccgtcaccctgcctcccctgcgtcccgccaccggccgcttctgtcctcggacccattccaacaatctcgtaaaacatggtggattactatgaagttctaggcgtgcagagacatgcctcacccgaggatattaaaaaggcatatcggaaactggcactgaagtggcatccagataaaaatcctgagaataaagaagaagcagagagggacatctatgacaaatatggcaaagaaggattaaatggtggaggaggaggtggaagtcattttgacagtccatttgaatttggcttcacattccgtaacccagatgatgtcttcagggaattttttggtggaagggacccattttcatttgacttctttgaagacccttttgaggacttctttgggaatcgaaggggtccccgaggaagcagaagccgagggacggggtcgtttttctccgtgttcagtggatttccgtcttttagaagtggattttcttcttttgatacaggatttacttcatttgggtcactaggtcacgggggcctcacttcattctcttccacgtcatttggtggtagtggcatgggcaacttcaaatagatatcaacttcaactaaaatggttaatggcagagaagatggccagttaaagtccttaacaataaatggtaaggagcagctgctgcgcttggataacaagtaattcaacgcacgc

SEQ ID NO: 3407 - DNA, 2146 bp, Homo sapiens
cttgtaagatggcggcgcccaggtggagcgcgtcgggcccctggatccggggaaacggccaaggttgcgggagtctcttcactctcgtctcaaagccattttgtgccgctgccgctgcctctacggccataaatgcccagagattagcggagaagctccgagcccagaaacgggaacaagacacaaagaaggagccggtgtccacaaacgctgttcagcggagagtgcaagaaatagtgcggttcacacggcagctgcagcgagtccaccccaacgtgcttgctaaggcactgacccgaggaattctccaccaggacaagaaccttgtggtcatcaataagccctacggtctccctgtgcatggtggccctggggtccagctctgcatcactgatgtactacctatcctggcaaagatgcttcatggccacaaggcagagcccttgcatctgtgccaccggctggacaaggaaaccacaggtgtaatggtgttggcttgggacaaggacatggcacatcaagtccaagagttgtttagaacccgtcaggtggtgaagaagtactgggccatcactgtgcatgtccccatgccctcagcaggagtcgtggacatccccattgtggagaaggaggcgcaaggccagcagcaacaccacaagatgacattgtccccgagctaccgcatggacgatgggaaaatggtgaaagtgcggcgcagccggaatgcgcaagttgctgtaactcagtaccaggtgctcagcagcactctctcctccgccctcgtggagctccagcccatcactggaataaaacatcagcttcgagttcacttgtcttttggattggattgtccaatccttggtgatcacaagtactcagactggaataggttggccccccagaagctgtctgtgggcaccctgaagaagctggggctagaacagtcgaaggcccgctacatcccccttcacctgcacgcccggcagctgatcctgcctgccctggggtccgggaaggaggaactcaacttggtctgcaaacttcctcgcttctttgtgcattccctgcaccgcctgcgtttagagatgccaaatgaggatcaaaatgagaacaatgaagccaagtgtctgggagcacagtgaagaccatgggagcaccctggcacctgggagcacagtgaagaccctgagagcatcctggcacctgggagcgcaggttggcccctgaactgttctttgtttacaggactctgctaacttctcacttggaacagactgcgtaagagccaggtgggataaggtaaagcaactcagctgctacagggcttttaatggagaacaaagtctatttactgatagtttggctgcactgtggaaaagcctgctggaagtctccctgccgtgggctctcattgccaatatggaacagagcccagggccaggcagactggggcagtgactggaaaaggaaaactaaaggtcagaatccgggatcaggaactgtttttatccagcagtgaagctcttgagctcttaggaaggttcccgtggttggaaagaacataatggttaacaaatatcacagcatccagggattgcccagctatagtgtgggtgccctactgaactctgattagggaacctgtataagggtattgagtgtgaggttgaggtgggacatttgctgagcaaggagaaccgatgtgaatggcaggcagataacatgcacacatgaagctggctgggtgtaaggcagtagcggggagcggcatgctgtctaacagctgttagctccagctggttgttgccatgtgggaatggattttctcatttcttcagagaagctggaaacctagatatttatgtgaaacctcccagtgtattgccaactaaatcaaatttttaaagatgcttaggcacctaagcaaataatacttagaggttgaatttggtctacaggctagcagtttgcagtctatgtttaatgaatggtatagaagtttggggaaaggtgccatcttgaaaattctggatcagtggttggcattttcgctgcgtgtagtatgtatcctttctaggcttggagatggctttggttggtccgtgaatgtagttatgagagtgctgccattaaaaaatcaaaaatc

SEQ ID NO: 3408 - protein, 377 aa, Homo sapiens
MAAPRWSASGPWIRGNGQGCGSLFTLVSKPFCAAAAASTAINAQRLAEKLRAQKREQDTKKEPVSTNAVQRRVQEIVRFTRQLQRVHPNVLAKALTRGILHQDKNLVVINKPYGLPVHGGPGVQLCITDVLPILAKMLHGHKAEPLHLCHRLDKETTGVMVLAWDKDMAHQVQELFRTRQVVKKYWAITVHVPMPSAGVVDIPIVEKEAQGQQQHHKMTLSPSYRMDDGKMVKVRRSRNAQVAVTQYQVLSSTLSSALVELQPITGIKHQLRVHLSFGLDCPILGDHKYSDWNRLAPQKLSVGTLKKLGLEQSKARYIPLHLHARQLILPALGSGKEELNLVCKLPRFFVHSLHRLRLEMPNEDQNENNEAKCLGAQ

SEQ ID NO: 3409 - DNA, 941 bp, Homo sapiens
cagatagaaaccaaattctatgaggaagttcacgatcttgaaaggaatatgctgttctctatcagcctctatttgataagcgatttgagattattaatgaaatttatgaacccacagaagaacaatgtgaatggtaaccagataaagaagatgagatttcagaggagttgaaagaaaaggccaagatcgaagatgagaaaaaggatgaagaaaaagaagaccccaaagaaattcctgaattttggttaactgtttctaagaatgttgacttgttcagtgatatggttcaacaacatgatgaacctattctgaaacacttgaaagatactaaagtgaagctctcagatgctgaccagcctatgaattttgtcttagaatttcactttgaacccaatgaatattttacaaatgaaatgctgtcaaagacatacaggatgaggtcagaaccagatgattctgatcccttttcttttgatggaccagaaattatgggttgcacagggtgccagatagattggaaaaaaggaaagaatgtcactttgaaaaccattaagaagaagcagaaacacaagggaagtgggacagttcatactgtgactgagagtggagatctggatgatgatgctgaaatccttgcacagacttcaaaataggtcactttttacgtgagcgtataatcccaagagcagtgtcatactttactggagaagctattgaagttgatgatgatgtttatgatgaagaaggtgaagaagcggatgaggtaatgtttaccaaatgagcaaataattctctgtgtttaacacattgagaagcaaattgaatgacttatgtattcctttgctataatcattctgcaatttgggttaaaaacattttggaaaatatgattttagaattctacagccaaacagtgtatgtgtaaagtttcaataaataaa

SEQ ID NO: 3410 - protein, 123 aa, Homo sapiens
MVQQHDEPILKHLKDTKVKLSDADQPMNFVLEFHFEPNEYFTNEMLSKTYRMRSEPDDSDPFSFDGPEIMGCTGCQIDWKKGKNVTLKTIKKKQKHKGSGTVHTVTESGDLDDDAEILAQTSK

SEQ ID NO: 3411 - DNA, 2042 bp, Homo sapiens
ggggccagtcgttcgccggaaagcatttgtctcccacctcatcataacaacaattaatttcctctggggcctgaggagggcagaatttcaaccttcggtgtgcttgggagtggcgattgtgatttacacgacaaaatgccgaggtgctcggtggagtcatggcagtgccctttgtggaagactgggacttggtgcaaaccctgggagaaggtgcctatggagaagttcaacttgctgtgaatagagtaactgaagaagcagtcgcagtgaagattgtagatatgaagcgtgccgtagactgtccagaaaatattaagaaagagatctgtatcaataaaatgctaaatcatgaaaatgtagtaaaattctatggtcacaggagagaaggcaatatccaatatttatttctggagtactgtagtggaggagagctttttgacagaatagagccagacataggcatgcctgaaccagatgctcagagattcttccatcaactcatggcaggggtggtttatctgcatggtattggaataactcacagggatattaaaccagaaaatcttctgttggatgaaagggataacctcaaaatctcagactttggcttggcaacagtatttcggtataataatcgtgagcgtttgttgaacaagatgtgtggtactttaccatatgttgctccagaacttctgaagagaagagaatttcatgcagaaccagttgatgtttggtcctgtggaatagtacttactgcaatgctcgctggagaattgccatgggaccaacccagtgacagctgtcaggagtattctgactggaaagaaaaaaaaacatacctcaacccttggaaaaaaatcgattctgctcctctagctctgctgcataaaatcttagttgagaatccatcagcaagaattaccattccagacatcaaaaaagatagatggtacaacaaacccctcaagaaaggggcaaaaaggccccgagtcacttcaggtggtgtgtcagagtctcccagtggattttctaagcacattcaatccaatttggacttctctccagtaaacagtgcttctagtgaagaaaatgtgaagtactccagttctcagccagaaccccgcacaggtctttccttatgggataccagcccctcatacattgataaattggtacaagggatcagcttttcccagcccacatgtcctgatcatatgcttttgaatagtcagttacttggcaccccaggatcctcacagaacccctggcagcggttggtcaaaagaatgacacgattctttaccaaattggatgcagacaaatcttatcaatgcctgaaagagacttgtgagaagttgggctatcaatggaagaaaagttgtatgaatcaggttactatatcaacaactgataggagaaacaataaactcattttcaaagtgaatttgttagaaatggatgataaaatattggttgacttccggctttctaagggtgatggattggagttcaagagacacttcctgaagattaaagggaagctgattgatattgtgagcagccagaaggtttggcttcctgccacatgatcggaccatcggctctggggaatcctggtgaatatagtgctgctatgttgacattattcttcctagagaagattatcctgtcctgcaaactgcaaatagtagttcctgaagtgttcacttccctgtttatccaaacatcttccaatttattttgtttgttcggcatacaaataatacctatatcttaattgtaagcaaaactttggggaaaggatgaatagaattcatttgattatttcttcatgtgtgtttagtatctgaatttgaaactcatctggtggaaaccaagtttcaggggacatgagttttccagcttttatacacacgtatctcatttttatcaaaacattttgtttaattcaaaaagtacatatttcttccatgttgatttaattctaagatgaaccaataaagacataattcttgcaaaaaaaaaaaaaaaaaaaaaaaaaa

SEQ ID NO: 3412 - protein, 476 aa, Homo sapiens
MAVPFVEDWDLVQTLGEGAYGEVQLAVNRVTEEAVAVKIVDMKRAVDCPENIKKEICINKMLNHENVVKFYGHRREGNIQYLFLEYCSGGELFDRIEPDIGMPEPDAQRFFHQLMAGVVYLHGIGITHRDIKPENLLLDERDNLKISDFGLATVFRYNNRERLLNKMCGTLPYVAPELLKRREFHAEPVDVWSCGIVLTAMLAGELPWDQPSDSCQEYSDWKEKKTYLNPWKKIDSAPLALLHKILVENPSARITIPDIKKDRWYNKPLKKGAKRPRVTSGGVSESPSGFSKHIQSNLDFSPVNSASSEENVKYSSSQPEPRTGLSLWDTSPSYIDKLVQGISFSQPTCPDHMLLNSQLLGTPGSSQNPWQRLVKRMTRFFTKLDADKSYQCLKETCEKLGYQWKKSCMNQVTISTTDRRNNKLIFKVNLLEMDDKILVDFRLSKGDGLEFKRHFLKIKGKLIDIVSSQKVWLPAT

SEQ ID NO: 3413 - DNA, 2142 bp, Homo sapiens
ctggcctgcggtgggctaggggcagggccggagccgcggcggcggagctgtggatccttcatgatgagagatttggggacacttctctctcctgtgtgtagttgatagtttggtggtgaagagatggctgacagtgtcaaaacctttctccaggaccttgccagaggaatcaaagactccatctggggtatttgtaccatctcaaagctagatgctcgaatccagcaaaagagagaggagcagcgtcgaagaagggcaagtagtgtcttggcacagagaagagcccagagtatagagcggaagcaagagagtgagccacgtattgttagtagaattttccagtgttgtgcttggaatggtggagtgttctggttcagtctcctcttgttttatcgagtatttattcctgtgcttcagtcggtaacagcccgaattatcggtgacccatcactacatggagatgtttggtcgtggctggaattcttcctcacgtcaattttcagtgctctttgggtgctccccttgtttgtgcttagcaaagtggtgaatgccatttggtttcaggatatagctgacctggcatttgaggtatcagggaggaagcctcacccattccctagtgtcagcaaaataattgctgacatgctcttcaaccttttgctgcaggctcttttcctcattcagggaatgtttgtgagtctctttcccatccatcttgtcggtcagctggttagtctcctgcatatgtcccttctctactcactgtactgctttgaatatcgttggttcaataaaggaattgaaatgcaccagcggttgtctaacatagaaaggaattggccttactactttgggtttggtttgcccttggcttttctcacagcaatgcagtcctcatatattatcagtggctgccttttctctatcctctttcctttattcattatcagcgccaatgaagcaaagaccctggcaaagcatatctcttccagttgcgcctcttctccttggtggtcttcttaagcaacagactcttccacaagacagtctacctgcagtcggccctgagcagctctacttctgcagagaagttcccttcaccgcatccgtcgcctgccaaactgaaggctactgcaggtcactgagttgcctgccatccaaaggggatgggcgggattggaagaagctgtggcagctcttttccctgttcacctcccgcctgccagggaaggcaggacccgctctgccaagggccctctgcgtattcccttctctctgaggaattgaaatttttgtctctggtgcacgtaaggcagaatgttccctgacaccagtgtgtggatttttaacatcaccgtgagtctgaaaggaccacaggtttttctgcagctattttctagcatttgccagtccctgtgcctggactgattggaacactttgtttttctccctgtgccatttacccttccacctttccatcctgccttctaccacccttggatgaatggattttgtaattctagctgttgtattttgtgaatttgttaattttgttgtttttctgtgaaacacatacattggatatgggaggtaaaggagtgtcccagttgctcctggtcactccctttatagccattactgtcttgtttcttgtaactcaggttaggttttggtctctcttgctccactgcaaaaaaaaaaaaaaaaaaaaaaaaaaaaaaaaagcctgaagagatgagataggaggaaagacctcacagccagatctgctgggttttgaggagtgattttctttcttccccttgaaggggaaaaagctattttcattggtacatttaaagtcccccaactatggggaggtaccaattctggacaagtgccactacaacaacactaaacctgaacttttcaactccgttggtggtgggaggcagcgggcagaaatttactgttggccactgccaggtctatttcatatttcaaaggaatattgggtgctgcatataggaactgaaggggtcaatgtattaaacctgtgattggttgttttcctgtcattttgagagactaaatgtggggggcagatgtcaaaatacctgtacaattttaaaatgtcacaattaaacatgagctggtttccca

SEQ ID NO: 3414 - DNA, 2005 bp, Homo sapiens
ctgcagctcttgggttttttgtggcttccttcgttattggagccaggcctacaccccagcaaccatgtccaagggacctgcagttggtattgatcttggcaccacctactcttgtgtgggtgttttccagcacggaaaagtcgagataattgccaatgatcagggaaaccgaaccactccaagctatgtcgcctttacggacactgaacggttgatcggtgatgccgcaaagaatcaagttgcaatgaaccccaccaacacagtttttgatgccaaacgtctgattggacgcagatttgatgatgctgttgtccagtctgatatgaaacattggccctttatggtggtgaatgatgctggcaggcccaaggtccaagtagaatacaagggagagaccaaaagcttctatccagaggaggtgtcttctatggttctgacaaagatgaaggaaattgcagaagcctaccttgggaagactgttaccaatgctgtggtcacagtgccagcttactttaatgactctcagcgtcaggctaccaaagatgctggaactattgctggtctcaatgtacttagaattattaatgagccaactgctgctgctattgcttacggcttagacaaaaaggttggagcagaaagaaacgtgctcatctttgacctgggaggtggcacttttgatgtgtcaatcctcactattgaggatggaatctttgaggtcaagtctacagctggagacacccacttgggtggagaagattttgacaaccgaatggtcaaccattttattgctgagtttaagcgcaagcataagaaggacatcagtgagaacaagagagctgtaagacgcctccgtactgcttgtgaacgtgctaagcgtaccctctcttccagcacccaggccagtattgagatcgattctctctatgaaggaatcgacttctatacctccattacccgtgcccgatttgaagaactgaatgctgacctgttccgtggcaccctggacccagtagagaaagcccttcgagatgccaaactagacaagtcacagattcatgatattgtcctggttggtggttctactcgtatccccaagattcagaagcttctccaagacttcttcaatggaaaagaactgaataagagcatcaaccctgatgaagctgttgcttatggtgcagctgtccaggcagccatcttgtctggagacaagtctgagaatgttcaagatttgctgctcttggatgtcactcctctttcccttggtattgaaactgctggtggagtcatgactgtcctcatcaagcgtaataccaccattcctaccaagcagacacagaccttcactacctattctgacaaccagcctggtgtgcttattcaggtttatgaaggcgagcgtgccatgacaaaggataacaacctgcttggcaagtttgaactcacaggcatacctcctgcaccccgaggtgttcctcagattgaagtcacttttgacattgatgccaatggtatactcaatgtctctgctgtggacaagagtacgggaaaagagaacaagattactatcactaatgacaagggccgtttgagcaaggaagacattgaacgtatggtccaggaagctgagaagtacaaagctgaagatgagaagcagagggacaaggtgtcatccaagaattcacttgagtcctatgccttcaacatgaaagcaactgttgaagatgagaaacttcaaggcaagattaacgatgaggacaaacagaagattctggacaagtgtaatgaaattatcaactggcttgataagaatcagactgctgagaaggaagaatttgaacatcaacagaaagagctggagaaagtttgcaaccccatcatcaccaagctgtaccagagtgcaggaggcatgccaggaggaatgcctgggggatttcctggtggtggagctcctccctctggtggtgcttcctcagggcccaccattgaagaggttgattaa

SEQ ID NO: 3415 - DNA, 3560 bp, Homo sapiens
gactgctaggcgaggagagggaagggggcggaggagacagggctactgcaggcgcagagctgggggcagccgggggcccgagtggctgaggctggtcccgcagcggccgcttgccggcgttctggctcctgtggcctcaccaggaagcgtcagagtcccgacactggggaagctcggagcgccgcctccgctgccgccgcctcctgcctggctctgggtccccgagccccctcccctggcccagcccgactccctcctccttcccgaaccatccggctcgggctccttccctggcgatggctggccgctgagccatggctcagtacggccaccccagtccgctcggcatggctgcgagagaggagctgtacagcaaagtcaccccccggaggaaccgccaacagcgccccggcaccatcaagcatggatcggcgctggacgtgctcctctccatggggttccccagagcccgcgcacaaaaagccttggcatccacgggaggaagaagtgttcaggcagcatgtgactggttattctcccatgtcggtgaccccttcctggatgaccccctgccccgggagtacgtcctctacctccgtcccaccggccccttagcacagaagctttccgacttttggcagcagtcgaagcagatctgcgggaagaacaaggcacacaacatcttcccccacatcacactctgccagttctttatgtgcgaggacagcaaggtggatgccctgggggaagccctgcagaccacggtcagtcgctggaaatgtaagttctcggccccgctgcccctggagctctatacgtcgtccaacttcatcggcctctttgtaaaggaagacagtgcggaggtcctcaagaagtttgctgctgactttgctgcagaggctgcatccaaaaccgaagtgcatgtggaacctcataagaagcagctacatgtgaccctggcttaccacttccaagccagccacctacccaccctagagaaactggcccagaacattgacgtcaagctagggtgtgactgggtggctaccatattttctcgggatatccgatttgctaaccatgagacattacaggtcatctacccctataccccacaaaatgacgatgagctggagctggtccccggggacttcatcttcatgtctccaatggagcagaccagcaccagcgagggttggatctatggcacgtccttaaccaccggctgctctggactcctgcctgagaattacattaccaaggctgatgaatgcagcacctggatatttcatggttcttattcaatcttaaatacatcgtcatccaactctctcacgtttggggatggagtattggagaggcggccttatgaggaccaggggctcggggagacgactcctcttactatcatctgccagcccatgcagccgctgagggtcaacagccagcccggcccccagaagcgatgcctttttgtgtgtcggcatggtgagaggatggatgttgtgtttgggaagtactggctgtcccagtgcttcgatgccaaaggccgctacatacgcaccaacctgaacatgcctcatagtttacctcagcggagtggtggtttccgagattacgagaaagatgctcccatcactgtgtttggatgcatgcaagcaagactagtgggtgaagccttattagagagcaataccattatcgatcatgtctattgctccccgtcccttcgctgcgttcagactgcacacaatatcttgaaaggtttacaacaagaaaatcacttgaagatccgtgtagagcccggcttatttgagtggacaaaatgggttgctgggagcacattacctgcatggatacctccatcagagttagctgcagccaacctgagtgttgatacaacctacagacctcacattccaatcagcaaattagttgtttcagaatcctatgatacttatatcagtagaagtttccaagtaacaaaagaaataataagtgaatgtaaaagtaaaggaaataacatcctgattgtggcccacgcatcttcccttgaagcgtgtacctgccaacttcagggcctgtcacctcagaactccaaggacttcgtacaaatggtccgaaagatcccatatctgggattttgttcctgtgaagaattaggagaaactggaatatggcagctgacagatccaccaatccttcctcttacccatggaccaactgggggcttcaactggagagagaccttgcttcaagaataaaccacaccagtgaacaagaaggaaaggccttttggagtgtgtctttctgtgtgttttaaaaacagtgggaaaatccacaccacactctaagtggacagctcagaataatttagcatatttcctttcacacttaaagttcttaagatgagactgtgtaaatgagagaaagacttgattcagaggaaaaaaatgtgttctctctggactcttgcctagctcacaaggctttggagaattgtcttcctaaatcggggcacctgctacagaagagaatgtttcgttccctctgggtatgcacagctaaggggcctcatttctcccagagggagctgctggcccgctctaaggggtgcaagaggaaggagtgtgcccagaccagctgggggagcattgaaaggacagcttggggatggaatttttttttttttatctccattttccagttaggtagagccaagctgaggaatccttttaagattattagaaaacatgccctgaagagagttgttcttaggttacacatgaaatcctaccgtcactagcccccatacaccagtgttgctggctgaagatacccgcttaaggatgctaacatttaccctggtactgccacattttctctagagcagctggcccttcttgctacagccctatcccccctccttgcttctgtgaaatggggagacaaagcacttttgctctccaaagcacttttggatactcaggaggaaagataagatacatgtttgaagtattcaatcataggagcaaagaacttgcaaaatatgaagtgacttggaattaaccatgttgtagcctaacgtgctactgcatttctaaatcatcaatatttgcttgtctttgcccctagactctagactatgttaactagttaaggatgttacattttgaaaggatgtatgttagatatattatttgcagcaagaagttcattctgtgcaatatggacatgtttgcaaaccataccaagggtcaggttgttgtacacttacagtacgtgtcaaccataatggaacatccacaaatgcatcaattataccagggatgtatagtaagtcagggaactaatataaatgatgacagtcatggctgcactgctacttgtgctgtcgttttgtttgtttttctatgataatttaaaatacataggtagggctactgaggaaatttggagagccacattctgtggtttctcattatacttacttcctgcatttagagggagtttatttaaaagaaataaatgacaatcaaaccaaaaaaaaaaaaaaaaaa

SEQ ID NO: 3416 - protein, 638 aa, Homo sapiens
MAAREELYSKVTPRRNRQQRPGTIKHGSALDVLLSMGFPRARAQKALASTGGRSVQAACDWLFSHVGDPFLDDPLPREYVLYLRPTGPLAQKLSDFWQQSKQICGKNKAHNIFPHITLCQFFMCEDSKVDALGEALQTTVSRWKCKFSAPLPLELYTSSNFIGLFVKEDSAEVLKKFAADFAAEAASKTEVHVEPHKKQLHVTLAYHFQASHLPTLEKLAQNIDVKLGCDWVATIFSRDIRFANHETLQVIYPYTPQNDDELELVPGDFIFMSPMEQTSTSEGWIYGTSLTTGCSGLLPENYITKADECSTWIFHGSYSILNTSSSNSLTFGDGVLERRPYEDQGLGETTPLTIICQPMQPLRVNSQPGPQKRCLFVCRHGERMDVVFGKYWLSQCFDAKGRYIRTNLNMPHSLPQRSGGFRDYEKDAPITVFGCMQARLVGEALLESNTIIDHVYCSPSLRCVQTAHNILKGLQQENHLKIRVEPGLFEWTKWVAGSTLPAWIPPSELAAANLSVDTTYRPHIPISKLVVSESYDTYISRSFQVTKEIISECKSKGNNILIVAHASSLEACTCQLQGLSPQNSKDFVQMVRKIPYLGFCSCEELGETGIWQLTDPPILPLTHGPTGGFNWRETLLQE

SEQ ID NO: 3417 - DNA, 349 bp, Homo sapiens
gaaggcacccccattcccaccctgtgccttccttgcgggcagagagggagagaagggctccccagatctacacccctccctcctgcatctcccctggagtgttcacttgcaagctgccaaaacatgatggcctctggttgttctgttgaactccttgaacgtttagaccctgcacacatctggaaggagctggcccctcagtcccttcctactccccaacaaggggctcactatccccaaagaaggagctgttggggacccacgacgcagcccctgtactggattacagcatattctcatctctggccccgaggctgcctgtggggcgagtggagacctcccatcactg

SEQ ID NO: 3418 - DNA, 855 bp, Homo sapiens
atgtgcagcccagtgccaggtacacagggctacagagatgtcattattgagcaccttctgcatacaaagcaccatgctgggcataaggtggacgcaaagaggggccaggttcagcctacaaagaccctgcgggtccgcgtgcggctgccggacggccaggtgaccgaggagagcctgcaggcggacagcgacgcggacagcatcagcctcgagctgcgcaagcccgacggcaccctcgtctccttcaccgccgacttcaagaaggatgtgaaggtcttccgggccctgatcctgggggagctggagaaggggcagagtcagttccaggccctctgctttgtcacccagctgcagcacaatgagatcatccccagtgaggccatggccaagctccggcagaaaaatccccgggcagtgcggcaggcggaggaggttcggggtctggagcatctgcacatggatgtcgctgtcaacttcagccagggggccctgctgagcccccatctccacaacgtgtgtgccgaggccgtggatgccatctacacccgccaggaggatgtccggttctggctggagcaaggtgtggacagttctgtgttcgaggctctgcccaaggcctcagagcaggcggagctgcctcgctgcaggcaggtgggggaccacgggaagccctgcgtctgccgctatggcctgagcctggcctggtacccctgcatgctcaagtactgccacagccgcgaccggcccacgccctacaagtgtggcatccgcagctgccagaagagctacagcttcgacttctacgtgccccagaggcagctgtgtctctgggatgaggatccctacccaggctag

SEQ ID NO: 3419 - protein, 284 aa, Homo sapiens [sequence omitted]

SEQ ID NO: 3420 - DNA, 3018 bp, Homo sapiens
ctcctcacaggtgtgtctctagtcctcgtggttgcctgccccactccctgccgagacgcctgccagaaaggtcacctatcctgaaccccagcaagcctgaaacagctcagccaagcaccctgcgatggaagctgcagatgcctccaggagcaacgggtcgagcccagaagccagggatgcccggagcccgtcgggccccagtggcagcctggagaatggcaccaaggctgacggcaaggatgccaagaccaccaacgggcacggcggggaggcagctgagggcaagagcctgggcagcgccctgaagccaggggaaggtaggagcgccctgttcgcgggcaatgagtggcggcgacccatcatccagtttgtcgagtccggggacgacaagaactccaactacttcagcatggactctatggaaggcaagaggtcgccgtacgcagggctccagctgggggctgccaagaagccacccgttacctttgccgaaaagggcgagctgcgcaagtccattttctcggagtcccggaagcccacggtgtccatcatggagcccggggagacccggcggaacagctacccccgggccgacacgggccttttttcacggtccaagtccggctccgaggaggtgctgtgcgactcctgcatcggcaacaagcagaaggcggtcaagtcctgcctggtgtgccaggcctccttctgcgagctgcatctcaagccccacctggagggcgccgccttccgagaccaccagctgctcgagcccatccgggactttgaggcccgcaagtgtcccgtgcatggcaagacgatggagctcttctgccagaccgaccagacctgcatctgctacctttgcatgttccaggagcacaagaatcatagcaccgtgacagtggaggaggccaaggccgagaaggagacggagctgtcactgcaaaaggagcagctgcagctcaagatcattgagattgaggatgaagctgagaagtggcagaaggagaaggaccgcatcaagagcttcaccaccaatgagaaggccatcctggagcagaacttccgggacctggtgcgggacctggagaagcaaaaggaggaagtgagggctgcgctggagcagcgggagcaggatgctgtggaccaagtgaaggtgatcatggatgctctggatgagagagccaaggtgctgcatgaggacaagcagacccgggagcagctgcatagcatcagcgactctgtgttgtttctgcaggaatttggtgcattgatgagcaattactctctccccccacccctgcccacctatcatgtcctgctggagggggagggcctgggacagtcactaggcaacttcaaggacgacctgctcaatgtatgcatgcgccacgttgagaagatgtgcaaggcggacctgagccgtaacttcattgagaggaaccacatggagaacggtggtgaccatcgctatgtgaacaactacacgaacagcttcgggggtgagtggagtgcaccggacaccatgaagagatactccatgtacctgacacccaaaggtggggtccggacatcataccagccctcgtctcctggccgcttcaccaaggagaccacccagaagaatttcaacaatctctatggcaccaaaggtaactacacctcccgggtctgggagtactcctccagcattcagaactctgacaatgacctgcccgtcgtccaaggcagctcctccttctccctgaaaggctatccctccctcatgcggagccaaagccccaaggcccagccccagacttggaaatctggcaagcagactatgctgtctcactaccggccattctacgtcaacaaaggcaacgggattgggtccaacgaagccccatgagctcctggcggaaggaacgaggcgccacacccctgctcttcctcctgaccctgctgctcttgccttctaagctactgtgcttgtctgggtgggagggagcctggtcctgcacctgccctctgcagccctctgccagcctcttgggggcagttccggcctctccgacttccccactggccacactccattcagactcctttcctgccttgtgacctcagatggtcaccatcattcctgtgctcagaggccaacccatcacaggggtgagataggttggggcctgccctaacccgccagcctcctcctctcgggctggatctgggggctagcagtgagtacccgcatggtatcagcctgcctctcccgcccacgccctgctgtctccaggcctatagacgtttctctccaaggccctatcccccaatgttgtcagcagatgcctggacagcacagccacccatctcccattcacatggcccacctcctgcttcccagaggactggccctacgtgctctctctcgtcctacctatcaatgcccagcatggcagaacctgcagcccttggccactgcagatggaaacctctcagtgtcttgacatcaccctacccaggcggtgggtctccaccacagccactttgagtctgtggtccctggagggtggcttctcctgactggcaggatgaccttagccaagatattcctctgttccctctgctgagataaagaattcccttaacatgatataatccacccatgcaaatagctactggcccagctaccatttaccatttgcctacagaatttcattcagtctacactttggcattctctctggcgatggagtgtggctgggctgaccgcaaaaggtgccttacacactgcccccaccctcagccgttgccccatcagaggctgcctcctccttctgattaccccccatgttgcatatcagggtgctcaaggattggagaggagacaaaaccaggagcagcacagtggggacatctcccgtctcaacagccccaggcctatgggggctctggaaggatgggccagcttgcaggggttggggagggagacatccagcttgggctttcccctttggaataaaccattggtctgtc

SEQ ID NO: 3421 - protein, 588 aa, Homo sapiens
MEAADASRSNGSSPEARDARSPSGPSGSLENGTKADGKDAKTTNGHGGEAAEGKSLGSALKPGEGRSALFAGNEWRRPIIQFVESGDDKNSNYFSMDSMEGKRSPYAGLQLGAAKKPPVTFAEKGELRKSIFSESRKPTVSIMEPGETRRNSYPRADTGLFSRSKSGSEEVLCDSCIGNKQKAVKSCLVCQASFCELHLKPHLEGAAFRDHQLLEPIRDFEARKCPVHGKTMELFCQTDQTCICYLCMFQEHKNHSTVTVEEAKAEKETELSLQKEQLQLKIIEIEDEAEKWQKEKDRIKSFTTNEKAILEQNFRDLVRDLEKQKEEVRAALEQREQDAVDQVKVIMDALDERAKVLHEDKQTREQLHSISDSVLFLQEFGALMSNYSLPPPLPTYHVLLEGEGLGQSLGNFKDDLLNVCMRHVEKMCKADLSRNFIERNHMENGGDHRYVNNYTNSFGGEWSAPDTMKRYSMYLTPKGGVRTSYQPSSPGRFTKETTQKNFNNLYGTKGNYTSRVWEYSSSIQNSDNDLPVVQGSSSFSLKGYPSLMRSQSPKAQPQTWKSGKQTMLSHYRPFYVNKGNGIGSNEAP

SEQ ID NO: 3422 - DNA, 2196 bp, Homo sapiens
ctcctcacaggtgtgtctctagtcctcgtggttgcctgccccactccctgccgagacgcctgccagaaaggtcacctatcctgaaccccagcaagcctgaaacagctcagccaagcaccctgcgatggaagctgcagatgcctccaggagcaacgggtcgagcccagaagccagggatgcccggagcccgtcgggccccagtggcagcctggagaatggcaccaaggctgacggcaaggatgccaagaccaccaacgggcacggcggggaggcagctgagggcaagagcctgggcagcgccctgaagccaggggaaggtaggagcgccctgttcgcgggcaatgagtggcggcgacccatcatccagtttgtcgagtccggggacgacaagaactccaactacttcagcatggactctatggaaggcaagaggtcgccgtacgcagggctccagctgggggctgccaagaagccacccgttacctttgccgaaaagggcgagctgcgcaagtccattttctcggagtcccggaagcccacggtgtccatcatggagcccggggagacccggcggaacagctacccccgggccgacacgggccttttttcacggtccaagtccggctccgaggaggtgctgtgcgactcctgcatcggcaacaagcagaaggcggtcaagtcctgcctggtgtgccaggcctccttctgcgagctgcatctcaagccccacctggagggcgccgccttccgagaccaccagctgctcgagcccatccgggactttgaggcccgcaagtgtcccgtgcatggcaagacgatggagctcttctgccagaccgaccagacctgcatctgctacctttgcatgttccaggagcacaagaatcatagcaccgtgacagtggaggaggccaaggccgagaaggagacggagctgtcactgcaaaaggagcagctgcagctcaagatcattgagattgaggatgaagctgagaagtggcagaaggagaaggaccgcatcaagagcttcaccaccaatgagaaggccatcctggagcagaacttccgggacctggtgcgggacctggagaagcaaaaggaggaagtgagggctgcgctggagcagcgggagcaggatgctgtggaccaagtgaaggtgatcatggatgctctggatgagagagccaaggtgctgcatgaggacaagcagacccgggagcagctgcatagcatcagcgactctgtgttgtttctgcaggaatttggtgcattgatgagcaattactctctccccccacccctgcccacctatcatgtcctgctggagggggagggcctgggacagtcactaggcaacttcaaggacgacctgctcaatgtatgcatgcgccacgttgagaagatgtgcaaggcggacctgagccgtaacttcattgagaggaaccacatggagaacggtggtgaccatcgctatgtgaacaactacacgaacagcttcgggggtgagtggagtgcaccggacaccatgaagagatactccatgtacctgacacccaaaggtggggtccggacatcataccagccctcgtctcctggccgcttcaccaaggagaccacccagaagaatttcaacaatctctatggcaccaaaggtaactacacctcccgggtctgggagtactcctccagcattcagaactctgacaatgacctgcccgtcgtccaaggcagctcctccttctccctgaaaggctatccctccctcatgcggagccaaagccccaaggcccagccccagacttggaaatctggcaagcagactatgctggtggtttaagcaaggtctgagcatccctcaagtcctgctgtggaccacacaaaggcaaggagctgaccaggaggtgtcagttccctgagagacagggccaaaggcagtgtacccttgagtctcactaccggccattctacgtcaacaaaggcaacgggattgggtccaacgaagccccatgagctcctggcggaagggtgctcaaggattggagaggagacaaaaccaggagcagcacagtggggacatctcccgtctcaacagccccaggcctatgggggctctggaaggatgggccagcttgcaggggttggggagggagacatccagcttgggctttcccctttggaataaaccattggtctgtc

SEQ ID NO: 3423 - protein, 570 aa, Homo sapiens
MEAADASRSNGSSPEARDARSPSGPSGSLENGTKADGKDAKTTNGHGGEAAEGKSLGSALKPGEGRSALFAGNEWRRPIIQFVESGDDKNSNYFSMDSMEGKRSPYAGLQLGAAKKPPVTFAEKGELRKSIFSESRKPTVSIMEPGETRRNSYPRADTGLFSRSKSGSEEVLCDSCIGNKQKAVKSCLVCQASFCELHLKPHLEGAAFRDHQLLEPIRDFEARKCPVHGKTMELFCQTDQTCICYLCMFQEHKNHSTVTVEEAKAEKETELSLQKEQLQLKIIEIEDEAEKWQKEKDRIKSFTTNEKAILEQNFRDLVRDLEKQKEEVRAALEQREQDAVDQVKVIMDALDERAKVLHEDKQTREQLHSISDSVLFLQEFGALMSNYSLPPPLPTYHVLLEGEGLGQSLGNFKDDLLNVCMRHVEKMCKADLSRNFIERNHMENGGDHRYVNNYTNSFGGEWSAPDTMKRYSMYLTPKGGVRTSYQPSSPGRFTKETTQKNFNNLYGTKGNYTSRVWEYSSSIQNSDNDLPVVQGSSSFSLKGYPSLMRSQSPKAQPQTWKSGKQTMLVV

SEQ ID NO: 3424 - DNA, 1039 bp, Homo sapiens
  unsure 622: unknown base
ggtgactttttgaaaagatagtatctcttgttgcaagaaatggtccatctgtgatttcaagtctctcgcttgagtgaattggatggaagtgtgaatttcagccgaagtggccaaagaaatcctgttcctgtgataatgaacgccatcagcctctgcacctctgttttcccttctgccacatgttgcctgttctccgtgactttggccccgcagcgcctccaccccagagacccggaccaagttcacacaggacaatctgtgccgtgcccagcgcaagcgcctggagctcggccaacctgtgggttcttgtggactgcatccttcgcgacacctccgaggacctgggactccagtgtgacgccgtgaacctggccttcgggcgccgctgtgaggaactggaggacgcgcggcacaagctgcagcaccacctgcacaagatgctgcgggaaatcacagatcaggaacacaacgtggtggcactgaaggaggccatcaaggacaaggaggaacctctgcacatagcccagacccggctgtacctgccctcacaccggcccaacatgcagctgtgccgcgaagcagcccagttcaggtactgcctgggcctctgaagcagtcccangtgcccccatccacctcctcgctgttaccctctccaataaacactccaatctccacacacacatcccccacaggtgctgagaggggagggagactttgcggccacacacaacacgcaagcacgccttaaacacacagatatagacatgacactgggcaggtcatgggtcgggggcctcccagtgccagggacctgtgcccacgtggtctcaccccaccctgtgctacctcatcttcccggggaggaagctccttcagacaaggtgagctcctggaggccacggggccagagaggccagagagggccattccctgctgccctgagggtgttgtccccacctctggtggaaagtatgacctacgcctgggctacaggcatagatgggccgtccttttgtttcccttgttaacggatgcc

SEQ ID NO: 3425 - protein, 143 aa, Homo sapiens
MLPVLRDFGPAAPPPQRPGPSSHRTICAVPSASAWSSANLWVLVDCILRDTSEDLGLQCDAVNLAFGRRCEELEDARHKLQHHLHKMLREITDQEHNVVALKEAIKDKEEPLHIAQTRLYLPSHRPNMQLCREAAQFRYCLGL

SEQ ID NO: 3426 - DNA, 309 bp, Homo sapiens
atgggaaattcgatggacatggacataagccccctgaggccccaggactatcttttcagttgtgaactaaaggccgacgaattgaagtgtggttcagggccagtgtatattagtggacagcacttagtatctgtggaggaagatgcagagtcagaagatgaagaagaggaggatgtgaaactcttaatcgaagccaagttcatcaattatgtgaagaattgcttccggaagactgaccaggaggctattcaagatctctggcagcggaggaagcctcttgaagaaaatagtttaaacagttttttataa

SEQ ID NO: 3427 - DNA, 3495 bp, Homo sapiens
acaatttcgcgccaaacttgaccgcgcgttctgctgtaacgagcgggctcggaggtcctcccgctgctgtcatggttggttcgctaaactgcatcgtcgctgtgtcccagaacatgggcatcggcaagaacggggacctgccctggccaccgctcaggaatgaattcagatatttccagagaatgaccacaacctcttcagtagaaggtaaacagaatctggtgattatgggtaagaagacctggttctccattcctgagaagaatcgacctttaaagggtagaattaatttagttctcagcagagaactcaaggaacctccacaaggagctcattttctttccagaagtctagatgatgccttaaaacttactgaacaaccagaattagcaaataaagtagacatggtctggatagttggtggcagttctgtttataaggaagccatgaatcacccaggccatcttaaactatttgtgacaaggatcatgcaagactttgaaagtgacacgttttttccagaaattgatttggagaaatataaacttctgccagaatacccaggtgttctctctgatgtccaggaggagaaaggcattaagtacaaatttgaagtatatgagaagaatgattaatatgaaggtgttttctagtttaagttgttccccctccctctgaaaaaagtatgtatttttacattagaaaaggttttttgttgactttagatctataattatttctaagcaactagtttttattccccactactcttgtctctatcagataccatttatgagacattcttgctataactaagtgcttctccaagaccccaactgagtccccagcacctgctatagtgagctgccattccacacccatcacatgtggcactcttgccagtccttgacattgtcgggcttttcacatgttggtaatatttattaaagatgaagatccacatacccttcaactgagcagtttcactagtggaaataccaaaagattcctacgtgtatatccagaggtttgtagataaatgttgccaccttgtttgtaacagtggaaaattgaaaacaacctggaagtccagtgatgggaaaatgagtatgtttctgtcttagattggggaacccaaagcagattgcaagactgaaatttcagtgaaagcagtgtatttgctaggtcataccagaaatcatcaattgaggtacggagaaactgaactgagaaggtaagaaaagcaatttaaagtcagcgagcaggttctcattgataacaagctccatactgctgagatacagggaaatggaggggggaaagctggagtattgatcccgcccccctccttggttgtcagctccctgtcctgtgtgtgggcggaacatagtccagctgctctatagcaagtctcaggtgtttgcagtaagaagctgctggcatgcacgggaacagtgaatgccaaacacttaaagcaattcgatgtttaagtatgtaagttcttttttttttagacagcgtttcgctcttgttgcccaggctagcatgcaatggtgtgacctcggcttactgcaacctccgccttcccagattcaagcgattctcctgcctcaggctcccaagtagctgggaccgggtgcgcgccaccacgcccggctaatttttgtattttgtatttttggtagagatggggtttcgccatgttggtcaggctagtctcgaactcgtgaccgcaagcgattcacccacctcagcctcccaaagtgctgggattaccggcttgagccaccacacccggcacatcttcattctttttatgtagtaaaaagtataaggccacacatggtttatttgaagtattttacaatttaaaaaaatacagaagcaggaaaaccaattataagttcaagtgagggatgatggttgcttgaaccaaagggttgcatgtagtaagaaattgtgatttaagatatattttaaagttataagtagcaggatattctgatggagtttgactttggttttgggcccacggagtttcagatgcctttgagaaatgaatgaagtagagagaaaataaaagaaaaactagccaggcacagtggctcacgcctgtaatcccagcgctttgggaggctaaggcaggcagatcacttgagaccagcttgggcaacatggcgaagccccatctctacaaaaaacacagaaattagctgggcattgtggcgcacacctgtattcccatctactcaggaagctgagatggaagaattaattgagcccacgagttcaaggctgcagtgagtcgtgattgtgccactgcactccagccggggtgacagaagagaccttgtctcgaaaaggaatctgaaaacaatggaaccatgccttcataattctagaaagttattttcaactgataaatctatattcacccaaataatcaagggtgaaggtaaaataatacatttttagacaagcaaagactcaggggttacctccatgtgccctttttagggaagctgttggagaaaatactccagcaaaatgaaggagtacacaaaccagagaatgacatgaatccagcaaataggatccaacacaggcaatattccagctatggagctagctttaaaaaggaacagtaaaaatattaatcggttagctgggtggaatggcccatgcctgtagtcccagctactcgggaggctcagcagcaggacgacttgagcccaagagttccagaccagcctggccaccttagtgagatcccttctcttaaaaataataacttattgccagatttggggcatttggaaagaagttcattgaagataaagcaaaagtaaaaaaaaaaaaaaaaaaaaaacaaggggaaagggttggttaggcaatcattctagggcagaaagaagtacaggataggaagagcataatacactgtttttctcaacaaggagcagtatgtacacagtcataatgatgtgactgcttagcccctaaatatggtaactactctgggacaatatgggaggaaaagtgaagattgtgatggtgtaagagctaaatcctcatctgtcatatccagaaatcactatataatacataataatgaaatgactaagttatgtgaggaaaaaaacagaagacattgctaaaagagttaaaagtcattgctctggagaattaggagggatggggcaggggactgttaggatgcattataaactgaaaagcctttttaaaattttatgtattaatatatgcattcacttgaaaaactaaaaaaaaacaataatttggaaaaacccatgaaggtaactaacggaaggaaaaactaagagaatgaaaagtatttgcctctggaaagaacaactggcaggactgttgttttcattgtaagacttttggagccatttaattgtacttaaccattttcatctatttctttaataagaacaattccatcttaataaagagttacacttgttaata

SEQ ID NO: 3428 - DNA, 810 bp, Homo sapiens
ggaggtcctcccgctgctgtcatggttggttcgctaaactgcatcgtcgctgtgtcccagaacatgggcatcggcaagaacggggacctgccctggccaccgctcaggaatgaattcagatatttccagagaatgaccacaacctcttcagtagaaggtaaacagaatctggtgattatgggtaagaagacctggttctccattcctgagaagaatcgacctttaaagggtagaattaatttagttctcagcagagaactcaaggaacctccacaaggagctcattttctttccagaagtctagatgatgccttaaaacttactgaacaaccagaattagcaaataaagtagacatggtctggatagttggtggcagttctgtttataaggaagccatgaatcacccaggccatcttaaactatttgtgacaaggatcatgcaagactttgaaagtgacacgttttttccagaaattgatttggagaaatataaacttctgccagaatacccaggtgttctctctgatgtccaggaggagaaaggcattaagtacaaatttgaagtatatgagaagaatgattaatatgaaggtgttttctagtttaagttgttccccctccctctgaaaaaaataccatttatgagacattcttgctataactaagtgcttctccaagaccccaactgagtccccagcacctgctatagtgagctgccattccacacccatcacatgtggcactcttgccagtccttgacattgtcgggcttttcacatgttggtaatatttattaaagatgaagatcc

SEQ ID NO: 3429 - DNA, 7149 bp, Homo sapiens
atgtctggcggcgccgcagagaagcagagcagcactcccggttccctgttcctctcgccgccggctcctgcccccaagaatggctccagctccgattcctccgtgggggagaaactgggagccgcggccgccgacgctgtgaccggcaggaccgaggagtacaggcgccgccgccacactatggacaaggacagccgtggggcggccgcgaccactaccaccactgagcaccgcttcttccgccggagcgtcatctgtgactccaatgccactgcactggagcttcccggccttcctctttccctgccccagcccagcatccccgcggctgtcccgcagagtgctccaccggagccccaccgggaagagaccgtgaccgccaccgccacttcccaggtagcccagcagcctccagccgctgccgcccctggggaacaggccgtcgcgggccctgccccctcgactgtccccagcagtaccagcaaagaccgcccagtgtcccagcctagccttgtggggagcaaagaggagccgccgccggcgagaagtggcagcggcggcggcagcgccaaggagccacaggaggaacggagccagcagcaggatgatatcgaagagctggagaccaaggccgtgggaatgtctaacgatggccgctttctcaagtttgacatcgaaatcggcagaggctcctttaagacggtctacaaaggtctggacactgaaaccaccgtggaagtcgcctggtgtgaactgcaggatcgaaaattaacaaagtctgagaggcagagatttaaagaagaagctgaaatgttaaaaggtcttcagcatcccaatattgttagattttatgattcctgggaatccacagtaaaaggaaagaagtgcattgttttggtgactgaacttatgacgtctggaacacttaaaacgtatctgaaaaggtttaaagtgatgaagatcaaagttctaagaagctggtgccgtcagatccttaaaggtcttcagtttcttcatactcgaactccacctatcattcaccgcgatcttaaatgtgacaacatctttatcaccggccctactggctcagtcaagattggagacctcggtctggcaaccctgaagcgggcttcttttgccaagagtgtgataggtaccccagagttcatggcccctgagatgtatgaggagaaatatgatgaatccgttgacgtttatgcttttgggatgtgcatgcttgagatggctacatctgaatatccttactcggagtgccaaaatgctgcacagatctaccgtcgcgtgaccagtggggtgaagccagccagttttgacaaagtagcaattcctgaagtgaaggaaattattgaaggatgcatacgacaaaacaaagatgaaagatattccatcaaagaccttttgaaccatgccttcttccaagaggaaacaggagtacgggtagaattagcagaagaagatgatggagaaaaaatagccataaaattatggctacgtattgaagatattaagaaattaaagggaaaatacaaagataatgaagctattgagttttcttttgatttagagagagatgtcccagaagatgttgcacaagaaatggtagagtctgggtatgtctgtgaaggtgatcacaagaccatggctaaagctatcaaagacagagtatcattaattaagaggaaacgagagcagcggcagttggtacgggaggagcaagaaaaaaaaaagcaggaagagagcagtctcaaacagcaggtagaacaatccagtgcttcccagacaggaatcaagcagctcccttctgctagcaccggcatacctactgcttctaccacttcagcttcagtttctacacaagtagaacctgaagaacctgaggcagatcaacatcaacaactacagtaccagcaacccagtatatctgtgttatctgatgggacggttgacagtggtcagggatcctctgtcttcacagaatctcgagtgagcagccaacagacagtttcatatggttcccaacatgaacaggcacattctacaggcacagtcccagggcatataccttctactgtccaagcacagtctcagccccatggggtatatccaccctcaagtgtggcacaggggcagagccagggtcagccatcctcaagtagcttaacaggggtttcatcttcccaacccatacaacatcctcagcagcagcagggaatacagcagacagcccctcctcaacagacagtgcagtattcactttcacagacatcaacctccagtgaggccactactgcacagccagtgagtcagcctcaagctccacaagtcttgcctcaagtatcagctggaaaacagcttccagtttcccagccagtaccaactatccaaggcgaacctcagatcccagttgcgacacaaccctcggttgttccagtccactctggtgctcatttccttccagtgggacagccgctccctactcccttgctccctcagtaccctgtctctcagattcccatatcaactcctcatgtgtctacggctcagacaggtttctcatcccttcccatcacaatggcagctggcattactcagcctctgctcacgttggcttcatctgctacaacagctgcgatcccgggggtatcaactgtggttcctagtcagcttccaacccttctgcagcctgtgactcagctgccaagtcaggttcacccacagctcctacaaccagcagttcagtccatgggaataccagctaaccttggacaagctgctgaggttccactttcctctggagatgttctgtaccagggcttcccacctcgactgccaccacagtacccaggagattcaaatattgctccctcttccaacgtggcttctgtttgcatccattctacagtcctatcccctcccatgccgacagaagtactggctacacctgggtactttcccacagtggtgcagccttatgtggaatcaaatcttttagttcctatgggtggtgtaggaggacaggttcaagtgtcccagccaggagggagtttagcacaagcccccactacatcctcccagcaagcagttttggagagtactcagggagtctctcaggttgctcctgcagagccagttgcagtagcacagacccaagctacccagccgaccactttggcttcctctgtagacagtgcacattcagatgttgcttcaggtatgagtgatggcaatgagaacgtcccatcttccagtggaaggcatgaaggaagaactacaaaacggcattaccgaaaatctgtaaggagtcgctctcgacatgaaaaaacttcacgcccaaaattaagaattttgaatgtttcaaataaaggagaccgagtagtagaatgtcaattagagactcataataggaaaatggttacattcaaatttgacctagatggtgacaaccccgaggagatagcaacaattatggtgaacaatgactttattctagcaatagagagagagtcgtttgtggatcaagtgcgagaaattattgaaaaagctgatgaaatgctcagtgaggatgtcagtgtggaaccagagggtgatcagggattggagagtctacaaggaaaggatgactatggcttttcaggttctcagaaattggaaggagagttcaaacaaccaattcctgcgtcttccatgccacagcaaataggcattcctaccagttctttaactcaagttgttcattctgcgggaaggcggtttatagtgagtcctgtgccagaaagccgattacgagaatcaaaagttttccccagtgaaataacagatacagttgctgcctctacagctcagagccctggaatgaacttgtctcactctgcatcatcccttagtctacaacaggccttttctgaacttagacgtgcccaaatgacagaaggacccaacacagcacctccaaactttagtcatacaggaccaacatttccagtagtacctcctttcttaagtagcattgctggagtcccaaccacagcagcagccacagcaccagtccctgcaacaagcagccctcctaatgacatttccacatcagtaattcagtctgaggttacagtgcccactgaagaggggattgctggagttgccaccagcacaggtgtggtaacttcaggtggtctccccataccacctgtgtctgaatcaccagtactttccagcgtagtttcaagtatcacaatacctgcagttgtctcaatatctactacatccccgtcacttcaagtccccacatccacatctgagatcgttgtttctagtacagcactgtatccttcagtaacagtttcagcaacttcagcctctgcagggggcagtactgctaccccaggtcctaagcctccagctgtagtatctcagcaggcagcaggcagcactactgtgggagccacattaacatcagtttctaccaccacttcattcccaagcacagcttcacagctgtgcattcagcttagcagcagtacttctactcctactttagctgaaaccgtggtagttagcgcacactcactagataagacatctcatagcagtacaactggattggctttctccctctctgcaccatcttcctcttcctctcctggagcaggagtgtctagttatatttctcagcctggtgggctgcatcctttggtcattccatcagtgatagcttctactcctattcttccccaagcagcaggacctacttctacacctttattaccccaagtacctagtatcccacccttggtacagcctgttgccaatgtgcctgctgtacagcagacactaattcatagtcagcctcaaccagctttgcttcccaaccagccccatactcattgtcctgaagtagattctgatacacaacccaaagctcctggaattgatgacataaagactctagaagaaaagctgcggtctctgttcagtgaacacagctcatctggagctcagcatgcctctgtctcactggagacctcactagtcatagagagcactgtcacaccaggcatcccaactactgctgttgcaccaagcaaactcctgacttctaccacaagtacttgcttaccaccaaccaatttaccactaggaacagttgctttgccagttacaccagtggtcacacctgggcaagtttctaccccagtcagcactactacatcaggagtgaaacctggaactgctccctccaagccacctctaactaaggctccggtgctgccagtgggtactgaacttccagcaggtactctacccagcgagcagctgccaccttttccaggaccttctctaacccagtcccagcaacctctagaggatcttgatgctcaattgagaagaacacttagtccagagatgatcacagtgacttctgcggttggtcctgtgtccatggcggctccaacagcaatcacagaagcaggaacacagcctcagaagggtgtttctcaagtcaaagaaggccctgtcctagcaactagttcaggagctggtgtttttaagatgggacgatttcaggtttctgttgcagcagacggtgcccagaaagagggtaaaaataagtcagaagatgcaaagtctgttcattttgaatccagcacctcagagtcctcagtgctatcaagtagtagtccagagagtaccttggtgaaaccagagccgaatggcataaccatccctggtatctcttcagatgtgccagagagtgcccacaaaactactgcctcagaggcaaagtcagacactgggcagcctaccaaggttggacgttttcaggtgacaactacagcaaacaaagtgggtcgtttctctgtatcaaaaactgaggacaagatcactgacacaaagaaagaaggaccagtggcatctcctccttttatggatttggaacaagctgttcttcctgctgtgataccaaagaaagagaagcctgaactgtcagagccttcacatctaaatgggccgtcttctgacccggaggccgcttttttaagtagggatgtggatgatggttccggtagtccacactcgccccatcagctgagctcaaagagccttcctagccagaatctaagtcaaagccttagtaattcatttaactcctcttacatgagtagcgacaatgagtcagatatcgaagatgaagacttaaagttagagctgcgacgactacgagataaacatctcaaagagattcaggacctgcagagtcgccagaagcatgaaattgaatctttgtataccaaactgggcaaggtgccccctgctgttattattcccccagctgctcccctttcagggagaagacgacgacccactaaaagcaaaggcagcaaatctagtcgaagcagttccttggggaataaaagcccccagctttcaggtaacctgtctggtcagagtgcagcttcagtcttgcacccccagcagaccctccaccctcctggcaacatcccagagtccgggcagaatcagctgttacagccccttaagccatctccctccagtgacaacctctattcagccttcaccagtgatggtgccatttcagtaccaagcctttctgctccaggtcaaggaaccagcagcacaaacactgttggggcaacagtgaacagccaagccgcccaagctcagcctcctgccatgacgtccagcaggaagggcacattcacagatgacttgcacaagttggtagacaattgggcccgagatgccatgaatctctcaggcaggagaggaagcaaagggcacatgaattacgagggccctggaatggcaaggaagttctctgcacctgggcaactgtgcatctccatgacctcgaacctgggtggctctgcccccatctctgcagcatcagctacctctctaggtcacttcaccaagtctatgtgccccccacagcagtatggctttccagctaccccatttggcgctcaatggagtgggacgggtggcccagcaccacagccacttggccagttccaacctgtgggaactgcctccttgcagaatttcaacatcagcaatttgcagaaatccatcagcaaccccccaggctccaacctgcggaccacttag

SEQ ID NO: 3430 - DNA, 4943 bp, Homo sapiens
cggcggcggcggtagtggcggcggcggcggtgcccgggcggcagcggcagcagtagcggcagccctgaggacggtgagacggccgcggcggcggcgacagcgcggaagtcgcgcgggacccagagcttcccccctgtcgctagtgctgaggctttcgcctttcctacccagcttcttgctcacggcccgggctgggctgggcagggcaacgcgcccccgggcaggggcggagctgtagatatggtgtaagatacttcttcaagattggacagctggggaccttcttctgattaaccttaaaccaacttgtagccatagagacacctcacaaggttcccatttttgttgttgttgttgttgattttctgctcacacctttcctgaccttgcaaccatgtatggaagtgcccgctctgttgggaaggtggagccgagcagccagagccctgggcgttcacccaggcttccacgttcccctcgcttgggtcaccgtcgaaccaacagtacgggagggagttcgggaagcagtgttggaggtggcagtgggaaaaccctttcaatggaaaatatacaatctttaaatgctgcctatgccacctctggccctatgtatctaagtgaccatgaaaatgtgggttcagaaacacctaaaagcaccatgacacttggccgttctgggggacgtctgccttacggtgttcggatgactgctatgggtagtagccccaatatagctagcagtggggttgctagtgacaccatagcatttggagagcatcacctccctcctgtgagtatggcatccactgtacctcactcccttcgtcaggcgagagataacacaatcatggatctgcagacacagctgaaggaagtattaagagaaaatgatctcttgcggaaggatgtggaagtaaaggagagcaaattgagttcttcaatgaatagcatcaagaccttctggagcccagagctgaagaaggaacgagccctgagaaaagatgaagcttccaaaatcaccatttggaaggaacagtacagagttgtacaggaggaaaaccagcacatgcagatgacaatccaggctctccaggatgaattgcggatccagagggacctgaatcagctgtttcagcaggatagtagcagcaggactggcgaaccttgtgtagcagagctgacagaggagaactttcagaggcttcatgctgagcatgagcggcaggccaaagagctgtttcttcttcgaaagacattggaggaaatggagctgcgtattgagactcaaaagcagaccctaaatgctcgggatgaatccattaagaagcttctggaaatgttgcagagcaaaggactttctgccaaggctaccgaggaagaccatgagagaacaagacgactggcagaggcagagatgcacgttcatcacctagaaagccttttggagcagaaggaaaaagagaacagtatgttgagagaggagatgcatcgaaggtttgagaatgctcctgattctgccaaaacaaaagctctgcaaactgttattgagatgaaggattcaaaaatttcctctatggagcgtgggcttcgagacctggaagaggaaattcagatgctgaaatcgaatggtgctttgagtactgaggaaagggaagaagaaatgaagcaaatggaagtgtatcggagccattctaaatttatgaaaaataagattggccaggtgaaacaggagctgtccagaaaggacacagaactactcgccctgcagacaaagctagaaacactcacaaaccagttctcagatagtaaacagcacattgaagtgttgaaggagtccttgactgctaaggagcagagggctgccatcctgcagactgaggtggatgctctccgattgcgtttggaagagaaggaaaccatgttgaataaaaagacaaaacaaattcaggatatggctgaagagaaggggacacaagctggagagatacatgacctcaaggacatgttggatgtgaaggagcggaaggttaatgttcttcagaagaagattgaaaatcttcaagagcagcttagagacaaggaaaagcagatgagcagcttgaaagaacgggtcaaatccttgcaggctgacaccaccaacactgacactgccttgacaactttggaggaggcccttgcagagaaagagcggacaattgaacgcttaaaggagcagagggacagagatgagcgagagaagcaagaggaaattgataactacaaaaaagatcttaaagacttgaaggaaaaagtcagcctgttgcaaggcgacctttcagagaaagaggcttcacttttggatctgaaagagcatgcttcttctctggcatcctcaggactgaaaaaggactcacggcttaagacactagagattgctttggagcagaagaaggaggagtgtctgaaaatggaatcacaattgaaaaaggcacatgaggcagcattggaagccagagccagtccagagatgagtgaccgaatacagcacttggagagagagatcaccaggtacaaagatgaatctagcaaggcccaggcagaagttgatcgactcttagaaatcttgaaggaggtggaaaatgagaagaatgacaaagataagaagatagctgagttggaaagtctcacctcaaggcaagtgaaagaccagaataagaaggtagcaaatctgaagcacaaggaacaggtggaaaaaaagaagagtgcacaaatgttagaggaggcgcgacgacgggaggacaatctcaacgacagctctcagcagctacaggtggaggagttactgatggccatggagaaggtaaagcaggaactagaatccatgaaagcaaagctgtcctccacccagcagtctctggcagaaaaggaaactcacttgactaatcttcgggcagagagaaggaaacacttagaggaagttctggagatgaagcaagaagctcttctggctgccattagtgaaaaagacgccaatatagctctcttggagctttcgtcctctaagaagaagacccaagaggaagtggctgccctgaagcgggagaaggatcgtctggtacagcagcttaagcagcagacgcaaaatcgaatgaagctaatggccgacaactacgaggatgaccacttcaaatcctcccattccaatcaaacaaatcacaagccctccccagaccaggatgaggaggagggtatatgggcatagccaatcagaggcttagttcagccattttgttcagaacgatcatccagcccctcttagaacttgaccaaaatagaagtaaattaaagttgtacattggacacctgacaaccctctgccatgaccgagaccccctgatcctccgtggactcactccaccagcttcctataacttggacgatgaccaggcggcttgggagaatgagctgcagaagatgacccgggggcagcttcaggatgagttagagaaaggtgaacgggacaatgcagaactgcaggagtttgccaacgccattcttcagcagatagcagaccattgtcccgacatcctagagcaagtggtcaacgccctggaagagtcctcttgaccctgctttatggggaagcctgaggtagtcaacccaggagccaagaaaagagaactacgaggaacaggtgcccggaaccttcttggcaccaaacactacaaacttcatcccaacttgctcacttgaagaagtgtgattccagcaccgtttctacatctgccatcttactctgcctttctgctttggatgtggtctctacactaaccttcttgatgtccagggtagataaagggtcgaatctctctgaagaactgccacctggtcatcagcagtggagaactgtgggagctggtggctctgccctgacagagagccatggagcagaggagcctctcacctcctgtcctctgacatgagaatgaaaccaggaatggacttggagttcaacaggctgagaggatgcctccaatggaccagagagctgagtgttctaatatcacaataggtgctttctcctaaaagggcaaaaaacaatctcaaaaagattagaaaaagagaaggggggaagggaagagaaaatcgactcttctttttactgtctcttctgcttactttccacatgagatgctttgtaccggggagctgtgagcaggcctcacgatggcttgggagcactcgttctcccaaggtctgagtcttcatccagccctgcctgtctgtcgcagccttcctcactctgttcctcggccagttaacaagaagatggtgtgaggtgttctccaccagtctctcctgtttgagactgttgacgttatcatactgaggtgttagatcaaatatctctaattgaagaacatgtgaggttgaaagagcaccagccagggcaacatagcgtgaccctgtctctacaaaaaattaaaaagagaacatacaaagttgacatatgagaccctgttgtccccgcctgcagctttgccccagtaacagatgcccgttgctcttgggctggtttcccctgaacacctccaagaggctgcctgccttgccagcacccgtgtcctgagctcctgcagcccagtggctgctgaagttgtgatccctcactcaccctgctagctttgcccttgactcgtcttctctgaacctcagcctcgtgcattgcctggaaccttcttctagcataaatgaaggtttttcctcctacacacattccttcctcggttatttcattcagagaatatttatgaaatgcctactgtgtgcaagtcatccatccttgaaaaggccacttctcagtgagggagagatgtagtggattctgtgagacatacctgctggagttgaagcagtaaatagcatgtccttcccctccccgatcttaaggtgtgttttctaga

SEQ ID NO: 3431 - protein, 948 aa, Homo sapiens
MYGSARSVGKVEPSSQSPGRSPRLPRSPRLGHRRTNSTGGSSGSSVGGGSGKTLSMENIQSLNAAYATSGPMYLSDHENVGSETPKSTMTLGRSGGRLPYGVRMTAMGSSPNIASSGVASDTIAFGEHHLPPVSMASTVPHSLRQARDNTIMDLQTQLKEVLRENDLLRKDVEVKESKLSSSMNSIKTFWSPELKKERALRKDEASKITIWKEQYRVVQEENQHMQMTIQALQDELRIQRDLNQLFQQDSSSRTGEPCVAELTEENFQRLHAEHERQAKELFLLRKTLEEMELRIETQKQTLNARDESIKKLLEMLQSKGLSAKATEEDHERTRRLAEAEMHVHHLESLLEQKEKENSMLREEMHRRFENAPDSAKTKALQTVIEMKDSKISSMERGLRDLEEEIQMLKSNGALSTEEREEEMKQMEVYRSHSKFMKNKIGQVKQELSRKDTELLALQTKLETLTNQFSDSKQHIEVLKESLTAKEQRAAILQTEVDALRLRLEEKETMLNKKTKQIQDMAEEKGTQAGEIHDLKDMLDVKERKVNVLQKKIENLQEQLRDKEKQMSSLKERVKSLQADTTNTDTALTTLEEALAEKERTIERLKEQRDRDEREKQEEIDNYKKDLKDLKEKVSLLQGDLSEKEASLLDLKEHASSLASSGLKKDSRLKTLEIALEQKKEECLKMESQLKKAHEAALEARASPEMSDRIQHLEREITRYKDESSKAQAEVDRLLEILKEVENEKNDKDKKIAELESLTSRQVKDQNKKVANLKHKEQVEKKKSAQMLEEARRREDNLNDSSQQLQVEELLMAMEKVKQELESMKAKLSSTQQSLAEKETHLTNLRAERRKHLEEVLEMKQEALLAAISEKDANIALLELSSSKKKTQEEVAALKREKDRLVQQLKQQTQNRMKLMADNYEDDHFKSSHSNQTNHKPSPDQDEEEGIWA

SEQ ID NO: 3432 - DNA, 2184 bp, Homo sapiens
tattcttccaaatggaaactgctaatttttgaagcagaaggttgacagcttcagtaagatctcaagagagcgagaagactggaatcagggaaccctactctggaaactgtcagtcccagggcactggggagggctgaggccgaccatgcccagcctgctgctgctgttcacggctgctctgctgtccagctgggctcagcttctgacagacgccaactcctggtggtcattagctttgaacccggtgcagagacccgagatgtttatcatcggtgcccagcccgtgtgcagtcagcttcccgggctctcccctggccagaggaagctgtgccaattgtaccaggagcacatggcctacataggggagggagccaagactggcatcaaggaatgccagcaccagttccggcagcggcggtggaattgcagcacagcggacaacgcatctgtctttgggagagtcatgcagataggcagccgagagaccgccttcacccacgcggtgagcgccgcgggcgtggtcaacgccatcagccgggcctgccgcgagggcgagctctccacctgcggctgcagccggacggcgcggcccaaggacctgccccgggactggctgtggggcggctgtggggacaacgtggagtacggctaccgcttcgccaaggagtttgtggatgcccgggagcgagagaagaactttgccaaaggatcagaggagcagggccgggtgctcatgaacctgcaaaacaacgaggccggtcgcagggctgtgtataagatggcagacgtagcctgcaaatgccacggcgtctcggggtcctgcagcctcaagacctgctggctgcagctggccgagttccgcaaggtcggggaccggctgaaggagaagtacgacagcgcggccgccatgcgcgtcacccgcaagggccggctggagctggtcaacagccgcttcacccagcccaccccggaggacctggtctatgtggaccccagccccgactactgcctgcgcaacgagagcacgggctccctgggcacgcagggccgcctctgcaacaagacctcggagggcatggatggctgtgagctcatgtgctgcgggcgtggctacaaccagttcaagagcgtgcaggtggagcgctgccactgcaagttccactggtgctgcttcgtcaggtgtaagaagtgcacggagatcgtggaccagtacatctgtaaatagcccggagggcctgctcccggcccccctgcactctgcctcacaaaggtctatattatataaatctatataaatctattttatatttgtataagtaaatgggtgggtgctatacaatggaaagatgaaaatggaaaggaagagcttatttaagagacgctggagatctctgaggagtggactttgctggttctctcctcttggtgggtgggagacagggctttttctctccctctggcgaggactctcaggatgtagggacttggaaatatttactgtctgtccaccacggcctggaggagggaggttgtggttggatggaggagatgatcttgtctggaagtctagagtctttgttggttagaggactgcctgtgatcctggccactaggccaagaggccctatgaaggtggcgggaactcagcttcaacctcgatgtcttcagggtcttgtccagaatgtagatgggttccgtaagaggcctggtgctctcttactctttcatccacgtgcacttgtgcggcatctgcagtttacaggaacggctccttccctaaaatgagaagtccaaggtcatctctggcccagtgaccacagagagatctgcacctcccggacttcaggcctgcctttccagcgagaattcttcatcctccacggttcactagctcctacctgaagaggaaagggggccatttgacctgacatgtcaggaaagccctaaactgaatgtttgcgcctgggctgcagaagccagggtgcatgaccaggctgcgtggacgttatactgtcttcccccacccccggggaggggaagcttgagctgctgctgtcactcctccaccgagggaggcctcacaaaccacaggacgctgcaacgggtcaggctggcgggcccggcgtgctcatcatctctgccccaggtgtacggtttctctctgacattaaatgcccttcatgg

SEQ ID NO: 3433 - protein, 359 aa, Homo sapiens
MPSLLLLFTAALLSSWAQLLTDANSWWSLALNPVQRPEMFIIGAQPVCSQLPGLSPGQRKLCQLYQEHMAYIGEGAKTGIKECQHQFRQRRWNCSTADNASVFGRVMQIGSRETAFTHAVSAAGVVNAISRACREGELSTCGCSRTARPKDLPRDWLWGGCGDNVEYGYRFAKEFVDAREREKNFAKGSEEQGRVLMNLQNNEAGRRAVYKMADVACKCHGVSGSCSLKTCWLQLAEFRKVGDRLKEKYDSAAAMRVTRKGRLELVNSRFTQPTPEDLVYVDPSPDYCLRNESTGSLGTQGRLCNKTSEGMDGCELMCCGRGYNQFKSVQVERCHCKFHWCCFVRCKKCTEIVDQYICK

SEQ ID NO: 3434 - DNA, 2251 bp, Homo sapiens
gaccattagcaggcacccaggcctgtctttggctcggaaacggtggcccccaatgtagcctagtttgaacctaggaactgcaggaccagagagattccactggagcctgatggacgggtgacagagggaaccctactctggaaactgtcagtcccagggcactggggagggctgaggccgaccatgcccagcctgctgctgctgttcacggctgctctgctgtccagctgggctcagcttctgacagacgccaactcctggtggtcattagctttgaacccggtgcagagacccgagatgtttatcatcggtgcccagcccgtgtgcagtcagcttcccgggctctcccctggccagaggaagctgtgccaattgtaccaggagcacatggcctacataggggagggagccaagactggcatcaaggaatgccagcaccagttccggcagcggcggtggaattgcagcacagcggacaacgcatctgtctttgggagagtcatgcagataggcagccgagagaccgccttcacccacgcggtgagcgccgcgggcgtggtcaacgccatcagccgggcctgccgcgagggcgagctctccacctgcggctgcagccggacggcgcggcccaaggacctgccccgggactggctgtggggcggctgtggggacaacgtggagtacggctaccgcttcgccaaggagtttgtggatgcccgggagcgagagaagaactttgccaaaggatcagaggagcagggccgggtgctcatgaacctgcaaaacaacgaggccggtcgcagggctgtgtataagatggcagacgtagcctgcaaatgccacggcgtctcggggtcctgcagcctcaagacctgctggctgcagctggccgagttccgcaaggtcggggaccggctgaaggagaagtacgacagcgcggccgccatgcgcgtcacccgcaagggccggctggagctggtcaacagccgcttcacccagcccaccccggaggacctggtctatgtggaccccagccccgactactgcctgcgcaacgagagcacgggctccctgggcacgcagggccgcctctgcaacaagacctcggagggcatggatggctgtgagctcatgtgctgcgggcgtggctacaaccagttcaagagcgtgcaggtggagcgctgccactgcaagttccactggtgctgcttcgtcaggtgtaagaagtgcacggagatcgtggaccagtacatctgtaaatagcccggagggcctgctcccggcccccctgcactctgcctcacaaaggtctatattatataaatctatataaatctattttatatttgtataagtaaatgggtgggtgctatacaatggaaagatgaaaatggaaaggaagagcttatttaagagacgctggagatctctgaggagtggactttgctggttctctcctcttggtgggtgggagacagggctttttctctccctctggcgaggactctcaggatgtagggacttggaaatatttactgtctgtccaccacggcctggaggagggaggttgtggttggatggaggagatgatcttgtctggaagtctagagtctttgttggttagaggactgcctgtgatcctggccactaggccaagaggccctatgaaggtggcgggaactcagcttcaacctcgatgtcttcagggtcttgtccagaatgtagatgggttccgtaagaggcctggtgctctcttactctttcatccacgtgcacttgtgcggcatctgcagtttacaggaacggctccttccctaaaatgagaagtccaaggtcatctctggcccagtgaccacagagagatctgcacctcccggacttcaggcctgcctttccagcgagaattcttcatcctccacggttcactagctcctacctgaagaggaaagggggccatttgacctgacatgtcaggaaagccctaaactgaatgtttgcgcctgggctgcagaagccagggtgcatgaccaggctgcgtggacgttatactgtcttcccccacccccggggaggggaagcttgagctgctgctgtcactcctccaccgagggaggcctcacaaaccacaggacgctgcaacgggtcaggctggcgggcccggcgtgctcatcatctctgccccaggtgtacggtttctctctgacattaaatgcccttcatggaaaaaaaaaaaaaaaaaaaaaaaaaaaaa

SEQ ID NO: 3435 - protein, 359 aa, Homo sapiens; identical to SEQ ID NO: 3433

SEQ ID NO: 3436 - DNA, 3469 bp, Homo sapiens
gtatgggaaggtcggtggcgagtgatccctcatgatgtactaccagactggctcaaggataatgacttcctcttgcatggacaccggcctcctatgccttctttccgggcctgttttaagagcattttcagaatacacacagaaacaggcaacatttggacacatctcttaggttgtgtattcttcctgtgcctggggatcttttatatgtttcgcccaaatatctcctttgtggcccctctgcaagagaaggtggtctttggattatttttcttaggagccattctctgcctttctttttcatggctcttccacacagtctactgccactcagagggggtctctcggctcttctctaaactggattactctggtattgctcttctgattatgggaagttttgttccttggctttattattctttctactgtaatccacaaccttgcttcatctacttgattgtcatctgtgtgctgggcattgcagccattatagtctcccagtgggacatgtttgccacccctcagtatcggggagtaagagcaggagtgtttttgggcctaggcctgagtggaatcattcctaccttgcactatgtcatctcggaggggttccttaaggccgccaccatagggcagataggctggttgatgctgatggccagcctctacatcacaggagctgccctgtatgctgcccggatccccgaacgctttttccctggcaaatgtgacatctggtttcactctcatcagctgtttcatatctttgtggttgctggagcttttgttcacttccatggtgtctcaaacctccaggagtttcgtttcatgatcggcgggggctgcagtgaagaggatgcactgtgatacctaccagtctccagggactatgaccctaaaccagggcctgcggcacttgcgggcctccctgctggctactgatgccagtaccagaggagccccaaaactttgacagcctcgtgggctttgtgacggcccagtggctctgcgtggtacatgactgagaagagaaaaacaaaaataaatcatacctcaaaggatggagtgcatcaattgggagaaaaggagacatagcccaaaccctggcttattcttgggatctactgattgcgggctctgcaagacccttggcaaactggcttctgatccatatcatatttatttgtagaagatggcgaaacagtttagctggtggttctttcttctccctttctctctctctatgacaataatacaaaccaatttaagtgaacatttatatccgataaggggtgggagtgtgattttaaatgctcttttgggagaacaaagaaattaatgtaaataagatttctaactgtttaaataagactttatataaatgtttaaaacataggggtaagggagggagggagaatttttgtatagaatgaaacatgcaagtaccacacactgtttgaattttgcacaaaaagtgactgtaggatcaggtgatagccccggaatgtacagtgtcttggtgcaccaagatgccttctaaaggctgacataccttggaccctaatggggcagagagtatagccctagcccagtggtgacatgaccactccctttgggaggcctgaggtagaggggagtggtatgtgttttctcagtggaagcagcacatgagtgggtgacaggatgttagataaaggctctagttagggtgtcattgtcatttgagagactgacacactcctagcagctggtaaaggggtgctggaggccatggaggagctctagaaacattagcatgggctgatctgattacttcctggcatcccgctcacttttatgggaagtcttattagagggatgggacagttttccatatccttgctgtggagctctggaacactctctaaatttccctctattaaaaatcactgccctaactacacttcctccttgagggaatagaaatggacctttctctgacatagttcttggcatgggagccagccacaaatgagattctgacgtgtccaggtttctcctgagctcatctacatagattggtagacccttcctttggattaggaaagatgagttttacctctggtacactgtcttggtaagcctggatgtgacagacacctcggctctccttgaataagaaagccagcagaactcttaaagccagttgtagtacggagttgtcagcactcactgaacctcactttacagggataagagtggtgtggcattttaaatacaatggtatgttattgccagggagtgaggtacaagacgatggctcatgtcacaggcctacctgatacggtgtcagagaaagtggtggggaaaggatctggttcatggaattctgatcttggcccataggtgaaccaccaaaatagtgctcgagtcttaggttactgtcatcaaagacttgggatgactccattatatcctggggttgtgggtattagaactaaatatggaggtcctgagcatggggactggcgtcctcagtaggtgtttgggaatatgggaagggtctcctatttattcaatagagttttctcagttattttcctcccttgcccttgcaatctccagcaaaaggtgggatctaggaagaaagaatccagtgtagaagttgagaagaacttgaacgttttggttctggataaggtcactgtcctaggtgctaggtggaccgagcaaaagactcagtggatgaactggtgcagtgcctgacagaataaagaacagtattaatccctttgagaaagcatagtccagcaggacagtggccatttggacagaagcccacttagtttcttgggagcaacagcacgtatcagaagccagacttgctcttcggtcatgcactttgggatacagcgtataggtgcagccctgtcacaacaccaacagaagtagcagcctctgggtgcagtcacccacaccccaaagctggaaggatctggttcaacatagcacaaacccttaggaaaaatgaaattaacatcactgatgtgtaatccagtaaaatctccctttttcgggtgtgtatgtgggcatgtgcccatttctatgtgtgtgtctacgtgcagctcactaccaacagcctcatgtgcacttgacctgacagtgctcgctgagaactctcaccaggttggcgcctgaatgccttactctcagcagtcagaggcttgcttgctctgtgcagatttttaattttcttttttggccctaggctggttgggacctctacagcttcattctttcaccattaaatagtggcctttttcagtattttccctcttcccctttataaattatgctaaagccacaaagcacatttttggggatcatagaaggttggggttccagaaaggcatctgtgtgatggttccattgatgtgggatttccctacttgctgtattctcagtttctaataaaaagaaccaaatg

SEQ ID NO: 3437 - DNA, 2086 bp, Homo sapiens
tgcgaggcagctcgctcgttctgcgatctattgagagtggcttccaagagccccgtgcctatgtctgggagggagggaagatggcagccgtggcggcaggcggcctggtgggaaaggggcgcgacatcagcctagcggccctgcagcgccacgacccctatatcaaccgcatcgtggacgtggccagccaggtggctctgtacaccttcggccatcgggccaacgagtgggagaaaactgatgtggaaggaaccttatttgtttatacaaggtctgcttctccaaagcatggattcaccattatgaataggctgagcatggaaaataggacagaacctattactaaagacttggatttccaactccaggaccctttccttctctacagaaatgccagattgtccatctatggaatttggttttatgataaggaagaatgccaaagaattgcagagcttatgaaaaacctaactcagtatgaacagttgaaagcccatcagggaactggagcaggaatttccccagtgatcctcaattcaggagagggcaaagaagtagacattttacgaatgctcatcaaggccaaagacgaatacacaaagtgtaaaacctgttctgagccaaaaaagataaccagttcctctgccatctatgacaatccaaatctcatcaaaccaattccagtgaaacccagtgaaaaccagcaacagcgtatacctcagcccaaccagaccttagaccctgaaccccaacacttatccttgacagctctgtttgggaagcaggacaaagctacatgtcaggaaactgtggagcctccgcagactctccaccagcagcagcagcagcagcagcagcagcaagagaagcttccaattaggcagggggttgtacgctccctgtcctatgaggaacccagaagacactcaccccccattgagaagcagctctgtccagccattcagaaactcatggtcaggagcgcagacctccacccattgtcagagctgcctgaaaaccggccttgtgaaaatggcagtacccattctgcgggagaattttttacaggacctgtccagccagggtctcctcacaacattggaacttctcgtggtgtacaaaatgcttccagaactcagaacctgttcgagaaacttcagagtaccccaggggcagcaaacaagtgtgaccctagtacaccagcacctgccagctcagctgccctgaaccgcagcagagctcccacttctgtcacccctgtggctccaggaaagggtctggctcagccaccacaggcctatttcaatggctcccttccacctcagacagtaggacatcaggctcatggaagagaacagtccacactcccaagacaaacactccccatctctggtagtcagactggcagctctggagtgatctcccctcaagagttactgaagaagcttcagattgtacagcaggagcagcagctgcatgcctctaaccggccagccttggccgctaagtttcctgtgctcgctcagagctctggaacagggaaacccttggaatcctggatcaacaagacacccaacacagaacagcagactcctcttttccaggtcatctcacctcagcgcatccctgctacagcagctccgtctctgcttatgtcccccatggtgttcgcacaacccacctccgtcccgccaaaggaaagggagagcggcctcttgcctgtgggaggccaggagccacctgctgctgccaccagcctcctcctgcccatacagagcccggagccctccgtgatcaccagcagcccactcaccaagctccagctccaggaggcactgctgtacctcattcagaatgatgacaacttcttaaatataatctatgaagcctatctcttcagcatgactcaagcagccatgaaaaagactatgtgacagcaaggccttttaaaactgattttcaaggtccttctagaactccggcacaaggttctttcatgttgagtgttgtttccttcaatgtttctgccttttttaaaaaaaaagtatgtgtaatatgaagtaaaatgtttcagacttttttttat

SEQ ID NO: 3438 - protein, 617 aa, Homo sapiens
MAAVAAGGLVGKGRDISLAALQRHDPYINRIVDVASQVALYTFGHRANEWEKTDVEGTLFVYTRSASPKHGFTIMNRLSMENRTEPITKDLDFQLQDPFLLYRNARLSIYGIWFYDKEECQRIAELMKNLTQYEQLKAHQGTGAGISPVILNSGEGKEVDILRMLIKAKDEYTKCKTCSEPKKITSSSAIYDNPNLIKPIPVKPSENQQQRIPQPNQTLDPEPQHLSLTALFGKQDKATCQETVEPPQTLHQQQQQQQQQQEKLPIRQGVVRSLSYEEPRRHSPPIEKQLCPAIQKLMVRSADLHPLSELPENRPCENGSTHSAGEFFTGPVQPGSPHNIGTSRGVQNASRTQNLFEKLQSTPGAANKCDPSTPAPASSAALNRSRAPTSVTPVAPGKGLAQPPQAYFNGSLPPQTVGHQAHGREQSTLPRQTLPISGSQTGSSGVISPQELLKKLQIVQQEQQLHASNRPALAAKFPVLAQSSGTGKPLESWINKTPNTEQQTPLFQVISPQRIPATAAPSLLMSPMVFAQPTSVPPKERESGLLPVGGQEPPAAATSLLLPIQSPEPSVITSSPLTKLQLQEALLYLIQNDDNFLNIIYEAYLFSMTQAAMKKTM

SEQ ID NO: 3439 - DNA, 2251 bp, Homo sapiens
gccgcgtgcagaggtgctcaagcctcctcgcggtccgcagtcagtgccgccgcgcccggcctcccgcacgccccgcaggtagcgcccccgcccgcggcccagagtgcgctcgcgccggcaccagctcccggataaacggcgcgccgcgcggagatgacagccgaggagatgaaggcgaccgagagcggggcgcagtcggcgccgctgcccatggagggagtggacatcagccccaaacaggacgaaggcgtgctgaaggtcatcaagagagagggcacaggtacagagatgcccatgattggggaccgagtctttgtccactacactggctggctattagatggcacaaagtttgactccagtctggatcgcaaggacaaattctcctttgacctgggaaaaggggaggtcatcaaggcttgggacattgccatagccaccatgaaggtgggggaggtgtgccacatcacctgcaaaccagaatatgcctacggttcagcaggcagtcctccaaagattccccccaatgccacgcttgtatttgaggtggagttgtttgagtttaagggagaagatctgacggaagaggaagatggcggaatcattcgcagaatacagactcgcggtgaaggctatgctaagcccaatgagggtgctatcgtggaggttgcactggaagggtactacaaggacaagctctttgaccagcgggagctccgctttgagattggcgagggggagaacctggatctgccttatggtctggagagggccattcagcgcatggagaaaggagaacattccatcgtgtacctcaagcccagctatgcttttggcagtgttgggaaggaaaagttccaaatcccaccaaatgctgagctgaaatatgaattacacctcaagagttttgaaaaggccaaggagtcttgggagatgaattcagaagagaagctggaacagagcaccatagtgaaagagcggggcactgtgtacttcaaggaaggtaaatacaagcaagctttactacagtataagaagatcgtgtcttggctggaatatgagtctagtttttccaatgaggaagcacagaaagcacaggcccttcgactggcctctcacctcaacctggccatgtgtcatctgaaactacaggccttctctgctgccattgaaagctgtaacaaggccctagaactggacagcaacaacgagaagggcctcttccgccggggagaggcccacctggccgtgaatgactttgaactggcacgggctgatttccagaaggtcctgcagctctaccccaacaacaaagccgccaagacccagctggctgtgtgccagcagcggatccgaaggcagcttgcccgggagaagaagctctatgccaatatgtttgagaggctggctgaggaggagaacaaggccaaggcagaggcttcctcaggagaccatcccactgacacagagatgaaggaggagcagaagagcaacacggcagggagccagtctcaggtggagacagaagcatagcccctctccaccagccctactcctgcggctgcctgccccccagtctccccactccaccctgttagttttgtaaaaactgaagaattttgagtgaattagacctttatttttctatctggttggatggtggctttaggggaagggggaaaggtgtaggctgggggattgaggtggggaatcattttagctggtgtcagcccctcttcccttcctccattgcacatgaacatatgtccatccatatatattcatcagaatgttaatttattttgctccctctgttaggtccattttctaagggtagaagaggcaagtggtagggatgaggtctgataagaacccagggtggagagggagactcctgggcagccgttttcctcatcctttccctctcccagtccatttccaaatgtggcctccatgtgggtgctagggacatgggaaaaaccactgctatgccatttcttctctctgttcccttcctcacccccgacggtgtggctgatgatgtcttctggtgtcatggtgaccaccccctgttccctgttctggtatttcccctgtcagtttcccctctcggccaggttgtgtcccaaaatcccctcagcctcttctctgcacgttgctgaaggtccaggcttgcctcaagttccatgcttgagcaataaagtggaaacaataaaacctgggtgtcagacaaaaaaaaaaaaaaaaaaaa

SEQ ID NO: 3440 - protein, 459 aa, Homo sapiens
MTAEEMKATESGAQSAPLPMEGVDISPKQDEGVLKVIKREGTGTEMPMIGDRVFVHYTGWLLDGTKFDSSLDRKDKFSFDLGKGEVIKAWDIAIATMKVGEVCHITCKPEYAYGSAGSPPKIPPNATLVFEVELFEFKGEDLTEEEDGGIIRRIQTRGEGYAKPNEGAIVEVALEGYYKDKLFDQRELRFEIGEGENLDLPYGLERAIQRMEKGEHSIVYLKPSYAFGSVGKEKFQIPPNAELKYELHLKSFEKAKESWEMNSEEKLEQSTIVKERGTVYFKEGKYKQALLQYKKIVSWLEYESSFSNEEAQKAQALRLASHLNLAMCHLKLQAFSAAIESCNKALELDSNNEKGLFRRGEAHLAVNDFELARADFQKVLQLYPNNKAAKTQLAVCQQRIRRQLAREKKLYANMFERLAEEENKAKAEASSGDHPTDTEMKEEQKSNTAGSQSQVETEA

SEQ ID NO: 3441 - DNA, 772 bp, Homo sapiens
gcggagctgccagccgcgggccgcctcgttggtggcggtgccagggctcgcccacccgggcggtggaacacgggccaggacggggagcgactccccacagtgctttcctggcccttcggcctttgtgcgacgcaggcgcgacagggttccggcgccctcccggggtcccctgccgacgccgggacccagcgaggtccccactcgccgcgcggcgccccctccctcggccccggggaggccgggcgcggggcatgccgggagctgtagtcccctcccccctccgccgcctcccggagccagggctgcggggtgtggggcggggaggaggcgctctgctgtggagcctgccgccgagtgaccgctcgactacaaatagcctggggagctgcggggagggcatcttgacctgggccaggacaacctgccttgggtcggagcaggttccagggagaatcagagatggtgaattcccagcctgcgtcttatgccttctccccatccgctgctgcgtcctcatcctggcttcccaccgctgagctccgcgtgtgcggcacccacctcagggggcctttacctggtccagaagtgcatctgtctttgcaccagattattggggacctcaagcgtctgctccagcggctctcctgtggcatgtgacttccccttctcgctccagcgtcctgccgttttctacgagattgttattccaggtcatcaagagagagggcacaggtacagagatgcccatgattggggaccgagtctttgtcca

SEQ ID NO: 3442 - DNA, 2155 bp, Homo sapiens
gtcgcgacgggggttcagggaatatttactgggcctctccgctccctctgctcttggaggtgccatgaggtcagttagctacgtgcagcgcgtggcgctggagttcagcgggagcctcttcccgcacgcaatctgcctcggagacgttgataacgatacgttaaatgaactggtggtgggagacaccagcgggaaggtgtctgtgtataaaaatgatgacagtcggccatggctcacctgttcctgccagggaatgctgacttgcgctggggttggagacgtgtgtaataaaggaaagaacctgttggtggcagtgagtgctgaaggctggtttcatttgtttgacctgacacctgccaaggtgttggatgcttctgggcaccacgagacactaatcggagaggagcagcgtccagtcttcaagcagcacatccctgccaacaccaaggtcatgctgatcagcgacatcgatggagatgggtgtcgtgagctggtggtgggctacacagaccgtgtggtgcgagctttccgctgggaggagctaggtgagggtcctgaacatctgacagggcagctggtgtccctcaagaaatggatgctggagggtcaggtggacagcctctcagtgactctggggccactgggtcttcctgaactgatggtgtctcagccaggttgtgcgtatgcaattctactgtgtacctggaaaaaggacactgggtcccctcctgcctctgaagggcccacggatggtagtagggagaccccagctgcccgagacgtggtgctgcaccagacatctggccgtatccacaacaagaatgtctccactcacctaattggcaacatcaaacaaggccacggcactgagagtagtggctctggcctctttgccctgtgcaccctggatgggacactgaagctcatggaagaaatggaagaagcagacaagctgctgtggtcagtgcaggtggatcaccagctctttgccctggagaaactggatgtcaccggcaacgggcatgaggaggtagttgcatgcgcctgggatggacagacatatatcattgatcacaaccgcaccgtcgtccgcttccaagtggatgaaaatatccgtgccttctgtgcgggcctgtacgcctgcaaagagggccgcaacagcccctgcctcgtatatgtcactttcaaccagaagatctatgtgtactgggaggtgcagctggagcggatggagtctaccaatctggtgaaactgctggagaccaagccggagtaccacagcctgctgcaggagctgggcgtggatcctgacgacctccctgtgactcgtgccctgcttcaccaaacgctctaccatccagaccagccaccacagtgtgctccctcaagcctccaggatcccacctagctgtacttgcctcatagctggtgaaggattcttctgaacccccaccctaccccctaaaggtatctgtggtattggcaggatagggaatatgcattacagaaatgcaggatttgactctgggcatgaaagatggcagcagccctagggtgaccgtgaactatagacctcgcagtcttttcggtgaaagaagagacaagttgaccctctgcccatttccttatggacctcacccatcatgccagcagggtcataggaccctggccttgttccaaatcatctgggacatgacccactccccactgtcactgtgttgaaaacagagacttgtttgtgtggccccaacacccataaggaaaccaggctttaggcccaggggagcagtggaggtaagggctccaccccatcttaagctctgtcttccgtggcacaattccaagttcttgacgttagtaattgttaaaggaatggcaaactgttttgttttgaaggatctttctacagtctggtcttacccatgttcctagcaaccctgagatgattttcttccatttaccaaagcagccgggtcagtgccttctcacgttgccgtattcttcaggtattagtcagcttcagaagccctgctcccatttttccacccacccattcccccataaaacagcttattgtctccaagacaatagacatttaaaatgtgatgcgggtttatgatccagaccacaatcagaattatatcttgggtcattt

SEQ ID NO: 3443 - protein, 447 aa, Homo sapiens
MRSVSYVQRVALEFSGSLFPHAICLGDVDNDTLNELVVGDTSGKVSVYKNDDSRPWLTCSCQGMLTCAGVGDVCNKGKNLLVAVSAEGWFHLFDLTPAKVLDASGHHETLIGEEQRPVFKQHIPANTKVMLISDIDGDGCRELVVGYTDRVVRAFRWEELGEGPEHLTGQLVSLKKWMLEGQVDSLSVTLGPLGLPELMVSQPGCAYAILLCTWKKDTGSPPASEGPTDGSRETPAARDVVLHQTSGRIHNKNVSTHLIGNIKQGHGTESSGSGLFALCTLDGTLKLMEEMEEADKLLWSVQVDHQLFALEKLDVTGNGHEEVVACAWDGQTYIIDHNRTVVRFQVDENIRAFCAGLYACKEGRNSPCLVYVTFNQKIYVYWEVQLERMESTNLVKLLETKPEYHSLLQELGVDPDDLPVTRALLHQTLYHPDQPPQCAPSSLQDPT

SEQ ID NO: 3444 - DNA, 3336 bp, Homo sapiens
  unsure 3317: unknown base
cggcggcgactgcagtctggagggtccacacttgtgattctcaatggagagtgaaaacgcagattcataatgaaagctagcccccgtcggccactgattctcaaaagacggaggctgccccttcctgttcaaaatgccccaagtgaaacatcagaggaggaacctaagagatcccctgcccaacaggagtctaatcaagcagaggcctccaaggaagtggcggagtccaactcttgcaagtttccagctgggatcaagattattaaccaccccaccatgcccaacacgcaagtagtggccatccccaacaatgctaatattcacagcatcatcacagcactgactgccaagggaaaagagagtggcagtagtgggcccaacaaattcatcctcatcagctgtgggggagccccaactcagcctccaggactccggcctcaaacccaaaccagctatgatgccaaaaggacagaagtgaccctggagaccttgggaccaaaacctgcagctagggatgtgaatcttcctagaccacctggagccctttgcgagcagaaacgggagacctgtgcagatggtgaggcagcaggctgcactatcaacaatagcctatccaacatccagtggcttcgaaagatgagttctgatggactgggctcccgcagcatcaagcaagagatggaggaaaaggagaattgtcacctggagcagcgacaggttaaggttgaggagccttcgagaccatcagcgtcctggcagaactctgtgtctgagcggccaccctactcttacatggccatgatacaattcgccatcaacagcactgagaggaagcgcatgactttgaaagacatctatacgtggattgaggaccactttccctactttaagcacattgccaagccaggctggaagaactccatccgccacaacctttccctgcacgacatgtttgtccgggagacgtctgccaatggcaaggtctccttctggaccattcaccccagtgccaaccgctacttgacattggaccaggtgtttaagccactggacccagggtctccacaattgcccgagcacttggaatcacagcagaaacgaccgaatccagagctccgccggaacatgaccatcaaaaccgaactccccctgggcgcacggcggaagatgaagccactgctaccacgggtcagctcatacctggtacctatccagttcccggtgaaccagtcactggtgttgcagccctcggtgaaggtgccattgcccctggcggcttccctcatgagctcagagcttgcccgccatagcaagcgagtccgcattgcccccaaggtgctgctagctgaggaggggatagctcctctttcttctgcaggaccagggaaagaggagaaactcctgtttggagaagggttttctcctttgcttccagttcagactatcaaggaggaagaaatccagcctggggaggaaatgccacacttagcgagacccatcaaagtggagagccctcccttggaagagtggccctccccggccccatctttcaaagaggaatcatctcactcctgggaggattcgtcccaatctcccaccccaagacccaagaagtcctacagtgggcttaggtccccaacccggtgtgtctcggaaatgcttgtgattcaacacagggagaggagggagaggagccggtctcggaggaaacagcatctactgcctccctgtgtggatgagccggagctgctcttctcagaggggcccagtacttcccgctgggccgcagagctcccgttcccagcagactcctctgaccctgcctcccagctcagctactcccaggaagtgggaggaccttttaagacacccattaaggaaacgctgcccatctcctccaccccgagcaaatctgtcctccccagaacccctgaatcctggaggctcacgcccccagccaaagtagggggactggatttcagcccagtacaaacctcccagggtgcctctgaccccttgcctgaccccctggggctgatggatctcagcaccactcccttgcaaagtgctcccccccttgaatcaccgcaaaggctcctcagttcagaacccttagacctcatctccgtcccctttggcaactcttctccctcagatatagacgtccccaagccaggctccccggagccacaggtttctggccttgcagccaatcgttctctgacagaaggcctggtcctggacacaatgaatgacagcctcagcaagatcctgctggacatcagctttcctggcctggacgaggacccactgggccctgacaacatcaactggtcccagtttattcctgagctacagtagagccctgcccttgcccctgtgctcaagctgtccaccatcccgggcactccaaggctcagtgcaccccaagcctctgagtgaggacagcaggcagggactgttctgctcctcatagctccctgctgcctgattatgcaaaagtagcagtcacaccctagccactgctgggaccttgtgttccccaagagtatctgattcctctgctgtccctgccaggagctgaagggtgggaacaacaaaggcaatggtgaaaagagattaggaaccccccagcctgtttccattctctgcccagcagtctcttaccttccctgatctttgcagggtggtccgtgtaaatagtataaattctccaaattatcctctaattataaatgtaagcttatttccttagatcattatccagagactgccagaaggtgggtaggatgacctggggtttcaattgacttctgttccttgcttttagttttgatagaagggaagacctgcagtgcacggtttcttccaggctgaggtacctggatcttgggttcttcactgcagggacccagacaagtggatctgcttgccagagtcctttttgcccctccctgccacctccccgtgtttccaagtcagctttcctgcaagaagaaatcctggttaaaaaagtcttttgtattgggtcaggagttgaatttggggtgggaggatggatgcaactgaagcagagtgtgggtgcccagatgtgcgctattagatgtttctctgataatgtccccaatcataccagggagactggcattgacgagaactcaggtggaggcttgagaaggccgaaagggcccctgacctgcctggcttccttagcttgcccctcagctttgcaaagagccaccctaggccccagctgaccgcatgggtgtgagccagcttgagaacactaactactcaataaaagcgaaggtggaccnaaaaaaaaaaaaaaaaaaa

SEQ ID NO: 3445 - protein, 763 aa, Homo sapiens
MKASPRRPLILKRRRLPLPVQNAPSETSEEEPKRSPAQQESNQAEASKEVAESNSCKFPAGIKIINHPTMPNTQVVAIPNNANIHSIITALTAKGKESGSSGPNKFILISCGGAPTQPPGLRPQTQTSYDAKRTEVTLETLGPKPAARDVNLPRPPGALCEQKRETCADGEAAGCTINNSLSNIQWLRKMSSDGLGSRSIKQEMEEKENCHLEQRQVKVEEPSRPSASWQNSVSERPPYSYMAMIQFAINSTERKRMTLKDIYTWIEDHFPYFKHIAKPGWKNSIRHNLSLHDMFVRETSANGKVSFWTIHPSANRYLTLDQVFKPLDPGSPQLPEHLESQQKRPNPELRRNMTIKTELPLGARRKMKPLLPRVSSYLVPIQFPVNQSLVLQPSVKVPLPLAASLMSSELARHSKRVRIAPKVLLAEEGIAPLSSAGPGKEEKLLFGEGFSPLLPVQTIKEEEIQPGEEMPHLARPIKVESPPLEEWPSPAPSFKEESSHSWEDSSQSPTPRPKKSYSGLRSPTRCVSEMLVIQHRERRERSRSRRKQHLLPPCVDEPELLFSEGPSTSRWAAELPFPADSSDPASQLSYSQEVGGPFKTPIKETLPISSTPSKSVLPRTPESWRLTPPAKVGGLDFSPVQTSQGASDPLPDPLGLMDLSTTPLQSAPPLESPQRLLSSEPLDLISVPFGNSSPSDIDVPKPGSPEPQVSGLAANRSLTEGLVLDTMNDSLSKILLDISFPGLDEDPLGPDNINWSQFIPELQ

SEQ ID NO: 3446 - DNA, 1426 bp, Homo sapiens
cgaaggctgtgcggtctgccaggagctgcggccccgtccggcccgggctggcatgggttggaattggagcctatcccccaacccgaaggctaacagcatcatgtggttactaactgttcctcattcaccggttgatgcctcccagaaaaaaacgccgccagccttcccagaaagccccgctgctgttccaccaacaaccactggagggccccaaacacagctgtgcatctacacagcttcccatcactcacactcgacaggtgcccagcaagcccattgaccacagcaccatcacttcctgggtatcacctgattttgatacagcagcaggaagcttgttcccagcctaccagaaacaccaaaaccgggcgagacactcaagtcgaaaacctaccacctccaagtttccacatctaacttttgagagtccgcaatcttccagttcagagacattggggatccccttaatccgagagtgccccagtgaatcagaaaaggatgtttccagaagacccttagttccagtgctcagtccccaaagctgtgggaacatgtcagtgcaggcacttcagagcttaccttatgtgttcattccacctgatatccagaccccagagtcatcatctgtgaaggaagaactcattccccaagatcagaaggaaaacagccttctaagctgcactcttcacactggcactcctaatagcccagagcctggacctgttctggttaaagacacccccgaggacaagtatggaataaaggtcacatggaggagacgacagcacctgcttgcttacctcagggagagagggaagctgagcagaagccaattccttgtgaaaagctgactgccatcagtaatctcaatagaaaagagatatgttttctggagtcataaaggaattcaattcctagggtttttgtttttgtttttgagatgtaatattgctctgttgcccaggctggagtgcagtggtatgatctcaccttactgcaaccaccacttcctgggttcaagcgattctcctgcctcagcctccccagtagctgggattacaggcaccagccaccatgcctggctaatttttttgtatttttagtagagatgtggtttctccatgttggccaggctggtctcaaaatcctgacctcaagtcatctgctggccttgacctcacaaagtgctggcccagccgagatttgttttctaagatactttgtgtcatgaacagttcagtttagtgtcatgaactattcacttcatatttttcttgtattaactgtttaaatttttaaaatatcttgtagtaactctttaaaatgtatgtaagtaaatggctgcagaaagtttttttagagaatcctgcttccatcagtaatacagcaatattaccccatccactaaaaaaaaaaaaaaaaaaaa

SEQ ID NO: 3447 - protein, 238 aa, Homo sapiens
MPPRKKRRQPSQKAPLLFHQQPLEGPKHSCASTQLPITHTRQVPSKPIDHSTITSWVSPDFDTAAGSLFPAYQKHQNRARHSSRKPTTSKFPHLTFESPQSSSSETLGIPLIRECPSESEKDVSRRPLVPVLSPQSCGNMSVQALQSLPYVFIPPDIQTPESSSVKEELIPQDQKENSLLSCTLHTGTPNSPEPGPVLVKDTPEDKYGIKVTWRRRQHLLAYLRERGKLSRSQFLVKS

SEQ ID NO: 3448 - DNA, 1343 bp, Homo sapiens
ggcacgagggtgggaaaagatggcggctgccgcacaatcccgggttgtccgggtcctgtcaatgtcacgttctgccattactgcaatagccacatctgtgtgtcacggcccaccctgtcgccagcttcatcatgccctcatgcctcatgggaaaggtggacgttcctcagtcagtgggattgtggccactgtgtttggagcaacaggattcctggggcgatatgttgtcaaccaccttggacgcatggggtcacaggtaatcataccctatcggtgtgataaatatgacatcatgcaccttcgtcccatgggtgacctgggccagcttctgtttctggaatgggacgcgagagataaagattctatccgacgagtagtacaacacagcaatgtggtcatcaatcttattggacgagactgggaaaccaaaaactttgattttgaggatgtttttgtgaagattccccaagcaattgctcaactgtccaaggaagctggagttgaaaaattcattcatgtttcacatctgaatgcgaatattaaaagctcttctagatatttgagaaataaggctgttggagagaaagtagtgagagatgcatttccggaagccattatcgtaaagccgtcggacatctttggaagagaggatagattccttaattcttttgcaagtatgcatcggtttggtcctataccccttggttccttgggctggaagacagttaaacaaccagtatatgtcgtagatgtatccaaaggaattgttaatgcagttaaggatcctgatgccaatgggaaatcctttgctttcgttggtcccagtcggtacctccttttccacctggtgaagtacatctttgctgtggctcacagattgttcctcccattccccttgccgctttttgcctatcgatgggtagcaagagtctttgaaataagcccatttgagccctggataacaagggataaagtggagcggatgcacatcacagacatgaaattgcctcacctgcctggcttagaagaccttggtattcaggcaacaccactggaactcaaggccattgaggtgctgcggcgtcatcgcacttaccgctggctgtctgctgaaattgaggatgtgaagccggccaagaccgtcaacatttagtgcctcctgagcagctcttggttttggcgtcttttgggtcggcccatgtggtttgagcacccagccaggcggtctctttagaggatcctgtacacagttccactattaaaacatttcaggttgaaaaaaaaaaaaaaaaaaaaaaaaaaaaaaaaaaaaaaaaaaaaaaaaaaaaaaaaaaaaaaaaaaa

SEQ ID NO: 3449 - protein, 377 aa, Homo sapiens
MAAAAQSRVVRVLSMSRSAITAIATSVCHGPPCRQLHHALMPHGKGGRSSVSGIVATVFGATGFLGRYVVNHLGRMGSQVIIPYRCDKYDIMHLRPMGDLGQLLFLEWDARDKDSIRRVVQHSNVVINLIGRDWETKNFDFEDVFVKIPQAIAQLSKEAGVEKFIHVSHLNANIKSSSRYLRNKAVGEKVVRDAFPEAIIVKPSDIFGREDRFLNSFASMHRFGPIPLGSLGWKTVKQPVYVVDVSKGIVNAVKDPDANGKSFAFVGPSRYLLFHLVKYIFAVAHRLFLPFPLPLFAYRWVARVFEISPFEPWITRDKVERMHITDMKLPHLPGLEDLGIQATPLELKAIEVLRRHRTYRWLSAEIEDVKPAKTVNI

SEQ ID NO: 3450 - DNA, 2211 bp, Homo sapiens
ctcccgccttctctccgcagagctcttctctgagcctgttggggggagggaggggggcgtggaggaactggggttcgcgggagcacgagctgcagcaccacttccggaaagttcaggagccctggaaaggagaaggaataagacggcaggaggaagagagagagagggtagaatggaagaatctcacttcaattctaacccgtacttctggccttctatccccacagtctcaggtcagatcgagaacacaatgttcatcaacaagatgaaggatcagctgttgccagagaagggctgtggtctggccccacctcactaccccaccttgctgacagtgcctgcctcagtgtccctgccctcaggcatcagtatggacacagagtccaagtcagaccagctgaccccacacagccaagcgtccgttacccagaatatcacggtggtccctgtgccgtctacaggactgatgactgctggagtctcctgttctcagaggtggagaagagaagggagtcaatcaaggggtccgggtttggtaatcacgtccccctcaggctctcttgtgaccacagcatcatcagctcagaccttccccatttcggctcccatgattgtctcagctcttccccctggctcacaagccctgcaggttgtccctgacctctccaagaaggtagcatcgaccctaaccgaggaaggaggcggaggtggtggtggaggtggcagtgtggctcctaagccaccccggggccggaagaagaagcggatgctggaatcagggctgcccgagatgaatgacccttatgtcctctcccctgaggatgatgatgaccatcagaaagacggcaagacctacaggtgccggatgtgctcactgacattctactccaagtcggagatgcagatccactccaagtcacacaccgagaccaagccccacaagtgcccacattgctccaagaccttcgccaacagctcctacctggcccagcacatccgtatacactcaggggctaagccctacagttgtaacttctgtgagaaatccttccgccagctctcccaccttcagcagcacacccggatccactccaagatgcacacggagaccatcaagccccacaagtgcccgcactgctccaagaccttcgccaacacctcctacctggcccagcacctccgtatccactcgggggccaagccctacaactgttcctactgccagaaggccttccgccagctctcccacctccagcagcacacacgaatccacactggtgatagaccatacaaatgtgcacacccaggctgtgagaaagccttcacacaactctccaatctgcagtcccacagacggcaacacaacaaagataaacccttcaagtgccacaactgtcatcgggcgtacacggatgcagcctcactagaggtgcacctgtctacgcacacagtgaagcatgccaaggtgtacacctgcactatctgcagtcgggcatacacatcagaaacataccttatgaaacatatgcgcaaacacaacccgcctgatcttcagcaacaggtgcaggcagcagcagcagcggcagcagtggcccaggcccaggctcaagctcaagcccaggctcaggctcaggctcaagcccaggcccaggcccaggcctcccaggcatcacagcagcagcagcagcagcagcagcagcagcagcagcagcaacagccaccaccacacttccagtctcctggggcagccccccagggtgggggtggtggggacagcaatcccaaccctccaccccagtgttcctttgacctgaccccgtataagacggcggagcatcataaggacatctgcctcactgtcaccaccagcaccatccaggtggagcacctggccagctcttagagatccgtgctgccacccactgggaagaggaagaagtagtcctggtgtcttctttctccaactcttggtgggaaaagtccttttcttccttgacaggccttggctccatctccttgggcctctgtcacggctttccttcacaggataccatcctttttctgaactcttcttcaaaaggaacatcagccctcctgattgcaaaggaatactgagctgatggtgtcatccagcagcctcccctcccaagcaaagcttctaaaactgggggtcggtgctcaagggaaggatttgctatgacctcatagaac

SEQ ID NO: 3451 - DNA, 497 bp, Homo sapiens
cttcaagtgccacaactgtcatcgggcgtacacggatgcagcctcactagaggtgcacctgtctacgcacacagtgaagcatgccaaggtgtacacctgcactatctgcagtcgggcatacacatcacaacaggtgcaggcagcagcagcagcggcagcagtggcccaggcccaggctcaagctcaagcccaggctcaggctcaggctcaagcccaggcccaggcccaggcctcccaggcatcacagcagcagcagcagcagcagcagcagcagcagcagcagcaacagccaccaccacacttccagtctcctggggcagccccccagggtgggggtggtggggacagcaatcccaaccctccaccccagtgttcctttgacctgaccccgtataagacggcggagcatcataaggacatctgcctcactgtcaccaccagcaccatccaggtggagcacctggccagctcttagagatccgtgctgccacccactg

SEQ ID NO: 3452 - DNA, 2647 bp, Homo sapiens
gggccggagttcctgcagagggagcgtcaaggccctgtgctgctgtccctgggggccagaggggttgcccagcatgcccactggcaggagagagggaactgacccacttgctcctaccagcttctgaaggctccaaagtccggagtgcagaaagccaggaccaagagacaggcagctcaccagggtggacaaatcgccagagatgtggtgcattgtcctgttttcacttttggcatgggtttatgctgagcctaccatgtatggggagatcctgtcccctaactatcctcaggcatatcccagtgaggtagagaaatcttgggacatagaagttcctgaagggtatgggattcacctctacttcacccatctggacattgagctgtcagagaactgtgcgtatgactcagtgcagataatctcaggagacactgaagaagggaggctctgtggacagaggagcagtaacaatccccactctccaattgtggaagagttccaagtcccatacaacaaactccaggtgatctttaagtcagacttttccaatgaagagcgttttacggggtttgctgcatactatgttgccacagacataaatgaatgcacagattttgtagatgtcccttgtagccacttctgcaacaatttcattggtggttacttctgctcctgccccccggaatatttcctccatgatgacatgaagaattgcggagttaattgcagtggggatgtattcactgcactgattggggagattgcaagtcccaattatcccaaaccatatccagagaactcaaggtgtgaataccagatccggttggagaaagggttccaagtggtggtgaccttgcggagagaagattttgatgtggaagcagctgactcagcgggaaactgccttgacagtttagtttttgttgcaggagatcggcaatttggtccttactgtggtcatggattccctgggcctctaaatattgaaaccaagagtaatgctcttgatatcatcttccaaactgatctaacagggcaaaaaaagggctggaaacttcgctatcatggagatccaatgccctgccctaaggaagacactcccaattctgtttgggagcctgcgaaggcaaaatatgtctttagagatgtggtgcagataacctgtctggatgggtttgaagttgtggagggacgtgttggtgcaacatctttctattcgacttgtcaaagcaatggaaagtggagtaattccaaactgaaatgtcaacctgtggactgtggcattcctgaatccattgagaatggtaaagttgaagacccagagagcactttgtttggttctgtcatccgctacacttgtgaggagccatattactacatggaaaatggaggaggtggggagtatcactgtgctggtaacgggagctgggtgaatgaggtgctgggcccggagctgccgaaatgtgttccagtctgtggagtccccagagaaccctttgaagaaaaacagaggataattggaggatccgatgcagatattaaaaacttcccctggcaagtcttctttgacaacccatgggctggtggagcgctcattaatgagtactgggtgctgacggctgctcatgttgtggagggaaacagggagccaacaatgtatgttgggtccacctcagtgcagacctcacggctggcaaaatccaagatgctcactcctgagcatgtgtttattcatccgggatggaagctgctggaagtcccagaaggacgaaccaattttgataatgacattgcactggtgcggctgaaagacccagtgaaaatgggacccaccgtctctcccatctgcctaccaggcacctcttccgactacaacctcatggatggggacctgggactgatctcaggctggggccgaacagagaagagagatcgtgctgttcgcctcaaggcggcaaggttacctgtagctcctttaagaaaatgcaaagaagtgaaagtggagaaacccacagcagatgcagaggcctatgttttcactcctaacatgatctgtgctggaggagagaagggcatggatagctgtaaaggggacagtggtggggcctttgctgtacaggatcccaatgacaagaccaaattctacgcagctggcctggtgtcctgggggccccagtgtgggacctatgggctctacacacgggtaaagaactatgttgactggataatgaagactatgcaggaaaatagcaccccccgtgaggactaatccagatacatcccaccagcctctccaagggtggtgaccaatgcattaccttctgttccttatgatattctcattatttcatcatgactgaaagaagacacgagcgaatgatttaaatagaacttgattgttgagacgccttgctagaggtagagtttgatcatagaattgtgctggtcatacatttgtggtctgactccttggggtcctttccccggagtacctattgtagataacactatgggtggggcactcctttcttgcactattccacagggataccttaattctttgtttcctctttacctgttcaaaattccatttacttgatcattctcagtatccactgtctatgtacaataaaggatgtttataagc

SEQ ID NO: 3453 - protein, 688 aa, Homo sapiens
MWCIVLFSLLAWVYAEPTMYGEILSPNYPQAYPSEVEKSWDIEVPEGYGIHLYFTHLDIELSENCAYDSVQIISGDTEEGRLCGQRSSNNPHSPIVEEFQVPYNKLQVIFKSDFSNEERFTGFAAYYVATDINECTDFVDVPCSHFCNNFIGGYFCSCPPEYFLHDDMKNCGVNCSGDVFTALIGEIASPNYPKPYPENSRCEYQIRLEKGFQVVVTLRREDFDVEAADSAGNCLDSLVFVAGDRQFGPYCGHGFPGPLNIETKSNALDIIFQTDLTGQKKGWKLRYHGDPMPCPKEDTPNSVWEPAKAKYVFRDVVQITCLDGFEVVEGRVGATSFYSTCQSNGKWSNSKLKCQPVDCGIPESIENGKVEDPESTLFGSVIRYTCEEPYYYMENGGGGEYHCAGNGSWVNEVLGPELPKCVPVCGVPREPFEEKQRIIGGSDADIKNFPWQVFFDNPWAGGALINEYWVLTAAHVVEGNREPTMYVGSTSVQTSRLAKSKMLTPEHVFIHPGWKLLEVPEGRTNFDNDIALVRLKDPVKMGPTVSPICLPGTSSDYNLMDGDLGLISGWGRTEKRDRAVRLKAARLPVAPLRKCKEVKVEKPTADAEAYVFTPNMICAGGEKGMDSCKGDSGGAFAVQDPNDKTKFYAAGLVSWGPQCGTYGLYTRVKNYVDWIMKTMQENSTPRED

SEQ ID NO: 3454 - DNA, 646 bp, Homo sapiens
ctcctgagcatgtgtttattcatccgggatggaagctgctggaagtcccagaaggacgaaccaattttgataatgacattgcactggtgcggctgaaagacccagtgaaaatgggacccaccgtctctcccatctgcctaccaggcacctcttccgactacaacctcatggatggggacctgggactgatctcaggctggggccgaacagagaagagagatcgtgctgttcgcctcaaggcggcaaggttacctgtagctcctttaagtttcactcctaacatgatctgtgctggaggagagaagggcatggatagctgtaaaggggacagtggtggggcctttgctgtacaggatcccaatgacaagaccaaattctacgcagctggcctggtgtcctgggggccccagtgtgggacctatgggctctacacacgggtaaagaactatgttgactggataatgaagactatgcaggaaaatagcaccccccgtgaggactaatccagatacatcccaccagcctctccaagggtggtgaccaatgcattaccttctgttccttatgatattctcattatttcatcatgactgaaagaagacacgagcgaatgatttaaatagaacttgattgttgagacgccttg

SEQ ID NO: 3455 - DNA, 1342 bp, Homo sapiens
gcagtacctaagccggagcggggtagaggcgggccggcacccccttctgacctccagtgccgccggcctcaagatcagacatggcccagaacttgaaggacttggcgggacggctgcccgccgggccccggggcatgggcacggccctgaagctgttgctgggggccggcgccgtggcctacggtgtgcgcgaatctgtgttcaccgtggaaggcgggcacagagccatcttcttcaatcggatcggtggagtgcagcaggacactatcctggccgagggccttcacttcaggatcccttggttccagtaccccattatctatgacattcgggccagacctcgaaaaatctcctcccctacaggctccaaagacctacagatggtgaatatctccctgcgagtgttgtctcgacccaatgctcaggagcttcctagcatgtaccagcgcctagggctggactacgaggaacgagtgttgccgtccattgtcaacgaggtgctcaagagtgtggtggccaagttcaatgcctcacagctgatcacccagcgggcccaggtatccctgttgatccgccgggagctgacagagagggccaaggacttcagcctcatcctggatgatgtggccatcacagagctgagctttagccgagagtacacagctgctgtagaagccaaacaagtggcccagcaggaggcccagcgggcccaattcttggtagaaaaagcaaagcaggaacagcggcagaaaattgtgcaggccgagggtgaggccgaggctgccaagatgcttggagaagcactgagcaagaaccctggctacatcaaacttcgcaagattcgagcagcccagaatatctccaagacgatcgccacatcacagaatcgtatctatctcacagctgacaaccttgtgctgaacctacaggatgaaagtttcaccaggggaagtgacagcctcatcaagggtaagaaatgagcctagtcaccaagaactccacccccagaggaagtggatctgcttctccagtttttgaggagccagccaggggtccagcacagccctaccccgccccagtatcatgcgatggtcccccacaccggttccctgaacccctcttggattaaggaagactgaagactagccccttttctggggaattactttcctcctccctgtgttaactggggctgttggggacagtgcgtgatttctcagtgatttcctacagtgttgttccctccctcaaggctgggaggagataaacaccaacccaggaattctcaataaatttttattacttaacctgaaaaaaaaaaaaaaaaaaaaaaaaaaaaaaa

SEQ ID NO: 3456 - protein, 299 aa, Homo sapiens
MAQNLKDLAGRLPAGPRGMGTALKLLLGAGAVAYGVRESVFTVEGGHRAIFFNRIGGVQQDTILAEGLHFRIPWFQYPIIYDIRARPRKISSPTGSKDLQMVNISLRVLSRPNAQELPSMYQRLGLDYEERVLPSIVNEVLKSVVAKFNASQLITQRAQVSLLIRRELTERAKDFSLILDDVAITELSFSREYTAAVEAKQVAQQEAQRAQFLVEKAKQEQRQKIVQAEGEAEAAKMLGEALSKNPGYIKLRKIRAAQNISKTIATSQNRIYLTADNLVLNLQDESFTRGSDSLIKGKK

SEQ ID NO: 3457 - DNA, 4349 bp, Homo sapiens
acgccatactggacgccaagtgggaggaacttcaaggctgtcccctgcgggcctcccgctctgcttctgcgaaggtttcattgaaaacagatcctgcaaaagttccaggtgcccacactggaaacttggagatcctgcttcccagaccacagctgtggggaacttggggtggagcagagaagtttctgtattcagctgcccaggcagaggagaatggggtctccacagcctgaagaatgaagacacgacagaataaagactcgatgtcaatgaggagtggacggaagaaagaggcccctgggccccgggaagaactgagatcgaggggccgggcctcccctggaggggtcagcacgtccagcagtgatggcaaagctgagaagtccaggcagacagccaagaaggcccgagtagaggaagcctccaccccaaaggtcaacaagcagggtcggagtgaggagatctcagagagtgaaagtgaggagaccaatgcaccaaaaaagaccaaaactgagcaggaactccctcggccacagtctccctccgatctggatagcttggacgggcggagccttaatgatgatggcagcagcgaccctagggatatcgaccaggacaaccgaagcacgtcccccagtatctacagccctggaagtgtggagaatgactctgactcatcttctggcctgtcccagggcccagcccgcccctaccacccacctccactctttcctccttcccctcaaccgccagacagcacccctcgacagccagaggctagctttgaaccccatccttctgtgacacccactggatatcatgctcccatggagccccccacatctcgaatgttccaggctcctcctggggcccctccccctcacccacagctctatcctgggggcactggtggagttttgtctggacccccaatgggtcccaaggggggaggggctgcctcatcagtggggggccctaatgggggtaagcagcaccccccacccactactcccatttcagtatcaagctctggggctagtggtgctcccccaacaaagccgcctaccactccagtgggtggtgggaacctaccttctgctccaccaccagccaacttcccccatgtgacaccgaacctgcctcccccacctgccctgagacccctcaacaatgcatcagcctctccccctggcctgggggcccaaccactacctggtcatctgccctctccccacgccatgggacagggtatgggtggacttcctcctggcccagagaagggcccaactctggctccttcaccccactctctgcctcctgcttcctcttctgctccagcgccccccatgaggtttccttattcatcctctagtagtagctctgcagcagcctcctcttccagttcttcctcctcttcctctgcctcccccttcccagcttcccaggcattgcccagctacccccactctttccctcccccaacaagcctctctgtctccaatcagccccccaagtatactcagccttctctcccatcccaggctgtgtggagccagggtcccccaccacctcctccctatggccgcctcttagccaacagcaatgcccatccaggccccttccctccctctactggggcccagtccaccgcccacccaccagtctcaacacatcaccatcaccaccagcaacagcaacagcagcagcagcagcagcagcagcagcagcagcagcagcagcagcatcacggaaactctgggccccctcctcctggagcatttccccacccactggagggcggtagctcccaccacgcacacccttacgccatgtctccctccctggggtctctgaggccctacccaccagggccagcacacctgcccccacctcacagccaggtgtcctacagccaagcaggccccaatggccctccagtctcttcctcttccaactcttcctcttccacttctcaagggtcctacccatgttcacacccctccccttcccagggccctcaaggggcgccctaccctttcccaccggtgcctacggtcaccacctcttcggctaccctttccacggtcattgccaccgtggcttcctcgccagcaggctacaaaacggcctccccacctgggcccccaccgtacggaaagagagccccgtccccgggggcctacaagacagccaccccacccggatacaaacccgggtcgcctccctccttccgaacggggaccccaccgggctatcgaggaacctcgccacctgcaggcccagggaccttcaagccgggctcgcccaccgtgggacctgggcccctgccacctgcggggccctcaggcctgccatcgctgccaccaccacctgcggcccctgcctcagggccgcccctgagcgccacgcagatcaaacaggagccggctgaggagtatgagacccccgagagcccggtgcccccagcccgcagcccctcgccccctcccaaggtggtagatgtacccagccatgccagtcagtctgccaggttcaacaaacacctggatcgcggcttcaactcgtgcgcgcgcagcgacctgtacttcgtgccactggagggctccaagctggccaagaagcgggccgacctggtggagaaggtgcggcgcgaggccgagcagcgcgcgcgcgaagaaaaggagcgcgagcgcgagcgggaacgcgagaaagagcgcgagcgcgagaaggagcgcgagcttgaacgcagcgtgaagttggctcaggagggccgtgctccggtggaatgcccatctctgggcccagtgccccatcgccctccatttgaaccgggcagtgcggtggctacagtgcccccctacctgggtcctgacactccagccttgcgcactctcagtgaatatgcccggcctcatgtcatgtctcctggcaatcgcaaccatccattctacgtgcccctgggggcagtggacccggggctcctgggttacaatgtcccggccctgtacagcagtgatccagctgcccgggagagggaacgggaagcccgtgaacgagacctccgtgaccgcctcaagcctggctttgaggtgaagcctagtgagctggaacccctacatggggtccctgggccgggcttggatccctttccccgacatgggggcctggctctgcagcctggcccacctggcctgcaccctttcccctttcatccgagcctggggcccctggagcgagaacgtctagcgctggcagctgggccagccctgcggcctgacatgtcctatgctgagcggctggcagctgagaggcagcacgcagaaagggtggcggccctgggcaatgacccactggcccggctgcagatgctcaatgtgactccccatcaccaccagcactcccacatccactcgcacctgcacctgcaccagcaagatgctatccatgcagcctctgcctcggtgcaccctctcattgaccccctggcctcagggtctcaccttacccggatcccctacccagctggaactctccctaaccccctgcttcctcaccctctgcacgagaacgaagttcttcgtcaccagctctttgctgccccttaccgggacctgccggcctccctttctgccccgatgtcagcagctcatcagctgcaggccatgcacgcacagtcagctgagctgcagcgcttggcgctggaacagcagcagtggctgcatgcccatcacccgctgcacagtgtgccgctgcctgcccaggaggactactacagtcacctgaagaaggaaagcgacaagccactgtagaacctgcgatcaagagagcaccatggctcctacattggaccttggagcacccccaccctccccccaccgtgcccttggcctgccacccagagccaagagggtgctgctcagttgcagggcctccgcagctggacagagagtgggggagggagggacagacagaaggccaaggcccgatgtggtgtgcagaggtggggaggtggcgaggatggggacagaaagcgcacagaatcttggaccaggtctctcttccttgtcccccctgcttttctcctcccccatgcccaacccctgtggccgccgcccctcccctgccccgttggtgtgattatttcatctgttagatgtggctgttttgcgtagcatcgtgtgccacccctgcccctccccgatccctgtgtgcgcgccccctctgcaatgtatgccccttgccccttccccacactaataatttatatatataaatatctatatgacgctcttaaaaaaacatcccaaccaaaaccaaccaaacaaaaacatcctcacaactccccagga

SEQ ID NO: 3458 - DNA, 2423 bp, Homo sapiens
acccgcgctcgtacgtgcgcctccgccggcagctcctgactcatcgggggctccgggtcacatgcgcccgcgcggccctataggcgcctcctccgcccgccgcccgggagccgcagccgccgccgccactgccactcccgctctctcagcgccgccgtcgccaccgccaccgccaccgccactaccaccgtctgagtctgcagtcccgagatcccagccatcatgtccatagagaagatctgggcccgggagatcctggactcccgcgggaaccccacagtggaggtggatctctatactgccaaaggtcttttccgggctgcagtgcccagtggagcctctacgggcatctatgaggccctggagctgagggatggagacaaacagcgttacttaggcaaaggtgtcctgaaggcagtggaccacatcaactccaccatcgcgccagccctcatcagctcaggtctctctgtggtggagcaagagaaactggacaacctgatgctggagttggatgggactgagaacaaatccaagtttggggccaatgccatcctgggtgtgtctctggccgtgtgtaaggcaggggcagctgagcgggaactgcccctgtatcgccacattgctcagctggccgggaactcagacctcatcctgcctgtgccggccttcaacgtgatcaatggtggctctcatgctggcaacaagctggccatgcaggagttcatgatcctcccagtgggagctgagagctttcgggatgccatgcgactaggtgcagaggtctaccatacactcaagggagtcatcaaggacaaatacggcaaggatgccaccaatgtgggggatgaaggtggctttgcccccaatatcctggagaacagtgaagccttggagctggtgaaggaagccatcgacaaggctggctacacggaaaagatcgttattggcatggatgttgctgcctcagagttttatcgtgatggcaaatatgacttggacttcaagtctcccactgatccttcccgatacatcactggggaccagctgggggcactctaccaggactttgtcagggactatcctgtggtctccattgaggacccatttgaccaggatgattgggctgcctggtccaagttcacagccaatgtagggatccagattgtgggtgatgacctgacagtgaccaacccaaaacgtattgagcgggcagtggaagaaaaggcctgcaactgtctgctgctcaaggtcaaccagatcggctcggtcactgaagccatccaagcgtgcaagctggcccaggagaatggctggggggtcatggtgagtcatcgctcaggagagactgaggacacattcattgctgacctggtggtggggctgtgcacaggccagatcaagactggtgccccgtgccgttctgaacgtctggctaaatacaaccagctcatgagaattgaggaagagctgggggatgaagctcgctttgccggacataacttccgtaatcccagtgtgctgtgattcctctgcttgcctggagacgtggaacctctgtctcatcctcctggaaccttgctgtcctgatctgtgatagttcaccccctgagatcccctgagccccagggtgcccagaacttccctgattgacctgctccgctgctccttggcttacctgacctcttgctgtctctgctcgccctcctttctgtgccctactcattggggttccgcactttccacttcttcctttctctttctctcttccctcagaaactagaaatgtgaatgaggattattataaaagggggtccgtggaagaatgatcagcatctgtgatgggagcgtcagggttggtgtgctgaggtgttagagagggaccatgtgtcacttgtgctttgctcttgtcccacgtgtcttccactttgcatatgagccgtgaactgtgcatagtgctgggatggaggggagtgttgggcatgtgatcacgcctggctaataaggctttagtgtatttatttatttatttattttatttgtttttcattcatcccattaatcatttccccataactcaatggcctaaaactggcctgacttgggggaacgatgtgtctgtatttcatgtggctgtagatcccaagatgactggggtgggaggtcttgctagaatgggaagggtcatagaaagggccttgacatcagttcctttgtgtgtactcactgaagcctgcgttggtccagagcggaggctgtgtgcctgggggagttttcctctatacatctctccccaaccctaggttccctgttcttcctccagctgcaccagagcaacctctcactccccatgccacgttccacagttgccaccacctctgtggcattgaaatgagcacctccattaaagtctgaatcagtgc

SEQ ID NO: 3459 - protein, 434 aa, Homo sapiens
MSIEKIWAREILDSRGNPTVEVDLYTAKGLFRAAVPSGASTGIYEALELRDGDKQRYLGKGVLKAVDHINSTIAPALISSGLSVVEQEKLDNLMLELDGTENKSKFGANAILGVSLAVCKAGAAERELPLYRHIAQLAGNSDLILPVPAFNVINGGSHAGNKLAMQEFMILPVGAESFRDAMRLGAEVYHTLKGVIKDKYGKDATNVGDEGGFAPNILENSEALELVKEAIDKAGYTEKIVIGMDVAASEFYRDGKYDLDFKSPTDPSRYITGDQLGALYQDFVRDYPVVSIEDPFDQDDWAAWSKFTANVGIQIVGDDLTVTNPKRIERAVEEKACNCLLLKVNQIGSVTEAIQACKLAQENGWGVMVSHRSGETEDTFIADLVVGLCTGQIKTGAPCRSERLAKYNQLMRIEEELGDEARFAGHNFRNPSVL

SEQ ID NO: 3460 - DNA, 1774 bp, Homo sapiens
ggcacgagggagaactagtctcagtttttttttttttttttttaggtgagaaagccagctgactttattgctctgggggcagggggctcaggagctcttggtggggcgggtccgcttcctcttcaccatcacaggcttctggctgcgcaggatggcgctggccctgcggatggctgccatgcgcaggtcggggcggtacttgttcttgcggatcatgtgtctgatgctgctgagcgtggcgcgagcattcttgttgatggtggtccgcacataggaggtggcaggcttccgctggccggatctccgcttaatgaccaccacgacacctttgccgtcggctgccggctccacgcccacagtcttgcggtgaatcagtccgttgtagcggaaggaattgcgggccttcaagttattgggctcagtgctgtaggtctgcttattcctcttgatcaggaaactggagcagttccgcacgaccatccattgcagatgcgcagacatggcggcggctcccttcgcagcggcgacctgaccttcagcgcctcggctccagcgccatggcgccctccaggaagttcttcgttgggggaaactggaagatgaacgggcggaagcagagtctgggggagctcatcggcactctgaacgcggccaaggtgccggccgacaccgaggtggtttgtgctccccctactgcctatatcgacttcgcccggcagaagctagatcccaagattgctgtggctgcgcagaactgctacaaagtgactaatggggcttttactggggagatcagccctggcatgatcaaagactgcggagccacgtgggtggtcctggggcactcagagagaaggcatgtctttggggagtcagatgagctgattgggcagaaagtggcccatgctctggcagagggactcggagtaatcgcctgcattggggagaagctagatgaaagggaagctggcatcactgagaaggttgttttcgagcagacaaaggtcatcgcagataacgtgaaggactggagcaaggtcgtcctggcctatgagcctgtgtgggccattggtactggcaagactgcaacaccccaacaggcccaggaagtacacgagaagctccgaggatggctgaagtccaacgtctctgatgcggtggctcagagcacccgtatcatttatggaggctctgtgactggggcaacctgcaaggagctggccagccagcctgatgtggatggcttccttgtgggtggtgcttccctcaagcccgaattcgtggacatcatcaatgccaaacaatgagccccatccatcttccctacccttcctgccaagccagggactaagcagcccagaagcccagtaactgccctttccctgcatatgcttctgatggtgtcatctgctccttcctgtggcctcatccaaactgtatcttcctttactgtttatatcttcaccctgtaatggttgggaccaggccaatcccttctccacttactataatggttggaactaaacgtcaccaaggtggcttctccttggctgagagatggaaggcgtggtgggatttgctcctgggttccctaggccctagtgagggcagaagagaaaccatcctctcccttcttacaccgtgaggccaagatcccctcagaaggcaggagtgctgccctctcccatggtgcccgtgcctctgtgctgtgtatgtgaaccacccatgtgagggaataaacctggcactaggtaaaaaaaaaaaaaaaaaaaaa

SEQ ID NO: 3461 - protein, 249 aa, Homo sapiens
MAPSRKFFVGGNWKMNGRKQSLGELIGTLNAAKVPADTEVVCAPPTAYIDFARQKLDPKIAVAAQNCYKVTNGAFTGEISPGMIKDCGATWVVLGHSERRHVFGESDELIGQKVAHALAEGLGVIACIGEKLDEREAGITEKVVFEQTKVIADNVKDWSKVVLAYEPVWAIGTGKTATPQQAQEVHEKLRGWLKSNVSDAVAQSTRIIYGGSVTGATCKELASQPDVDGFLVGGASLKPEFVDIINAKQ

SEQ ID NO: 3462 - DNA, 3081 bp, Homo sapiens
ggagaagctgctgccggtgtcatggcggagctgagtgaggaggcgctgctgtcagtattaccgacgatccgggtccctaaggctggagaccgggtccacaaagacgagtgcgccttctccttcgacacgccggagtctgaggggggcctctacatctgtatgaacacgtttctgggctttgggaaacagtatgtggagagacatttcaataagaccggccagcgagtctacttgcacctccggcggacccggcgcccgaaagaggaggaccctgctacaggcactggagacccaccccggaagaagcccacgcggctggctattggtgttgaaggcggatttgaccttagcgaggagaagtttgaattagacgaggatgtgaagattgtcattttgccagattacctggagattgcccgggatggactggggggactgcctgacattgtcagagatcgggtgaccagtgcagtggaggccctactgtcggccgactcagcctcccgcaagcaggaggtgcaggcatgggatggggaagtacggcaggtgtctaagcatgccttcagcctcaagcagttggacaaccctgctcgaatccctccctgtggctggaagtgctccaagtgtgacatgagagagaacctgtggctcaacctgactgatggctccatcctctgtgggcgacgctacttcgatggcagtgggggcaacaaccacgctgtggagcactaccgagagacaggctacccgttagctgtcaagctgggcaccatcacccctgatggagctgacgtgtactcatatgatgaggatgacatggtcctggaccccagcctggctgagcacctgtcccacttcggcatcgacatgctgaagatgcagaagacagacaagacgatgactgagttggagatagacatgaaccagcggattggtgaatgggagctgatccaggagtcaggtgtgccactcaagcccctgtttgggcctggctacacaggcatccggaacctgggtaacagctgctacctcaactctgtggtccaggtgctcttcagcatccctgacttccagaggaagtatgtggataagctggagaagatcttccagaatgccccgacggaccctacccaggatttcagcacccaggtggccaagctgggccatggccttctctccggggagtattccaagccagtaccggagtcgggcgatggggagcgggtgccagaacagaaggaagttcaagatggcattgcccctcggatgttcaaggccctcatcggcaagggccaccctgaattctccaccaaccggcagcaggatgcccaggagttcttccttcaccttatcaacatggtggagaggaattgccggagctctgaaaatcctaatgaagtgttccgcttcttggtggaggaaaagatcaagtgcctggccacagagaaggtgaagtacacccagcgagttgactacatcatgcagctgcctgtgcccatggatgcagcccttaacaaagaggagcttctggagtacgaggagaagaagcggcaagccgaagaggagaagatggcactgccagaactggttcgggcccaggtgcccttcagctcttgcctggaggcctacggggcccctgagcaggtcgatgacttctggagcacggccctgcaggccaagtcagtagctgtcaagaccacacgatttgcctcattccctgactacctggtcatccagatcaagaagttcaccttcggcttagactgggtgcccaagaaactggatgtgtccatcgagatgccagaggagctcgacatctcccagttgaggggcacagggctgcagcccggagaggaggagctgccagacattgccccacccctggtcactccggatgagcccaaagcgcccatgctggatgaatcagtcatcatccagctggtggagatgggattccctatggacgcctgccgcaaagctgtctactacacgggcaacagcggggctgaggccgccatgaactgggtcatgtcacacatggatgatccagattttgcaaaccccctcatcctgcctggctctagtgggccgggctccacaagcgcagcagccgacccccctcctgaggactgtgtgaccaccattgtctccatgggcttctcccgggaccaggccttgaaagcgctgcgggccacgaacaatagtttagaacgggctgtggactggatcttcagtcacattgacgacctggatgctgaagctgccatggacatctcagagggccgctcagctgccgactccatctctgagtctgtgccagtgggacctaaagtccgggatggtcctggaaagtatcagctctttgccttcattagtcacatgggcacctctaccatgtgtggtcactacgtctgccacatcaagaaagaaggcagatgggtgatctacaatgaccagaaagtgtgtgcctccgagaagccgcccaaggacctgggctacatctacttctaccagagagtggccagctaagagcctgcctcaccccttaccaatgagggcaggggaagaccacctggcatgagggagaggggctgagggatggacttcagcccctctgctctgtaccctttttccttttgtccccggcagcagggaagaagctggaggccgtgggagaatggctgggcagagcagaggggcagcgatagactctggggatggagcaggacggggacgggaggggccggccacctgtctgtaaggagactttgttgcttcccctgcccccggaatccacagtgctctgcttctctgtgtcgccccgcccagccccctggtgtggagggaggggtctcgtttgtgcgcgtgggtgtagctttgtgcatcctctcccagtggagcgatcacctgtgcctcccctccccctttgtttgcccctgtgtggttggtcaaggagggatgtgagggaaatagggaccccccgacttgccctcctgcctcagtctttcccccaccctgtctcttccttgtccttctctggaaaatgccaaaatacacgatgtgaataaaagtacaacggct

SEQ ID NO: 3463 - DNA, 1923 bp, Homo sapiens
ccacaataggggcagacctgtccatccttctctgtgggtcccctgtacctttctcccccaacaggatcagacccagaggcagctggttggggtttgtcgagaagaaggattatccagatcagtcctttctaatctcagctcctgcctgtaccctcccatactcaccaaaccctcttccccaccaccctgagctgaggagcacagtttgaggcccccccaaccccccgccggtcggggccaggccaggccaggccagctcctctggcagcagagcctgggcaggtgacgggcgggcgcgggcgtcgcagctgagggagtaaggaggctcccaggaaccggagctggaaacccggccgaggtccagccagagcccaagagccagagtgacccctcgacctgtcagccatgggggagatggagcaactgcgtcaggaagcggagcagctcaagaagcagattgcagatgccaggaaagcctgtgctgacgttactctggcagagctggtgtctggcctagaggtggtgggacgagtccagatgcggacgcggcggacgttaaggggacacctggccaagatttacgccatgcactgggccactgattctaagctgctggtaagtgcctcgcaagatgggaagctgatcgtgtgggacagctacaccaccaacaaggtgcacgccatcccactgcgctcctcctgggtcatgacctgtgcctatgccccatcagggaactttgtggcatgtggggggctggacaacatgtgttccatctacaacctcaaatcccgtgagggcaatgtcaaggtcagccgggagctttctgctcacacaggttatctctcctgctgccgcttcctggatgacaacaatattgtgaccagctcgggggacaccacgtgtgccttgtgggacattgagactgggcagcagaagactgtatttgtgggacacacgggtgactgcatgagcctggctgtgtctcctgacttcaatctcttcatttcgggggcctgtgatgccagtgccaagctctgggatgtgcgagaggggacctgccgtcagactttcactggccacgagtcggacatcaacgccatctgtttcttccccaatggagaggccatctgcacgggctcggatgacgcttcctgccgcttgtttgacctgcgggcagaccaggagctgatctgcttctcccacgagagcatcatctgcggcatcacgtccgtggccttctccctcagtggccgcctactattcgctggctacgacgacttcaactgcaatgtctgggactccatgaagtctgagcgtgtgggcatcctctctggccacgataacagggtgagctgcctgggagtcacagctgacgggatggctgtggccacaggttcctgggacagcttcctcaaaatctggaactgaggaggctggagaaagggaagtggaaggcagtgaacacactcagcagccccctgcccgaccccatctcattcaggtgttctcttctatattccgggtgccattcccactaagctttctcctttgagggcagtggggagcatgggactgtgcctttgggaggcagcatcagggacacaggggcaaagaactgccccatctcctcccatggccttccctccccacagtcctcacagcctctcccttaatgagcaaggacaacctgcccctccccagccctttgcaggcccagcagacttgagtctgaggccccaggccctaggattcctcccccagagccactacctttgtccaggcctgggtggtatagggcgtttggccctgtgactatggctctggcaccactagggtcctggccctcttcttattcatgctttctcctttttctacctttttttctctcctaagacacctgcaataaagtgtagcaccctggta

SEQ ID NO: 3464 - protein, 340 aa, Homo sapiens [sequence omitted]

SEQ ID NO: 3465 - DNA, 1532 bp, Homo sapiens
tacgcccacagtgaagcatgccaaggtgtacacctggactatctgcagtcggggatacacatcccaggaaacataccttatgaaacatatgcgcaaacacaacccgcctgatcttcagcaacaggtgcaggcagcagcagcagcggcagcagtggcccaggcccaggctcaagctcaagcccaggctcaggctcaggctcaagcccaggcccaggcccaggcctcccaggcatcacagcagcagcagcagcagcagcagcagcagcagcagcagcagcaacagccaccaccacacttccagtctcctggggcagccccccagggtgggggtggtggggacagcaatcccaaccctccaccccagtgttcctttgacctgaccccgtataagacggcggagcatcataaggacatctgcctcactgtcaccaccagcaccatccaggtggagcacctggccagctcttagagatccgtgctgccacccactgggaagaggaagaagtagtcctggtgtcttctttctccaactcttggtgggaaaagtccttttcttccttgacaggccttggctccatctccttgggcctctgtcacggctttccttcacaggataccatcctttttctgaactcttcttcaaaaggaacatcagccctcctgattgcaaaggaatactgagctgatggtgtcatccagcagcctcccctcccaagcaaagcttctaaaactgggggtcggtgctcaagggaaggatttgctatgacctcatagaaccttgtccagtgtggccacttaccctatccttaccctccttatcctcaaagtttgggctgatgtaagactagaggctggccctcccagataacagagaaaagggagccccaaatgcaaccagcctcttgttctattcttgcctgcaaaagaacagaggtttctcaaatgcctcagtccctgagagccatttcttcccctacatcgtctcactttgcttcctattgactgctggtagaaggagatttggggtaggggctagacctccttttatttgaagggggcaagggctgagatgtggtccccaaggggccagaaattcccaagttggtcacaggtggcttagaagtgtgtgttatggttttacggatttccttgaagcctctctccttctctgcctacaaagaccctatactctcagtctccccaacccacccccaaggagctgtgggaggctttgtgttatctgtgaaactccaaaacaggggtgttgcggagaagggagagttcaaggcaaacgcaaggactggacttagctccctaggtgccacagtcagatgccggacacggatttatatataaatatatatatataaatatattatactcactcatcacggccatctttgttgtaaccatttctgtgtttataaatgcattatctctgagaattttcatatttgatgttttgtttatttttgtcctttttttccctctctccacccctgtcctctagccacagcatttttctttttgtc

SEQ ID NO: 3466 - DNA, 1545 bp, Homo sapiens
gccgaggggggcgtacggaggtggcagctgtgggaggaggcggcgtggaaggccgaggagctcaagcccggaccaatccccacgttccgggccgcgaccctgaccctgcagcgtaccgggaagcgaaaccggccggatgggccgctgagcccgaatcgggcactgtgtggagccccctggagctgagatcaggatgttccgcttcatgagggacgtggagcctgaggatcccatgttcctgatggatccctttgctattcaccgtcagcatatgagccgtatgttgtcaggtggctttggatatagccccttcctcagcatcacagatggcaacatgccagggaccaggcctgccagccgccggatgcagcaggctggagctgtctccccctttgggatgctgggaatgtcgggtggtttcatggacatgtttgggatgatgaatgacatgattggaaacatggaacacatgacagctggaggcaattgccagaccttctcatcttccactgtcatctcctactccaatacgggtgatggtgcccccaaggtctaccaagagacatcagagatgcgctcggcaccaggcgggatccgggagacacggaggactgttcgggattcagacagtggactggagcagatgtccattgggcatcacatccgggacagggctcacatcctccagcgctcccgaaaccatcgcacgggggaccaggaggagcggcaggactatatcaacctggatgagagtgaggccgcagcgtttgatgacgagtggcggcgggagacctcccgattccggcagcagcgtcccctggagtttcggcggcttgagtcctcaggggctgggggacgaagggcggaggggcctccccgcctggccatccagggacctgaggactccccttcccgacagtcccgccgctatgactggtgaggccccgggccctcagcctctcttgtacaggctgagaggctgagaaatcatcccctgaataactttttcctctcgattcccatccccaatttaatattaaattaacaggcaagccggcccccacctctccctgggggtctcagggagaacctttcacggcaccctttccctaccttttccttctttaatctcctggtttaccattgatgacttcgcctctgcatctactgacttgatttttcattctgccactccatcttcaaaccccctcacctttcccatcctactcctgccatgcattgaagggtcaatgcattttggggtgagctctgggtttaggggccccctccatccctcagctaccctggatctttgcccacctcttcctcagagcccccactgaggggccgtagccctatctagggctgtggaaggagcagactggttcctaactctctccctcctcctgcccacacacatcaaaagaatcttccctacacccttctctgcctttattttttgatttgtgcaacttgtaactaggtgtttatggaataaaggagaatggaaaaaagaaaaaaaaaaaaaaaaaaaaaaaaaaaaaa

SEQ ID NO: 3467 - protein, 248 aa, Homo sapiens
MFRFMRDVEPEDPMFLMDPFAIHRQHMSRMLSGGFGYSPFLSITDGNMPGTRPASRRMQQAGAVSPFGMLGMSGGFMDMFGMMNDMIGNMEHMTAGGNCQTFSSSTVISYSNTGDGAPKVYQETSEMRSAPGGIRETRRTVRDSDSGLEQMSIGHHIRDRAHILQRSRNHRTGDQEERQDYINLDESEAAAFDDEWRRETSRFRQQRPLEFRRLESSGAGGRRAEGPPRLAIQGPEDSPSRQSRRYDW

SEQ ID NO: 3468 - DNA, 6417 bp, Homo sapiens
gcggctccgggtgactcgggccagtgtagaggtcctcaggccgccggcaggagcagctgggccaattccctggccgggagcggaaggggatggcgtcgggcctgggctccccgtccccctgctcggcgggcagtgaggaggaggatatggatgcacttttgaacaacagcctgcccccaccccacccagaaaatgaagaggacccagaagaggatttgtcagaaacagagactccaaagctcaagaagaagaaaaagcctaagaaacctcgggaccctaaaatccctaagagcaagcgccaaaaaaaggagcgtatgctcttatgccggcagctgggggacagctctggggaggggccagagtttgtggaggaggaggaagaggtggctctgcgctcagacagtgagggcagcgactatactcctggcaagaagaagaagaagaagcttggacctaagaaagagaagaagagcaaatccaagcggaaggaggaggaggaggaggatgatgatgatgatgattcaaaggagcctaaatcatctgctcagctcctggaagactggggcatggaagacattgaccacgtgttctcagaggaggattatcgaaccctcaccaactacaaggccttcagccagtttgtcagacccctcattgctgccaaaaatcccaagattgctgtctccaagatgatgatggttttgggtgcaaaatggcgggagttcagtaccaataaccccttcaaaggcagttctggggcatcagtggcagctgcggcagcagcagcggtagctgtggtggagagcatggtgacagccactgaggttgcaccaccacctccccctgtggaggtgcctatccgcaaggccaagaccaaggagggcaaaggtcccaatgctcggaggaagcccaagggcagccctcgtgtacctgatgccaagaagcctaaacccaagaaagtagctcccctgaaaatcaagctgggaggttttggttccaagcgtaagagatcctcgagtgaggatgatgacttagatgtggaatctgacttcgatgatgccagtatcaatagctattctgtttctgatggttccaccagccgtagtagccgcagccgcaagaaactccgaaccactaaaaagaaaaagaaaggcgaggaggaggtgactgctgtggatggttatgagacagaccaccaggactattgcgaggtgtgccagcaaggcggtgagatcatcctgtgtgatacctgtccccgtgcttaccacatggtctgcctggatcccgacatggagaaggctcccgagggcaagtggagctgcccacactgcgagaaggaaggcatccagtgggaagctaaagaggacaattcggagggtgaggagatcctggaagaggttgggggagacctcgaagaggaggatgaccaccatatggaattctgtcgggtctgcaaggatggtggggaactgctctgctgtgatacctgtccttcttcctaccacatccactgcctgaatcccccacttccagagatccccaacggtgaatggctctgtccccgttgtacgtgtccagctctgaagggcaaagtgcagaagatcctaatctggaagtggggtcagccaccatctcccacaccagtgcctcggcctccagatgctgatcccaacacgccctccccaaagcccttggaggggcggccagagcggcagttctttgtgaaatggcaaggcatgtcttactggcactgctcctgggtttctgaactgcagctggagctgcactgtcaggtgatgttccgaaactatcagcggaagaatgatatggatgagccaccttctggggactttggtggtgatgaagagaaaagccgaaagcgaaagaacaaggaccctaaatttgcagagatggaggaacgcttctatcgctatgggataaaacccgagtggatgatgatccaccgaatcctcaaccacagtgtggacaagaagggccacgtccactacttgatcaagtggcgggacttaccttacgatcaggcttcttgggagagtgaggatgtggagatccaggattacgacctgttcaagcagagctattggaatcacagggagttaatgaggggtgaggaaggccgaccaggcaagaagctcaagaaggtgaagcttcggaagttggagaggcctccagaaacgccaacagttgatccaacagtgaagtatgagcgacagccagagtacctggatgctacaggtggaaccctgcacccctatcaaatggagggcctgaattggttgcgcttctcctgggctcagggcactgacaccatcttggctgatgagatgggccttgggaaaactgtacagacagcagtcttcctgtattccctttacaaggagggtcattccaaaggccccttcctagtgagcgcccctctttctaccatcatcaactgggagcgggagtttgaaatgtgggctccagacatgtatgtcgtaacctatgtgggtgacaaggacagccgtgccatcatccgagagaatgagttctcctttgaagacaatgccattcgtggtggcaagaaggcctcccgcatgaagaaagaggcatctgtgaaattccatgtgctgctgacatcctatgaattgatcaccattgacatggctattttgggctctattgattgggcctgcctcatcgtggatgaagcccatcggctgaagaacaatcagtctaagttcttccgggtattgaatggttactcactccagcacaagctgttgctgactgggacaccattacaaaacaatctggaagagttgtttcatctgctcaactttctcacccccgagaggttccacaatttggaaggttttttggaggagtttgctgacattgccaaggaggaccagataaaaaaactgcatgacatgctggggccgcacatgttgcggcggctcaaagccgatgtgttcaagaacatgccctccaagacagaactaattgtgcgtgtggagctgagccctatgcagaagaaatactacaagtacatcctcactcgaaattttgaagcactcaatgcccgaggtggtggcaaccaggtgtctctgctgaatgtggtgatggatcttaagaagtgctgcaaccatccatacctcttccctgtggctgcaatggaagctcctaagatgcctaatggcatgtatgatggcagtgccctaatcagagcatctgggaaattattgctgctgcagaaaatgctcaagaaccttaaggagggtgggcatcgtgtactcatcttttcccagatgaccaagatgctagacctgctagaggatttcttggaacatgaaggttataaatacgaacgcatcgatggtggaatcactgggaacatgcggcaagaggccattgaccgcttcaatgcaccgggtgctcagcagttctgcttcttgctttccactcgagctgggggccttggaatcaatctggccactgctgacacagttattatctatgactctgactggaacccccataatgacattcaggcctttagcagagctcaccggattgggcaaaataaaaaggtaatgatctaccggtttgtgacccgtgcgtcagtggaggagcgcatcacgcaggtggcaaagaagaaaatgatgctgacgcatctagtggtgcggcctgggctgggctccaagactggatctatgtccaaacaggagcttgatgatatcctcaaatttggcactgaggaactattcaaggatgaagccactgatggaggaggagacaacaaagagggagaagatagcagtgttatccactacgatgataaggccattgaacggctgctagaccgtaaccaggatgagactgaagacacagaattgcagggcatgaatgaatatttgagctcattcaaagtggcccagtatgtggtacgggaagaagaaatgggggaggaagaggaggtagaacgggaaatcattaaacaggaagaaagtgtggatcctgactactgggagaaattgctgcggcaccattatgagcagcagcaagaagatctagcccgaaatctgggcaaaggaaaaagaatccgtaaacaggtcaactacaatgatggctcccaggaggaccgagattggcaggacgaccagtccgacaaccagtccgattactcagtggcttcagaggaaggtgatgaagactttgatgaacgttcagaagctccccgtaggcccagtcgtaagggcctgcggaatgataaagataagccattgcctcctctgttggcccgtgttggtgggaatattgaagtacttggttttaatgctcgtcagcgaaaagcctttcttaatgcaattatgcgatatggtatgccacctcaggatgcttttactacccagtggcttgtaagagacctgcgaggcaaatcagagaaagagttcaaggcatatgtctctcttttcatgcggcatttatgtgagccgggggcagatggggctgagacctttgctgatggtgtcccccgagaaggcctgtctcgccagcatgtccttactagaattggtgttatgtctttgattcgcaagaaggttcaggagtttgaacatgttaatgggcgctggagcatgcctgaactggctgaggtggaggaaaacaagaagatgtcccagccagggtcaccctccccaaaaactcctacaccctccactccaggggacacgcagcccaacactcctgcacctgtcccacctgctgaagatgggataaaaatagaggaaaatagcctcaaagaagaagagagcatagaaggagaaaaggaggttaaatctacagcccctgagactgccattgagtgtacacaggcccctgcccctgcctcagaggatgaaaaggtcgttgttgaaccccctgagggagaggagaaagtggaaaaggcagaggtgaaggagagaacagaggaacctatggagacagagcccaaaggtgctgctgatgtagagaaggtggaggaaaagtcagcaatagatctgacccctattgtggtagaagacaaagaagagaagaaagaagaagaagagaaaaaagaggtgatgcttcagaatggagagacccccaaggacctgaatgatgagaaacagaagaaaaatattaaacaacgtttcatgtttaacattgcagatggtggttttactgagttgcactccctttggcagaatgaagagcgggcagccacagttaccaagaagacttatgagatctggcatcgacggcatgactactggctgctagccggcattataaaccatggctatgcccggtggcaagacatccagaatgacccacgctatgccatcctcaatgagcctttcaagggtgaaatgaaccgtggcaatttcttagagatcaagaataaatttctagctcgaaggtttaagctcttagaacaagctctggtgattgaggaacagctgcgccgggctgcttacttgaacatgtcagaagacccttctcacccttccatggccctcaacacccgctttgctgaggtggagtgtttggcggaaagtcatcagcacctgtccaaggagtcaatggcaggaaacaagccagccaatgcagtcctgcacaaagttctgaaacagctggaagaactgctgagtgacatgaaagctgatgtgactcgactcccagctaccattgcccgaattcccccagttgctgtgaggttacagatgtcagagcgtaacattctcagccgcctggcaaaccgggcacccgaacctaccccacagcaggtagcccagcagcagtgaagatgcagactgataccacctccaccgctgagcagtgaccttcctcactttctcttgtcccagcttctcccctgggggcctgagagaccctcaccttccttctgcccatcttccatgttgtaaaggaacagccccagtgcactgggggaggggagggagtgaggggcagtggtgcccttcctgcagaagagacatgcagcagtagcgctggcgccatctgcaggagctggcgggctggccttctggaccctggcttctccccactgtaacgcctgttacacacaaactgttgtgggttcctgccaggcttgaagaaaatgatctgaattttttcctccttttggttttattttgttggtttattttgtgttttcttttctcctttttggggggtattcagagtgggctgggcccctgggcgagacacagctacctctgttggcatctttttaataccaggaacccagcggctctagccactgagcggctaaatgaaataaagtggaaaaaaaaaaaaaaggaaaaaaccaaaagcataaaaaaccacagcaaatttcttgatgaaaattgaaaataaaagtttccttgt

SEQ ID NO: 3469 - protein, 1912 aa, Homo sapiens
MASGLGSPSPCSAGSEEEDMDALLNNSLPPPHPENEEDPEEDLSETETPKLKKKKKPKKPRDPKIPKSKRQKKERMLLCRQLGDSSGEGPEFVEEEEEVALRSDSEGSDYTPGKKKKKKLGPKKEKKSKSKRKEEEEEDDDDDDSKEPKSSAQLLEDWGMEDIDHVFSEEDYRTLTNYKAFSQFVRPLIAAKNPKIAVSKMMMVLGAKWREFSTNNPFKGSSGASVAAAAAAAVAVVESMVTATEVAPPPPPVEVPIRKAKTKEGKGPNARRKPKGSPRVPDAKKPKPKKVAPLKIKLGGFGSKRKRSSSEDDDLDVESDFDDASINSYSVSDGSTSRSSRSRKKLRTTKKKKKGEEEVTAVDGYETDHQDYCEVCQQGGEIILCDTCPRAYHMVCLDPDMEKAPEGKWSCPHCEKEGIQWEAKEDNSEGEEILEEVGGDLEEEDDHHMEFCRVCKDGGELLCCDTCPSSYHIHCLNPPLPEIPNGEWLCPRCTCPALKGKVQKILIWKWGQPPSPTPVPRPPDADPNTPSPKPLEGRPERQFFVKWQGMSYWHCSWVSELQLELHCQVMFRNYQRKNDMDEPPSGDFGGDEEKSRKRKNKDPKFAEMEERFYRYGIKPEWMMIHRILNHSVDKKGHVHYLIKWRDLPYDQASWESEDVEIQDYDLFKQSYWNHRELMRGEEGRPGKKLKKVKLRKLERPPETPTVDPTVKYERQPEYLDATGGTLHPYQMEGLNWLRFSWAQGTDTILADEMGLGKTVQTAVFLYSLYKEGHSKGPFLVSAPLSTIINWEREFEMWAPDMYVVTYVGDKDSRAIIRENEFSFEDNAIRGGKKASRMKKEASVKFHVLLTSYELITIDMAILGSIDWACLIVDEAHRLKNNQSKFFRVLNGYSLQHKLLLTGTPLQNNLEELFHLLNFLTPERFHNLEGFLEEFADIAKEDQIKKLHDMLGPHMLRRLKADVFKNMPSKTELIVRVELSPMQKKYYKYILTRNFEALNARGGGNQVSLLNVVMDLKKCCNHPYLFPVAAMEAPKMPNGMYDGSALIRASGKLLLLQKMLKNLKEGGHRVLIFSQMTKMLDLLEDFLEHEGYKYERIDGGITGNMRQEAIDRFNAPGAQQFCFLLSTRAGGLGINLATADTVIIYDSDWNPHNDIQAFSRAHRIGQNKKVMIYRFVTRASVEERITQVAKKKMMLTHLVVRPGLGSKTGSMSKQELDDILKFGTEELFKDEATDGGGDNKEGEDSSVIHYDDKAIERLLDRNQDETEDTELQGMNEYLSSFKVAQYVVREEEMGEEEEVEREIIKQEESVDPDYWEKLLRHHYEQQQEDLARNLGKGKRIRKQVNYNDGSQEDRDWQDDQSDNQSDYSVASEEGDEDFDERSEAPRRPSRKGLRNDKDKPLPPLLARVGGNIEVLGFNARQRKAFLNAIMRYGMPPQDAFTTQWLVRDLRGKSEKEFKAYVSLFMRHLCEPGADGAETFADGVPREGLSRQHVLTRIGVMSLIRKKVQEFEHVNGRWSMPELAEVEENKKMSQPGSPSPKTPTPSTPGDTQPNTPAPVPPAEDGIKIEENSLKEEESIEGEKEVKSTAPETAIECTQAPAPASEDEKVVVEPPEGEEKVEKAEVKERTEEPMETEPKGAADVEKVEEKSAIDLTPIVVEDKEEKKEEEEKKEVMLQNGETPKDLNDEKQKKNIKQRFMFNIADGGFTELHSLWQNEERAATVTKKTYEIWHRRHDYWLLAGIINHGYARWQDIQNDPRYAILNEPFKGEMNRGNFLEIKNKFLARRFKLLEQALVIEEQLRRAAYLNMSEDPSHPSMALNTRFAEVECLAESHQHLSKESMAGNKPANAVLHKVLKQLEELLSDMKADVTRLPATIARIPPVAVRLQMSERNILSRLANRAPEPTPQQVAQQQ

SEQ ID NO: 3470 - DNA, 2815 bp, Homo sapiens
caccggtctgcatctcccagcagaaggcgcagccatgaatccgttattcggccccaacctcttcctcctgcagcaggagcagcagggcctggccgggccactgggggactcactgggaggcgaccacttcgccgggggaggagacttgcccccggcgcctctctcgccggccggccctgctgcctactcgccgcccgggccgggcccggccccgcctgccgccatggccctccgcaatgacctgggctccaacatcaacgtgctcaagaccctgaacctccggttccgctgcttcctggccaaggtgcatgagctggagcgccggaaccggctgttggagaagcaactgcagcaagcgctggaggagggtaagcagggccggcggggcctgggtcgtcgcgaccaggcagtgcagaccggcttcgtcagccccatccggcccctggggctgcagctgggcgcccggccggccgctgtctgcagcccttcggcgcgcgtgctgggctcgcccgcgcgctccccggccggccccctcgcgccctccgcggccagcctctcgtcgtcctccacctccacctccaccacctattcctcgtcggcccgcttcatgcccggcaccatctggtcgttctcgcacgcccgccggctcgggccgggactggagcccactctggtgcaagggcctggcttgtcgtgggtgcacccggatggggtgggcgtccagatcgacaccatcacgcccgagatccgcgctctctacaacgtgctggccaaagtgaagcgggagcgggacgagtacaagcggagatgcttttacagggttaaatgataccacaagaggcagggcagcgggctcgacgagctctgttctggtgcgggcaggaggcgggagcccggatctgtgcgactgaaggtgggaagaggagtacacggtgcggatccagctgcaagaccgtgtaaatgagctccaggaggaagcccaggaggctgatgcctgccaggaggagctggcactgaaggtggaacagttgaaggctgagctggtggtcttcaaggggctcatgagtaacaacctgtcggagctggacaccaagatccaggagaaagccatgaaggtggatatggacatctgccgccgcatcgacatcaccgccaagctctgcgatgtggctcagcagcgcaactgcgaggacatgatccagatgttccaggtcccatccatgggggggcggaagcgggagcgcaaggctgccgtcgaggaggacacctccctgtcggagagtgaggggccccgccagcccgatggggatgaggaggagagcacagccctcagcatcaacgaggagatgcagcgcatgctcaaccagctgagggagtatgattttgaggacgactgtgacagcctgacttgggaggagactgaggagaccctgctgctttgggaggatttctcaggctatgccatggcagctgcagaggcccagggagagcagcaggaagatagcctggagaaggtgattaaagatacggagtccctgttcaaaacccgggagaaggagtatcaggagaccattgaccagatagagctggagttggccacggccaagaacgacatgaaccggcacctgcacgagtacatggagatgtgcagcatgaagcgcggcctggacgtgcagatggagacctgccgccggctcatcacccagtctggagaccgaaagtctcctgctttcactgcggtcccgcttagcgacccgccgccgccgccaagcgaggctgaggactccgatcgcgatgtctcatctgacagctccatgagatagagacctgcctcccccttgcacccgaggccctcgcagcagggagctcagcgaggcagagggtggggctgcacagaggggaacatcagctgcagctctgcaccaggccggtccctggggactggggcgctcctccctcaggctttctccctcagtcttggcttctccagggctctggggtgtctggagctaggcttggccctaccattctggggccatttccaccacagttggggctctcctgccttcacgcgtgggtgtctgctacttccccatctttaaaatgctgccagagcgattgcggcccctcaccttgtccacgtatcaggaatgtgaatgtgggacctttcctccatccctgttgtccggagccagctcactgtcttccacactggtgctaactggcccaggcactggagtggaatagaatgcagctggaggctacgcatggcctctgcagcacacgcagctggagagggcttctgtccctgtcagcggcagagggcgttggggctggccggggcaccttgtccctgctatggtccacatgctcacgctgtccacctgccaggtggagtgtatgtggctgtggccctccctcgtggaggtgccgtgctttaaagaggccttagtgcccgggatgggcacagtgttttgaagggaggtgggagctcttgctctcctggtcactgcagaatgacagagaaggtgaagctccatgcatgtgtgcgcgggtgtatgtgcgctcagggtctctgtttaagtatcagctaaagatgtgcttcctccgtgtctgtcatacactgagaccaacaggctacagtgtccctgattcttggaaaagcctggagaagctggggagatgcggttcacaatgcctcggtataggaggctgtgttgagctgacattcaaatggattctttaataataatgaaactggcgagtaaaaaaaaaaaaaaaaaaaaaaaaaaaaaaaaaaaaaaaaaaaaaaaaa

SEQ ID NO: 3471 - protein, 264 aa, Homo sapiens
MNPLFGPNLFLLQQEQQGLAGPLGDSLGGDHFAGGGDLPPAPLSPAGPAAYSPPGPGPAPPAAMALRNDLGSNINVLKTLNLRFRCFLAKVHELERRNRLLEKQLQQALEEGKQGRRGLGRRDQAVQTGFVSPIRPLGLQLGARPAAVCSPSARVLGSPARSPAGPLAPSAASLSSSSTSTSTTYSSSARFMPGTIWSFSHARRLGPGLEPTLVQGPGLSWVHPDGVGVQIDTITPEIRALYNVLAKVKRERDEYKRRCFYRVK

SEQ ID NO: 3472 - DNA, 1268 bp, Homo sapiens
ggttgagcacagggtactttattgatggtacatgacaaggtgcggctccctaggcccctcccctcttcaaggggtctacatggcaactgtgaggaggggagattcagtgtggtgggggactgagtgtggcagggactccccagcagtgagggtctctctcttcctcttgtgctcttgctggggctggtggtccaggggtcttactccttggaggccatgtgggccatgaggtccaccaccctgttgctgtagccaaattcgttgtcataccaggaaatgagcttgacaaagtggtcgttgagggcaatgccagccccagcgtcaaaggtggaggagtgggtgtcgctgttgaagtcagaggagaccacctggtgctcagtgtagcccaggatgcccttgagggggccctccgacgcctgcttcaccaccttcttgatgtcatcatatttggcaggtttttctagacggcaggtcaggtccaccactgacacgttggcagtggggacacggaaggccatgccagtgagcttcccgttcagctcagggatgaccttgcccacagccttggcagcgccagtagaggcagggatgatgttctggagagccccgcggccatcacgccacagtttcccggaggggccatccacagtcttctgggtggcagtgatggcatggactgtggtcatgagtccttccacgataccaaagttgtcatggatgaccttggccaggggtgctaagcagttggtggtgcaggaggcattgctgatgatcttgaggctgttgtcatacttctcatggttcacacccatgacgaacatgggggcatcagcagagggggcagagatgatgacccttttggctcccccctgcaaatgaaccccagccttctccatggtggtgaagacgccagtggactccacgacgtactcagcgccagcatcgccccacttgattttggagggatctcactcctggaagatggtgatgggatttccattgatgacaagcttcccgttctcagccttgacggtgccatggaatttgccatgggtggaatcatattggaacatgtaaaccatgtagttgaggtcaatgaaggggtcattgatggcaacaatatccactttaccagagttaaaagcagccctggtgaccaggcgcccaatacgaccaaatccgttgactccgaccttcaccttccccatggtgtctgagcgatgtggctcggctggcgacgcaaaagaagatgcggctgactgtcgaac

SEQ ID NO: 3473 - DNA, 1283 bp, Homo sapiens
ctctctgctcctcctgttcgacagtcagccgcatcttcttttgcgtcgccagccgagccacatcgctcagacaccatggggaaggtgaaggtcggagtcaacggatttggtcgtattgggcgcctggtcaccagggctgcttttaactctggtaaagtggatattgttgccatcaatgaccccttcattgacctcaactacatggtttacatgttccaatatgattccacccatggcaaattccatggcaccgtcaaggctgagaacgggaagcttgtcatcaatggaaatcccatcaccatcttccaggagcgagatccctccaaaatcaagtggggcgatgctggcgctgagtacgtcgtggagtccactggcgtcttcaccaccatggagaaggctggggctcatttgcaggggggagccaaaagggtcatcatctctgccccctctgctgatgcccccatgttcgtcatgggtgtgaaccatgagaagtatgacaacagcctcaagatcatcagcaatgcctcctgcaccaccaactgcttagcacccctggccaaggtcatccatgacaactttggtatcgtggaaggactcatgaccacagtccatgccatcactgccacccagaagactgtggatggcccctccgggaaactgtggcgtgatggccgcggggctctccagaacatcatccctgcctctactggcgctgccaaggctgtgggcaaggtcatccctgagctgaacgggaagctcactggcatggccttccgtgtccccactgccaacgtgtcagtggtggacctgacctgccgtctagaaaaacctgccaaatatgatgacatcaagaaggtggtgaagcaggcgtcggagggccccctcaagggcatcctgggctacactgagcaccaggtggtctcctctgacttcaacagcgacacccactcctccacctttgacgctggggctggcattgccctcaacgaccactttgtcaagctcatttcctggtatgacaacgaatttggctacagcaacagggtggtggacctcatggcccacatggcctccaaggagtaagacccctggaccaccagccccagcaagagcacaagaggaagagagagaccctcactgctggggagtccctgccacactcagtcccccaccacactgaatctcccctcctcacagttgccatgtagaccccttgaagaggggaggggcctagggagccgcaccttgtcatgtaccatcaataaagtaccctgtgctcaacc

SEQ ID NO: 3474 - protein, 335 aa, Homo sapiens
MGKVKVGVNGFGRIGRLVTRAAFNSGKVDIVAINDPFIDLNYMVYMFQYDSTHGKFHGTVKAENGKLVINGNPITIFQERDPSKIKWGDAGAEYVVESTGVFTTMEKAGAHLQGGAKRVIISAPSADAPMFVMGVNHEKYDNSLKIISNASCTTNCLAPLAKVIHDNFGIVEGLMTTVHAITATQKTVDGPSGKLWRDGRGALQNIIPASTGAAKAVGKVIPELNGKLTGMAFRVPTANVSVVDLTCRLEKPAKYDDIKKVVKQASEGPLKGILGYTEHQVVSSDFNSDTHSSTFDAGAGIALNDHFVKLISWYDNEFGYSNRVVDLMAHMASKE

SEQ ID NO: 3475 - DNA, 5547 bp, Homo sapiens
aagttttggagcgccggacaagctgaggtccgcgactcgtcgctaagattccccaaaactgagatttcaagaaaattcaccctttccgctttctttggcgtccttcaaccgtgaaggaaatgaaggttgagaacctggaacccgcttccaatgaccaagccctttctctgtgcctcacaacagtcttccgctgtagctgtttttattacccctattttactactggggaggagatttgaggtcctgaaagtgaagtgacttgctggacgtcacttagcagaggagatggcgaaacctggattagaggcgatgccttctaactcccagcgtggacttgcctcctttcctgggggtgactgaatgcccagccagggacgcgacgtctctggccagcagaaatacggcctcctccccgccgactgggcaaagggggaccttgcggccaaggagggattcgcaggcgggccgggggtgggagcgggggccggagccggagccttggcccgcccccgggcggcgctgtgattggccggccgctccggcgggcgtcgcgattggccgtcctgcagccgttgagatttgaactcggtatttgtggctttgcccgcgcgttgccagactcagaggcggccctttgcctctgcctgccggggattggccggattctccgccgacttgaaaactgccttgctaattggtgcgtgttgtgcacgcgtgttttttccttttcatttcagcctgactgccggaatcagagccgcgggtgagatccccagccctgtgagcctgtaggagtagaatggctccccaaatgtatgagttccatctgccattatccccagaggagttgttgaaaagtggaggggtgaatcagtatgttgtgcaagaggtactgtccatcaaacatcttccaccacagcttagagcttttcaggctgcctttcgagctcaggggcccctggctatgctgcagcactttgatactatctacagcattttgcatcactttcgaagtatagatcctggcctcaaagaagatactctgcaattcctgataaaagtggtatcccgccactcccaggagcttccagctatcctggatgatacaactttgagtggatcagatagaaacgcccatctaaatgccctcaaaatgaactgttatgctctgatacgtctcctggaatcctttgagaccatggccagccagacaaaccttgtggacctggaccttggtgggaagggtaagaaagctcggaccaaggcagcccatggctttgactgggaagaagagaggcaaccaattcttcagcttttaacacagctacttcagttggacatccgtcacctgtggaaccactcaataattgaagaagaatttgtcagtttggttactggctgttgctaccgccttctggagaatcccaccattaatcaccagaagaaccgccccactcgggaagccataacacacctgcttggtgtagccttgacccgttataaccatatgctcagtgctacagtgaagatcatccagatgctgcagcactttgaacacctggcacctgtactggttgcagccgtgagtctatgggcaactgactatggaatgaagagcatagtgggagagattgtaagagagattggacaaaagtgtccccaagagctgagtcgagacccttcagggacaaagggctttgcagcattcctgacagaactagcagaacgtgtcccagctatcctgatgtccagcatgtgcattttgctagatcacctggatggagaaaattacatgatgcgtaatgctgtgctggcagccatggcggagatggtgctgcaggttctcagtggcgatcaactggaagcagcagcccgagacaccagagaccagttcttggatactttacaagcccatggccatgatgtcaactcctttgtgcggagccgtgttttgcagctcttcacccgaattgtccagcagaaggctctccccctgacacgtttccaggcagtggtggctttagctgtgggacgtctggcagacaagtcagtgctagtatgtaaaaatgccatccagctgctggccagttttctagccaataatcctttctcctgcaagcttagtgatgctgaccttgccggaccactgcagaaggagacccagaaattacaagagatgagggcccagaggcgaactgcagcagcttctgcagtgctggacccagaggaggagtgggaagccatgctgccagagttgaagtctaccctgcagcagcttctacagcttccccagggagaggaggagattcctgagcaaattgccaatacagagacaactgaagatgtgaaaggacgcatctatcaactgcttgccaaagctagttacaaaaaggccatcattctcactcgagaagccacaggccacttccaggagtccgaacccttcagtcatatagacccagaggagtcagaggagaccaggctcttgaatatcttaggacttatcttcaaaggcccagcagcttccacacaagaaaagaatccccgggagtctacaggaaacatggtcacaggacagactgtctgtaaaaataaacccaatatgtcggatcctgaggaatccaggggaaatgatgaactagtgaagcaggagatgctggtacagtatctgcaggatgcctacagcttctcccggaagattacagaggccattggcatcatcagcaagatgatgtatgaaaacacaactacagtggtgcaggaggtgattgaattctttgtgatggtcttccaatttggggtaccccaggccctgtttggggtgcgccgtatgctgcctctcatctggtctaaggagcctggtgtccgggaagccgtgcttaatgcctaccgccaactctacctcaaccccaaaggggactctgccagagccaaggcccaggctttgattcagaatctctctctgctgctagtggatgcctcggttgggaccattcagtgtcttgaggaaattctctgtgagtttgtgcagaaggatgagttgaaaccagcagtgacccagctgctgtgggagcgggccaccgagaaggtcgcctgctgtcctctggagcgctgttcctctgtcatgcttcttggcatgatggcacgaggaaagccagaaattgtgggaagcaatttagacacactggtgagcatagggctggatgagaagtttccacaggactacaggctggcccagcaggtgtgccatgccattgccaacatctcggacaggagaaagccttctctgggcaaacgtcacccccccttccggctgcctcaggaacacaggttgtttgagcgactgcgggagacagtcacaaaaggctttgtccacccagacccactctggatcccattcaaagaggtggcagtgaccctcatttaccaactggcagagggccccgaagtgatctgtgcccagatattgcagggctgtgcaaaacaggccctggagaagctagaagagaagagaaccagtcaggaggacccgaaggagtcccccgcaatgctccccactttcctgttgatgaacctgctgtccctggctggggatgtggctctgcagcagctggtccacttggagcaggcagtgagtggagagctctgccggcgccgagttctccgggaagaacaggagcacaagaccaaagatcccaaggagaagaatacgagctctgagaccaccatggaggaggagctggggctggttggggcaacagcagatgacacagaggcagaactaatccgtggcatctgcgagatggaactgttggatggcaaacagacactggctgcctttgttccactcttgcttaaagtctgtaacaacccaggcctctatagcaacccagacctctctgcagctgcttcacttgcccttggcaagttctgcatgatcagtgccactttctgcgactcccagcttcgtcttctgttcaccatgctggaaaagtctccacttcccattgtccggtctaacctcatggttgccactggggatctggccatccgctttcccaatctggtggacccctggactcctcatctgtatgctcgtctccgggaccctgctcagcaagtgcggaaaacagcggggctggtgatgacccacctgatcctcaaggacatggtgaaggtgaaggggcaggtcagcgagatggcggtgctgctcatcgaccccgagcctcagattgctgccctggccaagaacttcttcaatgagctctcccacaagggcaacgcaatctataatctccttccagatatcatcagccgcctgtcagaccccgagctgggggtggaggaagagcctttccacaccatcatgaaacagctcctctcctacatcaccaaggacaagcagacagagagcctggtggaaaagctgtgtcagcggttccgcacatcccgaactgagcggcagcagcgagacctggcctactgtgtgtcacagctgcccctcacagagcgaggcctccgtaagatgcttgacaattttgactgttttggagacaaactgtcagatgagtccatcttcagtgcttttttgtcagttgtaggcaagctgcgacgtggggccaagcctgagggcaaggctataatagatgaatttgagcagaagcttcgggcctgtcataccagaggtttggatggaatcaaggagcttgagattggccaagcaggtagccagagagcgccatcagccaagaaaccatccactggttctaggtaccagcctctggcttctacagcctcagacaatgactttgtcacaccagagccccgccgtactacccgtcggcatccaaacacccagcagcgagcttccaaaaagaaacccaaagttgtcttctcaagtgatgagtccagtgaggaagatctttcagcagagatgacagaagacgagacacccaagaaaacaactcccattctcagagcatcggctcgcaggcacagatcctaggaagtctgttcctgtcctccctgtgcagggtatcctgtagggtgacctggaattcgaattctgtttcccttgtaaaatatttgtctgtctcttttttttaaaaaaaaaaaaggccgggcactgtggctcacgcctgtaatcccagcactttgcgataccaaggcgggtggataacctgaggtagggagttcgagaccagcctgaccaacatggagaaaccccatctctactaaaaataaaaaattagccgggcgtattggcgtgcgcctgtaatcccagctactcaagaggctgaggcaggagaatcgcctgaacccagaggcggaggttgtagtgagccgaaatcacaccattgcactccagcttgggcaacaatagcgaacctccatctcaaattaaaaaaaaaatgcctacacgctctttaaaatgcaaggctttctcttaaattagcctaactgaactgcgttgagctgcttcaactttggaatatatgtttgccaatctccttgttttctaatgaataaatgtttttatatactttt

SEQ ID NO: 3476 - DNA, 2136 bp, Homo sapiens
gccctggaggcccggcctggccgctcccggccctggggtgcacatcggccctgagtcccgtcccaggctctgggctcgggcagccgccgccaccgctgcccaggacgtcgggcctcctgccttcctcccaggcccccacgttgctggccgcctggccgagtggccgccatgctcctgccttgggccacctctgcccccggcctggcctgggggcctctggtgctgggcctcttcgggctcctggcagcatcgcagccccaggcggtgcctccatatgcgtcggagaaccagacctgcagggaccaggaaaaggaatactatgagccccagcaccgcatctgctgctcccgctgcccgccaggcacctatgtctcagctaaatgtagccgcatccgggacacagtttgtgccacatgtgccgagaattcctacaacgagcactggaactacctgaccatctgccagctgtgccgcccctgtgacccagtgatgggcctcgaggagattgccccctgcacaagcaaacggaagacccagtgccgctgccagccgggaatgttctgtgctgcctgggccctcgagtgtacacactgcgagctactttctgactgcccgcctggcactgaagccgagctcaaagatgaagttgggaagggtaacaaccactgcgtcccctgcaaggcagggcacttccagaatacctcctcccccagcgcccgctgccagccccacaccaggtgtgagaaccaaggtctggtggaggcagctccaggcactgcccagtccgacacaacctgcaaaaatccattagagccactgcccccagagatgtcaggaaccatgctgatgctggccgttctgctgccactggccttctttctgctccttgccaccgtcttctcctgcatctggaagagccacccttctctctgcaggaaactgggatcgctgctcaagaggcgtccgcagggagagggacccaatcctgtagctggaagctgggagcctccgaaggcccatccatacttccctgacttggtacagccactgctacccatttctggagatgtttccccagtatccactgggctccccgcagccccagttttggaggcaggggtgccgcaacagcagagtcctctggacctgaccagggagccgcagttggaacccggggagcagagccaggtggcccacggtaccaatggcattcatgtcaccggcgggtctatgactatcactggcaacatctacatctacaatggaccagtactggggggaccaccgggtcctggagacctcccagctacccccgaacctccataccccattcccgaagagggggaccctggccctcccgggctctctacaccccaccaggaagatggcaaggcttggcacctagcggagacagagcactgtggtgccacaccctctaacaggggcccaaggaaccaatttatcacccatgactgacggagtctgagaaaaggcagaagaaggggggcacaagggcactttctcccttgaggctgccctgcccacgtgggattcacaggggcctgagtagggcccggggaagcagagccctaagggattaaggctcagacacctctgagagcaggtgggcactggctgggtacggtgccctccacaggactctccctactgcctgagcaaacctgaggcctcccggcagacccacccaccccctggggctgctcagcctcaggcacggacagggcacatgataccaactgctgcccactacggcacgccgcaccggagcacggcaccgagggagccgccacacggtcacctgcaaggacgtcacgggcccctctaaaggattcgtggtgctcatccccaagcttcagagaccctttggggttccacacttcacgtggactgaggtagaccctgcatgaagatgaaattatagggaggacgctccttccctcccctcctagaggagaggaaagggagtcattaacaactagggggttgggtaggattcctaggtatggggaagagttttggaaggggaggaaaatggcaagtgtatttatattgtaaccacatgcaaataaaaagaatgggacctaaactcgtgccgctcgtgccgaattcctgcag

SEQ ID NO: 3477 - protein, 435 aa, Homo sapiens
MLLPWATSAPGLAWGPLVLGLFGLLAASQPQAVPPYASENQTCRDQEKEYYEPQHRICCSRCPPGTYVSAKCSRIRDTVCATCAENSYNEHWNYLTICQLCRPCDPVMGLEEIAPCTSKRKTQCRCQPGMFCAAWALECTHCELLSDCPPGTEAELKDEVGKGNNHCVPCKAGHFQNTSSPSARCQPHTRCENQGLVEAAPGTAQSDTTCKNPLEPLPPEMSGTMLMLAVLLPLAFFLLLATVFSCIWKSHPSLCRKLGSLLKRRPQGEGPNPVAGSWEPPKAHPYFPDLVQPLLPISGDVSPVSTGLPAAPVLEAGVPQQQSPLDLTREPQLEPGEQSQVAHGTNGIHVTGGSMTITGNIYIYNGPVLGGPPGPGDLPATPEPPYPIPEEGDPGPPGLSTPHQEDGKAWHLAETEHCGATPSNRGPRNQFITHD

SEQ ID NO: 3478 - DNA, 3151 bp, Homo sapiens
ccggccagcgggcgggctccccagccaggccgctgcacctgtcaggggaacaagctggaggagcaggaccctagacctctgcagcccataccaggtctcatggaggggaacaagctggaggagcaggactctagccctccacagtccactccagggctcatgaaggggaacaagcgtgaggagcaggggctgggccccgaacctgcggcgccccagcagcccacggcggaggaggaggccctgatcgagttccaccgctcctaccgagagctcttcgagttcttctgcaacaacaccaccatccacggcgccatccgcctggtgtgctcccagcacaaccgcatgaagacggccttctgggcagtgctgtggctctgcacctttggcatgatgtactggcaattcggcctgcttttcggagagtacttcagctaccccgtcagcctcaacatcaacctcaactcggacaagctcgtcttccccgcagtgaccatctgcaccctcaatccctacaggtacccggaaattaaagaggagctggaggagctggaccgcatcacagagcagacgctctttgacctgtacaaatacagctccttcaccactctcgtggccggctcccgcagccgtcgcgacctgcgggggactctgccgcaccccttgcagcgcctgagggtcccgcccccgcctcacggggcccgtcgagcccgtagcgtggcctccagcttgcgggacaacaacccccaggtggactggaaggactggaagatcggcttccagctgtgcaaccagaacaaatcggactgcttctaccagacatactcatcaggggtggatgcggtgagggagtggtaccgcttccactacatcaacatcctgtcgaggctgccagagactctgccatccctggaggaggacacgctgggcaacttcatcttcgcctgccgcttcaaccaggtctcctgcaaccaggcgaattactctcacttccaccacccgatgtatggaaactgctatactttcaatgacaagaacaactccaacctctggatgtcttccatgcctggaatcaacaacggtctgtccctgatgctgcgcgcagagcagaatgacttcattcccctgctgtccacagtgactggggcccgggtaatggtgcacgggcaggatgaacctgcctttatggatgatggtggctttaacttgcggcctggcgtggagacctccatcagcatgaggaaggaaaccctggacagacttgggggcgattatggcgactgcaccaagaatggcagtgatgttcctgttgagaacctttacccttcaaagtacacacagcaggtgtgtattcactcctgcttccaggagagcatgatcaaggagtgtggctgtgcctacatcttctatccgcggccccagaacgtggagtactgtgactacagaaagcacagttcctgggggtactgctactataagctccaggttgacttctcctcagaccacctgggctgtttcaccaagtgccggaagccatgcagcgtgaccagctaccagctctctgctggttactcacgatggccctcggtgacatcccaggaatgggtcttccagatgctatcgcgacagaacaattacaccgtcaacaacaagagaaatggagtggccaaagtcaacatcttcttcaaggagctgaactacaaaaccaattctgagtctccctctgtcacgatggtcaccctcctgtccaacctgggcagccagtggagcctgtggttcggctcctcggtgttgtctgtggtggagatggctgagctcgtctttgacctgctggtcatcatgttcctcatgctgctccgaaggttccgaagccgatactggtctccaggccgagggggcaggggtgctcaggaggtagcctccaccctggcatcctcccctccttcccacttctgcccccaccccatgtctctgtccttgtcccagccaggccctgctccctctccagccttgacagcccctccccctgcctatgccaccctgggcccccgcccatctccagggggctctgcaggggccagttcctccacctgtcctctgggggggccctgagagggaaggagaggtttctcacaccaaggcagatgctcctctggtgggagggtgctggccctggcaagattgaaggatgtgcagggcttcctctcagagccgcccaaactgccgttgatgtgtggaggggaagcaagatgggtaagggctcaggaagttgctccaagaacagtagctgatgaagctgcccagaagtgccttggctccagccctgtaccccttggtactgcctctgaacactctggtttccccacccaactgcggctaagtctctttttcccttggatcagccaagcgaaacttggagctttgacaaggaactttcctaagaaaccgctgataaccaggacaaaacacaaccaagggtacacgcaggcatgcacgggtttcctgcccagcgacggcttaagccagcccccgactggcctggccacactgctctccagtagcacagatgtctgctcctcctcttgaacttgggtgggaaaccccacccaaaagccccctttgttacttaggcaattccccttccctgactcccgagggctagggctagagcagacccgggtaagtaaaggcagacccagggctcctctagcctcatacccgtgccctcacagagccatgccccggcacctctgccctgtgtctttcatacctctacatgtctgcttgagatatttcctcagcctgaaagtttccccaaccatctgccagagaactcctatgcatcccttagaaccctgctcagacaccattacttttgtgaacgcttctgccacatcttgtcttccccaaaattgatcactccgccttctcctgggctcccgtagcacactataacatctgctggagtgttgctgttgcaccatactttcttgtacatttgtgtctcccttcccaactagactgtaagtgccttgcggtcagggactgaatcttgcccgtttatgtatgctccatgtctagcccatcatcctgcttggagcaagtaggcaggagctcaataaatgtttgttgcatgaaaaaaaaaaaaaaaaaa

SEQ ID NO: 3479 - protein, 669 aa, Homo sapiens
MEGNKLEEQDSSPPQSTPGLMKGNKREEQGLGPEPAAPQQPTAEEEALIEFHRSYRELFEFFCNNTTIHGAIRLVCSQHNRMKTAFWAVLWLCTFGMMYWQFGLLFGEYFSYPVSLNINLNSDKLVFPAVTICTLNPYRYPEIKEELEELDRITEQTLFDLYKYSSFTTLVAGSRSRRDLRGTLPHPLQRLRVPPPPHGARRARSVASSLRDNNPQVDWKDWKIGFQLCNQNKSDCFYQTYSSGVDAVREWYRFHYINILSRLPETLPSLEEDTLGNFIFACRFNQVSCNQANYSHFHHPMYGNCYTFNDKNNSNLWMSSMPGINNGLSLMLRAEQNDFIPLLSTVTGARVMVHGQDEPAFMDDGGFNLRPGVETSISMRKETLDRLGGDYGDCTKNGSDVPVENLYPSKYTQQVCIHSCFQESMIKECGCAYIFYPRPQNVEYCDYRKHSSWGYCYYKLQVDFSSDHLGCFTKCRKPCSVTSYQLSAGYSRWPSVTSQEWVFQMLSRQNNYTVNNKRNGVAKVNIFFKELNYKTNSESPSVTMVTLLSNLGSQWSLWFGSSVLSVVEMAELVFDLLVIMFLMLLRRFRSRYWSPGRGGRGAQEVASTLASSPPSHFCPHPMSLSLSQPGPAPSPALTAPPPAYATLGPRPSPGGSAGASSSTCPLGGP

SEQ ID NO: 3480 - DNA, 2161 bp, Homo sapiens
cggcccagtgatcttgaaccccaaaggccagaactggagcctcagtccagagaattctgagaaaattaaagcagagaggaggggagagatcactgggaccaggccgtgatctctatgcccgagtctcaaccctcaactgtcaccccaaggcacttgggacgtcctggacagaccgagtcccgggaagccccagcactgccgctgccacactgccctgagcccaaatgggggagtgagaggccatagctgtctggcatgggcctctccaccgtgcctgacctgctgctgccgctggtgctcctggagctgttggtgggaatatacccctcaggggttattggactggtccctcacctaggggacagggagaagagagatagtgtgtgtccccaaggaaaatatatccaccctcaaaataattcgatttgctgtaccaagtgccacaaaggaacctacttgtacaatgactgtccaggcccggggcaggatacggactgcagggagtgtgagagcggctccttcaccgcttcagaaaaccacctcagacactgcctcagctgctccaaatgccgaaaggaaatgggtcaggtggagatctcttcttgcacagtggaccgggacaccgtgtgtggctgcaggaagaaccagtaccggcattattggagtgaaaaccttttccagtgcttcaattgcagcctctgcctcaatgggaccgtgcacctctcctgccaggagaaacagaacaccgtgtgcacctgccatgcaggtttctttctaagagaaaacgagtgtgtctcctgtagtaactgtaagaaaagcctggagtgcacgaagttgtgcctaccccagattgagaatgttaagggcactgaggactcaggcaccacagtgctgttgcccctggtcattttctttggtctttgccttttatccctcctcttcattggtttaatgtatcgctaccaacggtggaagtccaagctctactccattgtttgtgggaaatcgacacctgaaaaagagggggagcttgaaggaactactactaagcccctggccccaaacccaagcttcagtcccactccaggcttcacccccaccctgggcttcagtcccgtgcccagttccaccttcacctccagctccacctatacccccggtgactgtcccaactttgcggctccccgcagagaggtggcaccaccctatcagggggctgaccccatccttgcgacagccctcgcctccgaccccatccccaacccccttcagaagtgggaggacagcgcccacaagccacagagcctagacactgatgaccccgcgacgctgtacgccgtggtggagaacgtgcccccgttgcgctggaaggaattcgtgcggcgcctagggctgagcgaccacgagatcgatcggctggagctgcagaacgggcgctgcctgcgcgaggcgcaatacagcatgctggcgacctggaggcggcgcacgccgcggcgcgaggccacgctggagctgctgggacgcgtgctccgcgacatggacctgctgggctgcctggaggacatcgaggaggcgctttgcggccccgccgccctcccgcccgcgcccagtcttctcagatgaggctgcgcccctgcgggcagctctaaggaccgtcctgcgagatcgccttccaaccccacttttttctggaaaggaggggtcctgcaggggcaagcaggagctagcagccgcctacttggtgctaacccctcgatgtacatagcttttctcagctgcctgcgcgccgccgacagtcagcgctgtgcgcgcggagagaggtgcgccgtgggctcaagagcctgagtgggtggtttgcgaggatgagggacgctatgcctcatgcccgttttgggtgtcctcaccagcaaggctgctcgggggcccctggttcgtccctgagcctttttcacagtgcataagcagttttttttgtttttgttttgttttgttttgtttttaaatcaatcatgttacactaatagaaacttggcactcctgtgccctctgcctggacaagcacatagcaagctgaactgtcctaaggcaggggcgagcacggaacaatggggccttcagctggagctgtggacttttgtacatacactaaaattctgaagtt

SEQ ID NO: 3481 - protein, 455 aa, Homo sapiens
MGLSTVPDLLLPLVLLELLVGIYPSGVIGLVPHLGDREKRDSVCPQGKYIHPQNNSICCTKCHKGTYLYNDCPGPGQDTDCRECESGSFTASENHLRHCLSCSKCRKEMGQVEISSCTVDRDTVCGCRKNQYRHYWSENLFQCFNCSLCLNGTVHLSCQEKQNTVCTCHAGFFLRENECVSCSNCKKSLECTKLCLPQIENVKGTEDSGTTVLLPLVIFFGLCLLSLLFIGLMYRYQRWKSKLYSIVCGKSTPEKEGELEGTTTKPLAPNPSFSPTPGFTPTLGFSPVPSSTFTSSSTYTPGDCPNFAAPRREVAPPYQGADPILATALASDPIPNPLQKWEDSAHKPQSLDTDDPATLYAVVENVPPLRWKEFVRRLGLSDHEIDRLELQNGRCLREAQYSMLATWRRRTPRREATLELLGRVLRDMDLLGCLEDIEEALCGPAALPPAPSLLR

SEQ ID NO: 3482 - DNA, 8357 bp, Homo sapiens
ggggacttccagaatggcaagagagtgagcctctccgtgtatcttggggaattttttgacatccatttgtttgtcaatggtaccgtgacacagggggaccaaagagtctccatgccctatgcctccaaagggctgtatctagaaactgaggctgggtactacaagctgtccggtgaggcctatggctttgtggccaggatcgatggcagcggcaactttcaagtcctgctgtcagacagatacttcaacaagacctgcgggctgtgtggcaactttaacatctttgctgaagatgactttatgacccaagaagggaccttgacctcggacccttatgactttgccaactcatgggctctgagcagtggagaacagtggtgtgaacgggcatctcctcccagcagctcatgcaacatctcctctggggaaatgcagaagggcctgtgggagcagtgccagcttctgaagagcacctcggtgtttgcccgctgccaccctctggtggaccccgagccttttgtggccctgtgtgagaagactttgtgtgagtgtgctggggggctggagtgcgcctgccctgccctcctggagtacgcccggacctgtgcccaggagggaatggtgctgtacggctggaccgaccacagcgcgtgcagcccagtgtgccctgctggtatggagtataggcagtgtgtgtccccttgcgccaggacctgccagagcctgcacatcaatgaaatgtgtcaggagcgatgcgtggatggctgcagctgccctgagggacagctcctggatgaaggcctctgcgtggagagcaccgagtgtccctgcgtgcattccggaaagcgctaccctcccggcacctccctctctcgagactgcaacacctgcatttgccgaaacagccagtggatctgcagcaatgaagaatgtccaggggagtgccttgtcacaggtcaatcacacttcaagagctttgacaacagatacttcaccttcagtgggatctgccagtacctgctggcccgggattgccaggaccactccttctccattgtcattgagactgtccagtgtgctgatgaccgcgacgctgtgtgcacccgctccgtcaccgtccggctgcctggcctgcacaacagccttgtgaaactgaagcatggggcaggagttgccatggatggccaggacgtccagctccccctcctgaaaggtgacctccgcatccagcatacagtgacggcctccgtgcgcctcagctacggggaggacctgcagatggactgggatggccgcgggaggctgctggtgaagctgtcccccgtctatgccgggaagacctgcggcctgtgtgggaattacaatggcaaccagggcgacgacttccttaccccctctgggctggcggagccccgggtggaggacttcgggaacgcctggaagctgcacggggactgccaggacctgcagaagcagcacagcgatccctgcgccctcaacccgcgcatgaccaggttctccgaggaggcgtgcgcggtcctgacgtcccccacattcgaggcctgccatcgtgccgtcagcccgctgccctacctgcggaactgccgctacgacgtgtgctcctgctcggacggccgcgagtgcctgtgcggcgccctggccagctatgccgcggcctgcgcggggagaggcgtgcgcgtcgcgtggcgcgagccaggccgctgtgagctgaactgcccgaaaggccaggtgtacctgcagtgcgggaccccctgcaacctgacctgccgctctctctcttacccggatgaggaatgcaatgaggcctgcctggagggctgcttctgccccccagggctctacatggatgagaggggggactgcgtgcccaaggcccagtgcccctgttactatgacggtgagatcttccagccagaagacatcttctcagaccatcacaccatgtgctactgtgaggatggcttcatgcactgtaccatgagtggagtccccggaagcttgctgcctgacgctgtcctcagcagtcccctgtctcatcgcagcaaaaggagcctatcctgtcggccccccatggtcaagctggtgtgtcccgctgacaacctgcgggctgaagggctcgagtgtaccaaaacgtgccagaactatgacctggagtgcatgagcatgggctgtgtctctggctgcctctgccccccgggcatggtccggcatgagaacagatgtgtggccctggaaaggtgtccctgcttccatcagggcaaggagtatgcccctggagaaacagtgaagattggctgcaacacttgtgtctgtcaggaccggaagtggaactgcacagaccatgtgtgtgatgccacgtgctccacgatcggcatggcccactacctcaccttcgacgggctcaaatacctgttccccggggagtgccagtacgttctggtgcaggattactgcggcagtaaccctgggacctttcggatcctagtggggaataagggatgcagccacccctcagtgaaatgcaagaaacgggtcaccatcctggtggagggaggagagattgagctgtttgacggggaggtgaatgtgaagaggcccatgaaggatgagactcactttgaggtggtggagtctggccggtacatcattctgctgctgggcaaagccctctccgtggtctgggaccgccacctgagcatctccgtggtcctgaagcagacataccaggagaaagtgtgtggcctgtgtgggaattttgatggcatccagaacaatgacctcaccagcagcaacctccaagtggaggaagaccctgtggactttgggaactcctggaaagtgagctcgcagtgtgctgacaccagaaaagtgcctctggactcatcccctgccacctgccataacaacatcatgaagcagacgatggtggattcctcctgtagaatccttaccagtgacgtcttccaggactgcaacaagctggtggaccccgagccatatctggatgtctgcatttacgacacctgctcctgtgagtccattggggactgcgcctgcttctgcgacaccattgctgcctatgcccacgtgtgtgcccagcatggcaaggtggtgacctggaggacggccacattgtgcccccagagctgcgaggagaggaatctccgggagaacgggtatgagtgtgagtggcgctataacagctgtgcacctgcctgtcaagtcacgtgtcagcaccctgagccactggcctgccctgtgcagtgtgtggagggctgccatgcccactgccctccagggaaaatcctggatgagcttttgcagacctgcgttgaccctgaagactgtccagtgtgtgaggtggctggccggcgttttgcctcaggaaagaaagtcaccttgaatcccagtgaccctgagcactgccagatttgccactgtgatgttgtcaacctcacctgtgaagcctgccaggagccgggaggcctggtggtgcctcccacagatgccccggtgagccccaccactctgtatgtggaggacatctcggaaccgccgttgcacgatttctactgcagcaggctactggacctggtcttcctgctggatggctcctccaggctgtccgaggctgagtttgaagtgctgaaggcctttgtggtggacatgatggagcggctgcgcatctcccagaagtgggtccgcgtggccgtggtggagtaccacgacggctcccacgcctacatcgggctcaaggaccggaagcgaccgtcagagctgcggcgcattgccagccaggtgaagtatgcgggcagccaggtggcctccaccagcgaggtcttgaaatacacactgttccaaatcttcagcaagatcgaccgccctgaagcctcccgcatcaccctgctcctgatggccagccaggagccccaacggatgtcccggaactttgtccgctacgtccagggcctgaagaagaagaaggtcattgtgatcccggtgggcattgggccccatgccaacctcaagcagatccgcctcatcgagaagcaggcccctgagaacaaggccttcgtgctgagcagtgtggatgagctggagcagcaaagggacgagatcgttagctacctctgtgaccttgcccctgaagcccctcctcctactctgccccccgacatggcacaagtcactgtgggcccggggctcttgggggtttcgaccctggggcccaagaggaactccatggttctggatgtggcgttcgtcctggaaggatcggacaaaattggtgaagccgacttcaacaggagcaaggagttcatggaggaggtgattcagcggatggatgtgggccaggacagcatccacgtcacggtgctgcagtactcctacatggtgactgtggagtaccccttcagcgaggcacagtccaaaggggacatcctgcagcgggtgcgagagatccgctaccagggcggcaacaggaccaacactgggctggccctgcggtacctctctgaccacagcttcttggtcagccagggtgaccgggagcaggcgcccaacctggtctacatggtcaccggaaatcctgcctctgatgagatcaagaggctgcctggagacatccaggtggtgcccattggagtgggccctaatgccaacgtgcaggagctggagaggattggctggcccaatgcccctatcctcatccaggactttgagacgctcccccgagaggctcctgacctggtgctgcagaggtgctgctccggagaggggctgcagatccccaccctctcccctgcacctgactgcagccagcccctggacgtgatccttctcctggatggctcctccagtttcccagcttcttattttgatgaaatgaagagtttcgccaaggctttcatttcaaaagccaatatagggcctcgtctcactcaggtgtcagtgctgcagtatggaagcatcaccaccattgacgtgccatggaacgtggtcccggagaaagcccatttgctgagccttgtggacgtcatgcagcgggagggaggccccagccaaatcggggatgccttgggctttgctgtgcgatacttgacttcagaaatgcatggtgccaggccgggagcctcaaaggcggtggtcatcctggtcacggacgtctctgtggattcagtggatgcagcagctgatgccgccaggtccaacagagtgacagtgttccctattggaattggagatcgctacgatgcagcccagctacggatcttggcaggcccagcaggcgactccaacgtggtgaagctccagcgaatcgaagacctccctaccatggtcaccttgggcaattccttcctccacaaactgtgctctggatttgttaggatttgcatggatgaggatgggaatgagaagaggcccggggacgtctggaccttgccagaccagtgccacaccgtgacttgccagccagatggccagaccttgctgaagagtcatcgggtcaactgtgaccgggggctgaggccttcgtgccctaacagccagtcccctgttaaagtggaagagacctgtggctgccgctggacctgcccctgtgtgtgcacaggcagctccactcggcacatcgtgacctttgatgggcagaatttcaagctgactggcagctgttcttatgtcctatttcaaaacaaggagcaggacctggaggtgattctccataatggtgcctgcagccctggagcaaggcagggctgcatgaaatccatcgaggtgaagcacagtgccctctccgtcgagctgcacagtgacatggaggtgacggtgaatgggagactggtctctgttccttacgtgggtgggaacatggaagtcaacgtttatggtgccatcatgcatgaggtcagattcaatcaccttggtcacatcttcacattcactccacaaaacaatgagttccaactgcagctcagccccaagacttttgcttcaaagacgtatggtctgtgtgggatctgtgatgagaacggagccaatgacttcatgctgagggatggcacagtcaccacagactggaaaacacttgttcaggaatggactgtgcagcggccagggcagacgtgccagcccatcctggaggagcagtgtcttgtccccgacagctcccactgccaggtcctcctcttaccactgtttgctgaatgccacaaggtcctggctccagccacattctatgccatctgccagcaggacagttgccaccaggagcaagtgtgtgaggtgatcgcctcttatgcccacctctgtcggaccaacggggtctgcgttgactggaggacacctgatttctgtgctatgtcatgcccaccatctctggtctacaaccactgtgagcatggctgtccccggcactgtgatggcaacgtgagctcctgtggggaccatccctccgaaggctgtttctgccctccagataaagtcatgttggaaggcagctgtgtccctgaagaggcctgcactcagtgcattggtgaggatggagtccagcaccagttcctggaagcctgggtcccggaccaccagccctgtcagatctgcacatgcctcagcgggcggaaggtcaactgcacaacgcagccctgccccacggccaaagctcccacgtgtggcctgtgtgaagtagcccgcctccgccagaatgcagaccagtgctgccccgagtatgagtgtgtgtgtgacccagtgagctgtgacctgcccccagtgcctcactgtgaacgtggcctccagcccacactgaccaaccctggcgagtgcagacccaacttcacctgcgcctgcaggaaggaggagtgcaaaagagtgtccccaccctcctgccccccgcaccgtttgcccacccttcggaagacccagtgctgtgatgagtatgagtgtgcctgcaactgtgtcaactccacagtgagctgtccccttgggtacttggcctcaaccgccaccaatgactgtggctgtaccacaaccacctgccttcccgacaaggtgtgtgtccaccgaagcaccatctaccctgtgggccagttctgggaggagggctgcgatgtgtgcacctgcaccgacatggaggatgccgtgatgggcctccgcgtggcccagtgctcccagaagccctgtgaggacagctgtcggtcgggcttcacttacgttctgcatgaaggcgagtgctgtggaaggtgcctgccatctgcctgtgaggtggtgactggctcaccgcggggggactcccagtcttcctggaagagtgtcggctcccagtgggcctccccggagaacccctgcctcatcaatgagtgtgtccgagtgaaggaggaggtctttatacaacaaaggaacgtctcctgcccccagctggaggtccctgtctgcccctcgggctttcagctgagctgtaagacctcagcgtgctgcccaagctgtcgctgtgagcgcatggaggcctgcatgctcaatggcactgtcattgggcccgggaagactgtgatgatcgatgtgtgcacgacctgccgctgcatggtgcaggtgggggtcatctctggattcaagctggagtgcaggaagaccacctgcaacccctgccccctgggttacaaggaagaaaataacacaggtgaatgttgtgggagatgtttgcctacggcttgcaccattcagctaagaggaggacagatcatgacactgaagcgtgatgagacgctccaggatggctgtgatactcacttctgcaaggtcaatgagagaggagagtacttctgggagaagagggtcacaggctgcccaccctttgatgaacacaagtgtctggctgagggaggtaaaattatgaaaattccaggcacctgctgtgacacatgtgaggagcctgagtgcaacgacatcactgccaggctgcagtatgtcaaggtgggaagctgtaagtctgaagtagaggtggatatccactactgccagggcaaatgtgccagcaaagccatgtactccattgacatcaacgatgtgcaggaccagtgctcctgctgctctccgacacggacggagcccatgcaggtggccctgcactgcaccaatggctctgttgtgtaccatgaggttctcaatgccatggagtgcaaatgctcccccaggaagtgcagcaagtgaggctgctgcagctgcatgggtgcctgctgctgcctgccttggcctgatggccaggccagagtgctgccagtcctctgcatgttctgctcttgtgcccttctgagcccacaataaaggctgagctcttatcttgc

SEQ ID NO: 3483 - DNA, 3715 bp, Homo sapiens
tcagtggcgtttgccctgattcccggggcctggctttcagcgtagcaattctgccggcgaagaaggtgagcgcagtgctgtgtggcagcagaggtccttaggacgaggaacagcgggacgaggaagggcagactggtgaaatcgcaaactgggcgtctgttccggcaccggacccctgtttgcaaaggtccatggctaatgaaacacagaaggttggtgccatccattttccttttcccttcacaccctattccatccaggaagacttcatggcagagctgtaccgggttttggaggctggcaagattgggatatttgagagtccaactggcactgggaagtccttaagtcttatttgtggggccctctcctggctccgtgactttgaacagaagaagcgtgaagaagaggcacgactccttgaaactggaactggccccttacatgatgagaaagatgaatccctgtgtctgtcttcctcctgcgaaggggctgcaggcaccccgaggcctgctggagaaccggcctgggttactcagtttgtgcagaagaaagaagagagggacctggtggaccgactgaaggtggagcaggccaggaggaagcagcgagaagaacgcctgcagcagctgcagcacagggtgcagctcaagtatgcagccaagcgcctgaggcaggaagaagaagaaacagagaatctcctccgcctcagcagggagatgctagagacaggcccggaggccgagcggctggagcagctggagtctggggaggaggagctggtcctcgccgaatacgagagtgatgaggagaaaaaggtggcgagcagagtggatgaggatgaggatgacctggaggaagaacacataactaagatttatcactgtagtcggacacactcccagctggcccagtttgtgcatgaggtgaagaagagcccctttggcaaggatgttcggctggtctccctcggctcccggcagaacctttgtgtaaatgaagacgtgagaagcctaggttctgtgcagcttatcaacgaccgctgcgtggacatgcagagaagcaggcacgagaagaagaaaggagctgaggaggagaagccaaagaggaggaggcaggagaagcaggcagcctgccccttctacaaccacgagcagatgggccttctccgggatgaggccctggcagaggtgaaggacatggagcagctgctggcccttgggaaggaggcccgggcctgtccctattacaggagccgccttgccatccctgcagcccagctggtggtgctgccctatcagatgctgctgcatgcggccactcggcaggccgccggcatccggctgcaggaccaggtggtgatcatcgacgaggcgcacaacctgatcgacaccatcacgggcatgcacagcgtggaggtcagcggctcccagctctgccaggcccattcccagctgctgcagtacatggagcgatacgggaagcgtttgaaggccaagaacctgatgtacctgaagcagatcctgtatttgctggagaaattcgtggctgtgctaggggggaacattaagcaaaatcccaatacacagagtctgtcacagacagggacggagctgaagaccatcaacgactttctcttccagagccagatcgacaacatcaacctgttcaaggtgcagcgatactgtgagaagagcatgatcagcagaaagctctttggcttcactgaacggtacggagcagtgttctcatcccgggagcagcccaaactggctgggtttcagcaattcctgcagagcctgcagcccaggacgactgaagctcttgcagcccctgcagacgagagtcaggccagcgtcccgcaaccagcttccccactaatgcacatcgaaggcttcctggcagctctcactacggccaaccaggacggcagggtcatcctgagccgccaaggcagcctcagtgagagcaccctgaagtttttgctcctgaatccagctgtgcactttgcccaagtggtgaaggaatgccgggcagtggtcattgcgggggggaccatgcagccggtgtctgacttccggcagcagctgctggcctgtgctggggtggaagctgagcgcgtggtggagttttcctgtggtcacgtgatccctccagacaacatctgccccttgtcatctgcagcgggatctccaaccagccgctggaattcaccttccagaaaagagacctgcctcagatgatattccaggaacctaagagcgcacaccaggtggagcaggtgctgctggcgtattccaggtgcatccaggcctgtggccaggagagaggccaggtgacagaggccctgctcctctctgtggttggaggaaagatgagtgaagggatcaacttctctgacaacctaggccggtgtgtggtgatggtgggcatgcccttccccaacatcaggtctgcagagctgcaggagaagatggcctacttggatcaaaccctccccagagcccccggccaggcacccccagggaaggctctggtggagaacctgtgcatgaaggccgtcaaccagtccataggcagggccatcaggcaccagaaggattttgccagcatagtgctcctggaccagcgatacgcccggccccctgtcctggccaagctgccggcctggatccgagccagtgtggaggtcaaagctacctttggccccgccattgctgctgtgcagaagtttcaccgggagaagtcggcctcttcctgatgggcaaccacaccaccgcccggcgccgtgcccttcctttgtcctgccctctggagacagtgtttgtcgtgggcgtggtctgcagggatcctgttacaaaggtgaaacccaggaggagagtgtggagtccagagcgctgccgggacccaggcacaggcgttagctcccgtaggagaaaatgcgggaatcctgaatgaacagtgggtcctggctgtccttggggcgttccagggcagctcccctcctggaatagaatctttctttccatcctgcatggctgagagccaggcttcctgcttggagtccgcaggaggctgtggcagcagtggcatccactgtggcatctccgtcctgcccaccttaagaggcgagatggagcaggtccatctgcctctgccctttctagccaaggttatagctgccctggactgctcactctctggtctcaatttaaaatgatcccgtggccacagggctcctgcccaggggcttgtcaccttcccctcctccttcctgagtcactccttcagtagaaggccctgctctctatcctgccccacagccctgcctggatttgtatccttggcttcgtgccagttcctccaagtctatggcacctccctccctctcaaccacttgagcaaactccaagacaccttctaccccgacaccagcaattatgccaagggccattaggctctcaacatgactatagagaccccgtatcatcatggagacctttgttcctgtgggaaaataaccctcccacctgcaacagctgcccctgctgactgcgcctgtcttctccctctgaccccagagaaaggggccgtggtcagctgggatcttctgccaccatcagggacaaaccgggggcaggaggaaagtcactgatgcccagctgtttgcatcctgcacagctacaggtccttaattaaaagtgtactgttggtt

SEQ ID NO: 3484 - protein, 683 aa, Homo sapiens
MANETQKVGAIHFPFPFTPYSIQEDFMAELYRVLEAGKIGIFESPTGTGKSLSLICGALSWLRDFEQKKREEEARLLETGTGPLHDEKDESLCLSSSCEGAAGTPRPAGEPAWVTQFVQKKEERDLVDRLKVEQARRKQREERLQQLQHRVQLKYAAKRLRQEEEETENLLRLSREMLETGPEAERLEQLESGEEELVLAEYESDEEKKVASRVDEDEDDLEEEHITKIYHCSRTHSQLAQFVHEVKKSPFGKDVRLVSLGSRQNLCVNEDVRSLGSVQLINDRCVDMQRSRHEKKKGAEEEKPKRRRQEKQAACPFYNHEQMGLLRDEALAEVKDMEQLLALGKEARACPYYRSRLAIPAAQLVVLPYQMLLHAATRQAAGIRLQDQVVIIDEAHNLIDTITGMHSVEVSGSQLCQAHSQLLQYMERYGKRLKAKNLMYLKQILYLLEKFVAVLGGNIKQNPNTQSLSQTGTELKTINDFLFQSQIDNINLFKVQRYCEKSMISRKLFGFTERYGAVFSSREQPKLAGFQQFLQSLQPRTTEALAAPADESQASVPQPASPLMHIEGFLAALTTANQDGRVILSRQGSLSESTLKFLLLNPAVHFAQVVKECRAVVIAGGTMQPVSDFRQQLLACAGVEAERVVEFSCGHVIPPDNICPLSSAAGSPTSRWNSPSRKETCLR

SEQ ID NO: 3485 - DNA, 4576 bp, Homo sapiens
tacaatacagtctgttctcctccagctccttctttctgcaacatggggaagaacaaactccttcatccaagtctggttcttctcctcttggtcctcctgcccacagacgcctcagtctctggaaaaccgcagtatatggttctggtcccctccctgctccacactgagaccactgagaagggctgtgtccttctgagctacctgaatgagacagtgactgtaagtgcttccttggagtctgtcaggggaaacaggagcctcttcactgacctggaggcggagaatgacgtactccactgtgtcgccttcgctgtcccaaagtcttcatccaatgaggaggtaatgttcctcactgtccaagtgaaaggaccaacccaagaatttaagaagcggaccacagtgatggttaagaacgaggacagtctggtctttgtccagacagacaaatcaatctacaaaccagggcagacagtgaaatttcgtgttgtctccatggatgaaaactttcaccccctgaatgagttgattccactagtatacattcaggatcccaaaggaaatcgcatcgcacaatggcagagtttccagttagagggtggcctcaagcaattttcttttcccctctcatcagagcccttccagggctcctacaaggtggtggtacagaagaaatcaggtggaaggacagagcaccctttcaccgtggaggaatttgttcttcccaagtttgaagtacaagtaacagtgccaaagataatcaccatcttggaagaagagatgaatgtatcagtgtgtggcctatacacatatgggaagcctgtccctggacatgtgactgtgagcatttgcagaaagtatagtgacgcttccgactgccacggtgaagattcacaggctttctgtgagaaattcagtggacagctaaacagccatggctgcttctatcagcaagtaaaaaccaaggtcttccagctgaagaggaaggagtatgaaatgaaacttcacactgaggcccagatccaagaagaaggaacagtggtggaattgactggaaggcagtccagtgaaatcacaagaaccataaccaaactctcatttgtgaaagtggactcacactttcgacagggaattcccttctttgggcaggtgcgcctagtagatgggaaaggcgtccctataccaaataaagtcatattcatcagaggaaatgaagcaaactattactccaatgctaccacggatgagcatggccttgtacagttctctatcaacaccaccaatgttatgggtacctctcttactgttagggtcaattacaaggatcgtagtccctgttacggctaccagtgggtgtcagaagaacacgaagaggcacatcacactgcttatcttgtgttctccccaagcaagagctttgtccaccttgagcccatgtctcatgaactaccctgtggccatactcagacagtccaggcacattatattctgaatggaggcaccctgctggggctgaagaagctctccttctattatctgataatggcaaagggaggcattgtccgaactgggactcatggactgcttgtgaagcaggaagacatgaagggccatttttccatctcaatccctgtgaagtcagacattgctcctgtcgctcggttgctcatctatgctgttttacctaccggggacgtgattggggattctgcaaaatatgatgttgaaaattgtctggccaacaaggtggatttgagcttcagcccatcacaaagtctcccagcctcacacgcccacctgcgagtcacagcggctcctcagtccgtctgcgccctccgtgctgtggaccaaagcgtgctgctcatgaagcctgatgctgagctctcggcgtcctcggtttacaacctgctaccagaaaaggacctcactggcttccctgggcctttgaatgaccaggacaatgaagactgcatcaatcgtcataatgtctatattaatggaatcacatatactccagtatcaagtacaaatgaaaaggatatgtacagcttcctagaggacatgggcttaaaggcattcaccaactcaaagattcgtaaacccaaaatgtgtccacagcttcaacagtatgaaatgcatggacctgaaggtctacgtgtaggtttttatgagtcagatgtaatgggaagaggccatgcacgcctggtgcatgttgaagagcctcacacggagaccgtacgaaagtacttccctgagacatggatctgggatttggtggtggtaaactcagcaggtgtggctgaggtaggagtaacagtccctgacaccatcaccgagtggaaggcaggggccttctgcctgtctgaagatgctggacttggtatctcttccactgcctctctccgagccttccagcccttctttgtggagctcacaatgccttactctgtgattcgtggagaggccttcacactcaaggccacggtcctaaactaccttcccaaatgcatccgggtcagtgtgcagctggaagcctctcccgccttcctagctgtcccagtggagaaggaacaagcgcctcactgcatctgtgcaaacgggcggcaaactgtgtcctgggcagtaaccccaaagtcattaggaaatgtgaatttcactgtgagcgcagaggcactagagtctcaagagctgtgtgggactgaggtgccttcagttcctgaacacggaaggaaagacacagtcatcaagcctctgttggttgaacctgaaggactagagaaggaaacaacattcaactccctactttgtccatcaggtggtgaggtttctgaagaattatccctgaaactgccaccaaatgtggtagaagaatctgcccgagcttctgtctcagttttgggagacatattaggctctgccatgcaaaacacacaaaatcttctccagatgccctatggctgtggagagcagaatatggtcctctttgctcctaacatctatgtactggattatctaaatgaaacacagcagcttactccagagatcaagtccaaggccattggctatctcaacactggttaccagagacagttgaactacaaacactatgatggctcctacagcacctttggggagcgatatggcaggaaccagggcaacacctggctcacagcctttgttctgaagacttttgcccaagctcgagcctacatcttcatcgatgaagcacacattacccaagccctcatatggctctcccagaggcagaaggacaatggctgtttcaggagctctgggtcactgctcaacaatgccataaagggaggagtagaagatgaagtgaccctctccgcctatatcaccatcgcccttctggagattcctctcacagtcactcaccctgttgtccgcaatgccctgttttgcctggagtcagcctggaagacagcacaagaaggggaccatggcagccatgtatataccaaagcactgctggcctatgcttttgccctggcaggtaaccaggacaagaggaaggaagtactcaagtcacttaatgaggaagctgtgaagaaagacaactctgtccattgggagcgccctcagaaacccaaggcaccagtggggcatttttacgaaccccaggctccctctgctgaggtggagatgacatcctatgtgctcctcgcttatctcacggcccagccagccccaacctcggaggacctgacctctgcaaccaacatcgtgaagtggatcacgaagcagcagaatgcccagggcggtttctcctccacccaggacacagtggtggctctccatgctctgtccaaatatggagcagccacatttaccaggactgggaaggctgcacaggtgactatccagtcttcagggacattttccagcaaattccaagtggacaacaacaaccgcctgttactgcagcaggtctcattgccagagctgcctggggaatacagcatgaaagtgacaggagaaggatgtgtctacctccagacatccttgaaatacaatattctcccagaaaaggaagagttcccctttgctttaggagtgcagactctgcctcaaacttgtgatgaacccaaagcccacaccagcttccaaatctccctaagtgtcagttacacagggagccgctctgcctccaacatggcgatcgttgatgtgaagatggtctctggcttcattcccctgaagccaacagtgaaaatgcttgaaagatctaaccatgtgagccggacagaagtcagcagcaaccatgtcttgatttaccttgataaggtgtcaaatcagacactgagcttgttcttcacggttctgcaagatgtcccagtaagagatctgaaaccagccatagtgaaagtctatgattactacgagacggatgagtttgcaattgctgagtacaatgctccttgcagcaaagatcttggaaatgcttgaagaccacaaggctgaaaagtgctttgctggagtcctgttctcagagctccacagaagacacgtgtttttgtatctttaaagacttgatgaataaacactttttctggtc

SEQ ID NO: 3486 - DNA, 2187 bp, Homo sapiens
catcagcccagcctgcaaggaggcgccaccggacctgcacactcaggagcagactcagctagattggaagagaggatgggaagacaatggatgacctacctgtggagagaaactacccattccagaacctcctctctgctgaaagctgaacactcaatgggaagacctgtttgcagagaggagccagccactccagggtctccgttctgctagaagctgaacactcgttgggacacccttgctgtggaaaggacatccttactgtggaaatgagctactaactgcaggagctgaggagctgcacagcaaggttaaaagagctgtaacacaaacagggctgcaacatgccccttgctccccacagggagagaagagctctggccctcggagaagcccagacctgggagctccttgagcccgggctgtgactccctctttggggccctggttggcgtcactgcattcgccagtgccactgttggaagctgcttgtgatgcgcctggtccagggggaagctgtttgttgtgtgcctggtccagccacctcatggagagcctgtgctggcacctggagctgcccaacctgggcagcagcttgtgtgtgtgactgcacagtggccacgcttgctcacacacccctagcacacccctctgctccacccgtctcaatctcccttggatccgggatccaggttggtagcaagtgcgagtgggcagaagcagcccagtgggcccagagcaaaactcaggcaaaggtgccactagactggccaggaaagcgacaccctaaagatcccataatgctgatatgttaattctattctataagcaccacacagaagtgatagcttttatttcttattttgtctagcctggagacagagctaaggattccttgaactgcaaagtcttttccagttcttagtttatacaatccatactcaccttctgcctaactaagcattgtcatttttgtgccaaatgaagagtaggactcctacgattgtcctcagactctcttggctcaatcctcctgctttaacctttcctacttcaaaaactcctgaagttttgcttccccttctatagaatggaaatatatgtcgcaatacttactgcaaagaaaattatatattttaaaaatagactaaagagatgttgtgagacatcagacatcaatcagatgttgtgagaactgatttctgcatcagaatatctccttgactttacagctatcctttaatcctggctcaaagttccagaagaaagatgatccaatataatactcctatttggactttgagtcatacacattccttcttctgagaaaacgtgcttctgcatgaatcctcccttcattattttcagctcatctattattgaatctgaaaccccaggttaactgactgatcactctcatcagtggcagattttggtgtaacataggacacatcactcccaattcaggtcaagtcccaattatcttgcctctcaatatgacatgttcaatgttgtatttcattctacttcattttaatgtaaaaagtcttttctggtgaagtcagtcttttattttctcataaaaattcaccctttgggtttttcatagggtattcccataaccaaacacactttacactttcctagtacataacccaatactttcttctttccccacagtccttacatgaagcctactcagaccgacatcactgtatcatttttttgtattctgaagtccttcagcacttgattcctttaagtttaatcttggtattctattgggaatcatatggaaatgtacaatgatatttattgaatgaacaggaaacagggaaagacattgaccagaaaaagtgtttattcatcaagtctttaaagatacaaaaacacgtgtcttctgtggagctctgagaacaggactccagcaaagcacttttcagccttgtggtcttcaagcatttccaagatctgtgacattggaaagaaaaaaaattaagacagatttgggtctccatgagcagagagtattctttcccttagttctgggtagcatagtgcccaaggaaacctaatcagtacagtgggaaaccaaatctattccaaatcattacccataagcaatcctatggactctctgaggtttgacagagtcagcggccctctccaataaatgtgtttttctat

SEQ ID NO: 3487 - protein, 106 aa, Homo sapiens
MRLVQGEAVCCVPGPATSWRACAGTWSCPTWAAACVCDCTVATLAHTPLAHPSAPPVSISLGSGIQVGSKCEWAEAAQWAQSKTQAKVPLDWPGKRHPKDPIMLIC

SEQ ID NO: 3488 - DNA, 2117 bp, Homo sapiens
actcgaaccctacccgggagcggtcaggcgcgtgaccccgcgtgaccggggtgcgcgagccgagaggccctggaagcgggactctgggaccccattgaaagaaaggcaaccagaaaaggcgaaacgacaacctcgatagtgattggagctgatggaacgagggcggagctaaagtcccagaatactggccaatcagagtttaagattatcagggagcccgggaaggggaaaggggcgaaatggttctatggtcacatgccgcggggtctggtgggaggagcggttgcccagcggcctcttggcgcttcctgtttccggttcccagagtggggcacagcgaggcgctagggggaacgctggcctctgaaactagctctgggaccggggtctgcggccggcccctagctggccccgtctcccatccccagaagggtattcactggggattctgagctttggctactccagtttcccacgacacgtgagtgtgaggggcgtggaggaggaggcgggctgggttgcgctcacacttaagcgtctgtgacaggagccggaatcgcattctcccttgaccatggttctagccaaagatctggctgaggagccctaagggtagaatggaggcggaggcatgagagcggagagtcacggagttccgaaaggtgtgagggagaaaggacttccaagaccagagaggggatttacgatatttagaaagcagggaaaggaaaataccccaagtatggagtccgttggaggtgttggtggatttatttgtaggaggaattttggcctgcatcacggtgggaggtcaagtggcatcatttggagagggtatggctacaagcgcttggaaagtcgggacactagacagagcgagaatttctggcaccctgggagagctttgagggggatgcgactgtggtgtggataagaatggctgatggacggattatcttgtgttcctcgttgtggggagcttccgctcttgggacatagccgctacttgtctgaggctccttctctcttgagttctttcagcattaggccttttagccaattgaggctgcttttctaaacatgtaggctgctggagaaaaagggataaggactgctacatcagaaaggagccagcgggaagacagtagaaattccactggtaaatggccatggctgtcttaacagatggggaagtgagtgctacagaggcccagtggtgtaagctgcttcccagttgctggcttagtcattggccaccctaataaaggataatttttagcattgccaaataaaatagatctgtcgttagagaataagaaaactgaaagatttttcaagatcataaaatcctgctccttatttccaaagtatatagacaaactcttgtaccttgagaatctaattgtagcatattaaaagggggctactgggcccttccatttcattctcttcctgattgttgcacccctatgtttataagttttccagcagttatctttatgccacgaatcgtctaaattgccccagtaacttcacacacatttaatatctgtgtaatgtacagcaagtaatttaacaagtaattctgtaaagcatcagttttctcatctgtgaagtatgaaaaattatacctattttctgggttgtgaagatgaatgaacataatctagggaaaacatttagcgcatatgccactgaattaaagagaagcagcttaaatttaaagacaagccttaagcaggaaagaagaatacagtataaatttattatcctaactttttgaataataagcaaatgaaagatagttcaactcagctaatggctgaggtgtttaacctttcatcccttcctaattttgtgagattccttgttctaatttaggaaaagaaatcaactgtcagtttttaattaggtcctgagagactggaaaggaaaatggcaggctaagtcagtctagaagaaggagtctcctatttctttttagtgagtcagctggtcaagttgtgtgttgagcagtgggttaacttagggaaggtgggagttggaggtctgagttctttatttcacctcctattcagtcaactgtgtgaggaatcacttccccttcacttcttagt

SEQ ID NO: 3489 - DNA, 2454 bp, Homo sapiens
ttccggttcccagagtggggcacagcgaggcgctagggggaacgctggcctctgaaactagctctgggaccggggtctgcggccggcccctagctggccccgtctcccatccccagaagggtattcactggggattctgagctttggctactccagtttcccacgacacgatgttccctttctacagctgctggaggactggactgctactactactcctggctgtggcagtgagagaatcctggcagacagaagaaaaaacttgcgacttggtaggagaaaagggtaaagagtcagagaaagagttggctctagtgaagaggctgaaaccactgtttaataaaagctttgagagcactgtgggccagggttcagacacatacatctacatcttcagggtgtgccgggaagctggcaaccacacttctggggcaggcctggtgcaaatcaacaaaagtaatgggaaggagacagtggtagggagactcaacgagactcacatcttcaacggaagtaattggatcatgctgatctataaagggggtgatgaatatgacaaccactgtggcaaggagcagcgtcgtgcagtggtgatgatctcctgcaatcgacacaccctagcggacaattttaaccctgtgtctgaggagcgtggcaaagtccaagattgtttctacctctttgagatggatagcagcctggcctgttcaccagagatctcccacctcagtgtgggttccatcttacttgtcacgtttgcatcactggttgctgtttatgttgttggggggttcctataccagcgactggtagtgggagccaaaggaatggagcagtttccccacttagccttctggcaggatcttggcaacctggtagcagatggctgtgactttgtctgccgttctaaacctcgaaatgtgcctgcagcatatcgtggtgtgggggatgaccagctgggggaggagtcagaagaaagggatgaccatttattaccaatgtagattgcactttatatgtccagcctcttcctcagtcccccaaaccaaagctacacagccagatttctcaagcagtctcaactccagtccctcatctcacccttactattgctcttgctttccagtttgcttttgatttgcatcttctcactagtaaaactgccttccctttgttccttattttctgttttttctctagagaggtacagttgtaagtcagagttaatataatagggcctgtgaaaacagaggcttttgcattgtctcttgacatcagaagttacaataggcatatgggcaaaatggtgtagcaggctcactggccgtttgttttttaaacacattttcacaagtttttgagacactggatttctttaattaaaaaaaaaatgccaagaaacattatttatacagggttgattgctttcatgttgttattctgtaccctatagtagcctccatgagaatctggtatttcttgctgcttggaactactttgcagtgattacttggttgcagtccaagtactctcgtttagtctgagcctggagatgttctagacttgcttctcccacctctgagattaggacaggaaaaatgtgaaatttcccaattacaggattatacggtaccatcacatcatttgtggaaattggggtgactgtatagctgggattgggctaaggactgtggtcttatctgtccacatacagccaaaatgcctatccagaaatccagttcgttggaaaggaaaattggtactcctgtgccacaggggttccagaaaagggaagtcactttaccttgcggtggtgggatcctgatgtctttcatccatttgtagtaaaagctggtaaagcttttcttactcctggttccctaccagtatttctaaacatgtcgcactttctccacaggcatgtggttttgacctttttttcaatcttctagaaagggaacggaagcagaagtgggacatcgagggctctgctgtcctctgcgctgggtgtggaatgctgctgcacctgtcccttctgctggctcagggaagtgtcttcttgcccacatttctgtggggaaaggtttttaatcctctgatgcttccatcttcctgtttaggccatgtgcccagaaacctggactgatctttctttaatagtgaacccctgggccactgaagagtaacatggctccactggacacaaaagagggatggaatcaacaggcagggggccttttataagccttaggaaaagaaaatgaaactatttcatctttggacttttcaatactattggagtgatttttttctttctaaacagggaaaataatgttacaaaagcatcttttttgttatttgtttgcatccctcccccacaccctggtgttttaaaatgaagaaaaaaaaccatcaccttttgtacaaaaactcttaatgattaaaaaacaaaca

SEQ ID NO: 3490 - protein, 277 aa, Homo sapiens
MFPFYSCWRTGLLLLLLAVAVRESWQTEEKTCDLVGEKGKESEKELALVKRLKPLFNKSFESTVGQGSDTYIYIFRVCREAGNHTSGAGLVQINKSNGKETVVGRLNETHIFNGSNWIMLIYKGGDEYDNHCGKEQRRAVVMISCNRHTLADNFNPVSEERGKVQDCFYLFEMDSSLACSPEISHLSVGSILLVTFASLVAVYVVGGFLYQRLVVGAKGMEQFPHLAFWQDLGNLVADGCDFVCRSKPRNVPAAYRGVGDDQLGEESEERDDHLLPM

SEQ ID NO: 3491 - DNA, 2201 bp, Homo sapiens
ctgagctgtccctgcaggactccagtggaagtgaaagaactgggcaccggggaaaagctaggatgtcccacactcctacaccatgcagggaactcgggcacaggccggctgggccgggatcagatgggaagcagaagctcatcatgaccagaaactgtttccctacggagagcacttggagatggcaatgctgaacctcacactgtaggactcacacacgactctaacgggattgtaagaatcaagtcactctcatgggaagaatttttatatgggaaagcggctaaaactttcattggactggaatgtttggagattgttaaattccaaatcaggaaccacaaactgccctctaataagatatcagctgtctaagcgtgtgggtgccgcctttctgccagtagttctggttcttaagaaaagcaccataaatcagacatgaaaattctggctccaaaaatagcattttctttgtgcaaataaaaacgtgtgtatcaagtatgacgttcccccaacgtggacacacttggttcctcagaaagccaagcccgctgcagctgccacatcccagggcttatggtgcagcaggtgcttttttcaagacaggaatcaaagtgttaggaacacggcagacaggtgacacctggataccaaatgcaggatgaggagtactgcagaggtcacagggaagtcacagaacagtaatacgctagcaggggcatggggcgtgaagaacagaagaagacagtttgagaaaagcatctgcaaaatgctaaagagcagagcttacctcattgcctgtccccatctcatcccaggtcaccacctggctgaccccaggtccccgacccaacaacaacccctcccaagtccctaactccctcacttggacttgagacccttcacaacccagcagcgctccgcctccaacgtgacatcatgctttctggaaacttccccgtatgtcccactttcccacacttggtgccctggagcaccttccggcctctacatgctgtacgttcccctgtgagcaccctcctctcggcctctggccaacacagtcccacccatctgtgggtaacaaacgggtgtgtgtgttcttttcagccttgctaaactgtctgaatcaaggatcacaaactacagcctgcaggccaaagccagcccacagcctgtgtttgtaaataaagctttattggaacaaagccacaccccttaatctacagatgatctgtggctactttcacaccacaacagagtaccatggttctgacagagactgggggaccctgtctaaatgacttctgacctggacctttactgaaaatcctcccaatcattctgttgacaagaatggtgtattactttttgcaataagaaacaagtaacctttgcagaattccacccatctttcaaggctgatcccagaagttccctctgcccacgcacctacctgatcctgatcacttcctaaactgcagcccggcccacccggctccagcatcatttgtggagtctcagctccataaatccagagggcaggtgggggtgtgtcctaattttcccgagcctactgtaccgaaacaggacagcagagtaggaagcctctgtgacttctgctccctccctagcttttccaccagaccctgcatggtcccaccctggctgtgtgaagcagggatcagggagcgtggctcgatgtcagtctccagaaccctgtccaccctggcgtggtggcagacatggctacctgcagctgagctgccagttcctctgagtcctcaaagaccaggccattttctttatgtttcaccagctcatgtaaactgcagagagaaccaagggagcctgagagctgcctggggaagacaccagacccctggggtgcccagctgggctcccacccaccccacgctcaagccaggctgggggttggaacagggggtgtggtttctgggagctggttcttagatttggcatctgaagggtataaaggcctggggggggtgcacatcaaaatgaccaaatcgatttgaggagagagccttaaggaaggtttgtaccttctgtgctggatgctcttcaaggactgaagaattatttttgcatgtttttcttaattccatggccatggaacaagtaaaggcaaccccctggggactggttcagcacataaaagatgacttttctaggacacc

SEQ ID NO: 3492 - protein, 106 aa, Homo sapiens
MVPPWLCEAGIRERGSMSVSRTLSTLAWWQTWLPAAELPVPLSPQRPGHFLYVSPAHVNCRENQGSLRAAWGRHQTPGVPSWAPTHPTLKPGWGLEQGVWFLGAGS

SEQ ID NO: 3493 - DNA, 3914 bp, Homo sapiens
gtggggtggggtggggctgggggcttgtcgccctttcaggctccaccctttgcggagattataaatagtcatgatcccagcgagacccagagatgctgtaatggtaagactttggatccttcctgaggacgtggagaaaacttgctgctgagaaggacattttgaaggttttgttggctgaaaaagctgtttctggaatcacccctagatctttcttgaagacttgaattagattacagcgatggggacacagaaggtcaccccagctctgatatttgccatcacagttgctacaatcggctctttccaatttggctacaacactggggtcatcaatgctcctgagaagatcataaaggaatttatcaataaaactttgacggacaagggaaatgccccaccctctgaggtgctgctcacgtctctctggtccttgtctgtggccatattttccgtcgggggtatgatcggctccttttccgtcggactcttcgtcaaccgctttggcaggcgcaattcaatgctgattgtcaacctgttggctgtcactggtggctgctttatgggactgtgtaaagtagctaagtcggttgaaatgctgatcctgggtcgcttggttattggcctcttctgcggactctgcacaggttttgtgcccatgtacattggagagatctcgcctactgccctgcggggtgcctttggcactctcaaccagctgggcatcgttgttggaattctggtggcccagatctttggtctggaattcatccttgggtctgaagagctatggccgctgctactgggttttaccatccttcctgctatcctacaaagtgcagcccttccattttgccctgaaagtcccagatttttgctcattaacagaaaagaagaggagaatgctaagcagatcctccagcggttgtggggcacccaggatgtatcccaagacatccaggagatgaaagatgagagtgcaaggatgtcacaagaaaagcaagtcaccgtgctagagctctttagagtgtccagctaccgacagcccatcatcatttccattgtgctccagctctctcagcagctctctgggatcaatgctgtgttctattactcaacaggaatcttcaaggatgcaggtgttcaagagcccatctatgccaccatcggcgcgggtgtggttaatactatcttcactgtagtttctctatttctggtggaaagggcaggaagaaggactctgcatatgataggccttggagggatggctttttgttccacgctcatgactgtttctttgttattaaaggataactataatgggatgagctttgtctgtattggggctatcttggtctttgtagccttctttgaaattggaccaggccccattccctggtttattgtggccgaactcttcagccagggcccccgcccagctgcgatggcagtggccggctgctccaactggacctccaacttcctagtcggattgctcttcccctccgctgctcactatttaggagcctacgtttttattatcttcaccggcttcctcattaccttcttggcttttaccttcttcaaagtccctgagacccgtggcaggacttttgaggatatcacacgggcctttgaagggcaggcacacggtgcagatagatctggaaaggacggcgtcatggagatgaacagcatcgagcctgctaaggagaccaccaccaatgtctaagtcgtgcctccttccacctccctcccggcatgggaaagccacctctccctcaacaagggagagacctcatcaggatgaacccaggacgcttctgaatgctgctacttaattcctttctcatcccacgcactccatgagcaccccaaggctgcggtttgttggatcttcaatggctttttaaattttatttcctggacatcctcttctgcttaggagagaccgagtgaacctaccttcatttcaggagggattggccgcttggcacatgacaactttgccagcttttcctcccttgggttctgatattgccgcactaggggatataggagaggaaaagtaaggtgcagttcccccaacctcagacttaccaggaagcagatacatatgagtgtggaagccggagggtgtttatgtaagagcaccttcctcacttccatacagctctacgtggcaaattaacttgagttttatttattttatcctctggtttaattacataattttttttttttaactttaagtttcaggatacatgtgccgaatgtgcaggtttgttacataggtatatatatgccatgatggaaatatttatttttttaagcgtaattttgccaaataataaaaacagaaggaaattgagattagagggaggtgtttaaagagaggttatagagtagaagatttgatgctggagaggttaaggtgcaataagaatttagggagaaatgttgttcattattggagggtaaatgatgtggtgcctgaggtctgtacgttacctcttaacaatttctgtccttcagatggaaactctttaacttctcgtaaaagtcatatacctatataataaagctactgatttcctttggagcttttttctttaagataatagtttacatgtagtagtacttgaaatctaggattattaactaatatgggcattgtagttaatgatggttgatgggttctaattttggatggagtccagggaagagaaagtgatttctagaaagcctgttcccctcactggatgaaataactccttcttgtagtagtctcattacttttgaagtaatcccgccacctatctcgtgggagagccatccaaataagaaacctaaaataattggttcttggtagagattcattatttttccactttgttctttaggagattttaggtgttgattttctgttgtattttaactcatacctttaaaggaattccccaaagaatgtttatagcaaacttggaatttgtaacctcagctctgggagaggatttttttctgagcgattattatctaaagtgtgttgttgctttaggctcacggcacgcttgcgtatgtctgttaccatgtcactgtggtcctatgccgaatgccctcaggggacttgaatctttccaataaaccaggtttagacagtatgagtcaatgtgcagtgtagcccacacttgagaggatgaatgtatgtgcactgtcactttgctctgggtggaagtacgttattgttgacttattttctctgtgtttgttcctacagcccctttttcatatgttgctcagtctccctttcccttcttggtgcttacacatctcagaccctttagccaaacccttgtcagtgacagtattttggttcttagttctcactgttccctctgctcctggagcctttgaataaaaatgcacgtagctgaggccggatgcggtggctcacgcctgtaatcccagcactttgggaggcctaggcgggcggtcaggggttcgagaccagtctggccaacatcgtgaaaccctgtctctactaaaaatgcaaaaattagccgggcgtggtggcgggcgcctgtaatcccagctacttgggaagctgaggcgggagaatcatgtgaacccgggacgcaggggttgcagtgagcggagatcgcatcattgcactctagcctgggccacagggcgagactccgtctcaaaaaaaaaaaaatgcacatagctatcaagtgtgctttagcttgaaaaggtgaccttgcaacttcatgtcaacttctggctcctcaaacagtaggttggcagtaaggcagggtcccatttctcactgagaagattgtgaatatttccatatggattttctattgttactctggttctttgttttaaaataaaaattctgaatgtacacg

SEQ ID NO: 3494 - DNA, 1568 bp, Homo sapiens
ggccaaggcaagatgggtcaaagtcagagtggtggtcatggtcctggaggtggcaagaaggatgacaagctctaacaactcaaggacaagaaaaagaaatatgaacctcctgtaccaactacagtggggaaaaagaagaagaaaacaaagggaccagatgctgccagcaaactgccactggtgacacctcacactcagtgccagttaaaattactgaagttagagagaattaaagactatcttctcatggaggaagaattcattagaaatcaggaacaaatgaaaccattagaagaaaagcaagaagggaaaagatcaaaagtggatgatctgagggggaccccaatgtcagtaggaatcttggaagagatcattgatgacaatcatgccatcgtgtctacatctgtgggctcagaacactacatcagcattctttcatttgcagacaaggatcttctggaacctggctgctcggtcaggctcaaccacaaggtgcataccatgataggggtgctgatggatgacatggatcccctggtcacagtgatgaaggtggaaaaggccccccaagagacctatgcagatactggggggttggacaaccaaattcgggaaattaaggaatctgtggagcttcctctcacccatcctgaatattatgaagagatgggtataaagcctccaagggggtcattctctgtggtccacctggcacaggtaaaaccttgttagccaaagcagtagcaaaccaaacctcagccactttcttgagagtggttggctctgaacttattcagaagtacctaggtgatgggcccaaactcggacgggaattgtttcgagttgctgaagaacgtgcaccgtccattgtgtttattgatgaaattgacgccattgggacaaaaagatatgactccaattctggtggtgagagagaaattcagcgaacaacgttggaactgctgaaccagttggatggatttgattctagggtagatgtgaaagctatcatggccacaaaccaaatagaaactttggatccagcgcttatcagaccaggccgcattggcaggaagattgagttccccctgcctgatgaaaagacgaagaagcccatctttcagattcacacaagcaggatgacgctggctgatgatgtaaccctgcacgacttgatcatggctaaagatgacctctctggtgctgacatcaaggcagtctgtacagaagctggtctgatggccttaagagaacgtagaatgaaagtaacaaatgaagacttcaaaaaatctaaagaaaatgttctttataagaaacaggaagacacccctgaggggctgtatctctagtgaactacggctgccatcaggaaaatggttgggtgatttctcagtccctgaaagggatgaggctgggggagttgcccagaggaatctctgttcccattgatttttattagcaaaacatcctgtgtcttttggagtacgatgtgtaagtgcccactgggtggcctgtctgttggtcactgtgcagcagtctgcttcccaataaagcgcgctctttcacaa

SEQ ID NO: 3495 - DNA, 635 bp, Homo sapiens
gcaaactgccactggtgacacctcacactcagtgccagttaaaattactgaagttagagagaattaaagactatcttctcatggaggaagaattcattagaaatcaggaacaaatgaaaccattagaagaaaagcaagaagggaaaagatcaaaagtggatgatctgagggggaccccaatgtcagtaggaatcttggaagagatcattgatgacaatcatgccatcgtgtctacatctgtgggctcagaacactacatcagcattctttcatttgcagacaaggatcttctggaacctggctgctcggtcaggctcaaccacaaggtgcataccatgataggggtgctgatggatgacatggatcccctggtcacagtgatgaagattcgggaaattaaggaatctgtggagcttcctctcacccatcctgaatattatgaagagatgggtataaagcctccaagggggtcattctctgtggtccacctggcacaggtaaaaccttgttagccaaagcagtagcaaaccaaacctcagccactttcttgagagtggttggctctgaacttattcagaagtacctaggtgatgggcccaaactcggacgggaattgtttcgagttgctgaagaac

SEQ ID NO: 3496 - DNA, 1342 bp, Homo sapiens
caagaatatgagatagaaggggaggggtaggaggagagggaggagggtaggaagacagtttgcattcttgcaacattaaaccaaagggacttggagtgcagatggcatccttcggttcttccagacaagctgcaagacgctgaccatggccaagatggagctctcgaaggccttctctggccagcggacactcctatctgccatcctcagcatgctatcactcagcttctccacaacatccctgctcagcaactactggtttgtgggcacacagaaggtgcccaagcccctgtgcgagaaaggtctggcagccaagtgctttgacatgccagtgtccctggatggagataccaacacatccacccaggaggtggtacaatacaactgggagactggggatgaccggttctccttccggagcttccggagtggcatgtggctatcctgtgaggaaactgtggaagaaccaggggagaggtgccgaagtttcattgaacttacaccaccagccaagagaggtgagaaaggactactggaatttgccacgttgcaaggcccatgtcaccccactctccgatttggagggaagcggttgatggagaaggcttccctcccctcccctcccttggggctttgtggcaaaaatcctatggttatccctgggaacgcagatcacctacatcggacttcaattcatcagcttcctcctgctactaacagacttgctactcactgggaaccctgcctgtgggctcaaactgagcgcctttgctgctgtttcctctgtcctgtcaggtctcctggggatggtggcccacatgatgtattcacaagtcttccaagcgactgtcaacttgggtccagaagactggagaccacatgtttggaattatggctgggccttctacatggcctggctctccttcacctgctgcatggcgtcggctgtcaccaccttcaacacgtacaccaggatggtgctggagttcaagtgcaagcatagtaagagcttcaaggaaaacccgaactgcctaccacatcaccatcagtgtttccctcggcggctgtcaagtgcagcccccaccgtgggtcctttgaccagctaccaccagtatcataatcagcccatccactctgtctctgagggagtcgacttctactccgagctgcggaacaagggatttcaaagaggggccagccaggagctgaaagaagcagttaggtcatctgtagaggaagagcagtgttaggagttaagcgggtttggggagtaggcttgagccctaccttacacgtctgctgattatcaacatgtgcttaagccaaaaaaaaaaaaaaaaaa

SEQ ID NO: 3497 - protein, 282 aa, Homo sapiens
MELSKAFSGQRTLLSAILSMLSLSFSTTSLLSNYWFVGTQKVPKPLCEKGLAAKCFDMPVSLDGDTNTSTQEVVQYNWETGDDRFSFRSFRSGMWLSCEETVEEPGERCRSFIELTPPAKRGEKGLLEFATLQGPCHPTLRFGGKRLMEKASLPSPPLGLCGKNPMVIPGNADHLHRTSIHQLPPATNRLATHWEPCLWAQTERLCCCFLCPVRSPGDGGPHDVFTSLPSDCQLGSRRLETTCLELWLGLLHGLALLHLLHGVGCHHLQHVHQDGAGVQVQA

SEQ ID NO: 3498 - DNA, 2456 bp, Homo sapiens
ataacagcatgaagtgccgtggaactggaataggcgtgtcctctccctcgaccctccccctccttgtccctctgctcacccctcgctcgttccctccctccggcgagggccgcctttataacaactgctcagagtgcgagggcgggatagctgtccaaggtctcccccagcactgaggagctcgcctgctgccctcttgcgcgcgggaagcagcaccaagttcacggccaacgccttggcactagggtccagaatggctacaacagtccctgatggttgccgcaatggcctgaaatccaagtactacagactttgtgataaggctgaagcttggggcatcgtcctagaaacggtggccacagccggggttgtgacctcggtggccttcatgctcactctcccgatcctcgtctgcaaggtgcaggactccaacaggcgaaaaatgctgcctactcagtttctcttcctcctgggtgtgttgggcatctttggcctcaccttcgccttcatcatcggactggacgggagcacagggcccacacgcttcttcctctttgggatcctcttttccatctgcttctcctgcctgctggctcatgctgtcagtctgaccaagctcgtccgggggaggaagcccctttccctgttggtgattctgggtctggccgtgggcttcagcctagtccaggatgttatcgctattgaatatattgtcctgaccatgaataggaccaacgtcaatgtcttttctgagctttccgctcctcgtcgcaatgaagactttgtcctcctgctcacctacgtcctcttcttgatggcgctgaccttcctcatgtcctccttcaccttctgtggttccttcacgggctggaagagacatggggcccacatctacctcacgatgctcctctccattgccatctgggtggcctggatcaccctgctcatgcttcctgactttgaccgcaggtgggatgacaccatcctcagctccgccttggctgccaatggctgggtgttcctgttggcttatgttagtcccgagttttggctgctcacaaagcaacgaaaccccatggattatcctgttgaggatgctttctgtaaacctcaactcgtgaagaagagctatggtgtggagaacagagcctactctcaagaggaaatcactcaaggttttgaagagacaggggacacgctctatgccccctattccacacattttcagctgcagaaccagcctccccaaaaggaattctccatcccacgggcccacgcttggccgagcccttacaaagactatgaagtaaagaaagagggcagctaactctgtcctgaagagtgggacaaatgcagccgggcggcagatctagcgggagctcaaagggatgtgggcgaaatcttgagtcttctgagaaaactgtacaagacactacgggaacagtttgcctccctcccagcctcaaccacaattcttccatgctggggctgatgtgggctagtaagactccagttcttagaggcgctgtagtatttttttttttttgtctcatcctttggatacttcttttaagtgggagtctcaggcaactcaagtttagacccttactctttttgtttgttttttgaaacaggatcttgctctgtcacccaggcttgagtgcagtggtgcgatcacagcccagtgcagcctcgaccacctgtgctcaagcaatcctcccatctccatctcccaaagtgctgggatgacaggcgtgagccacagctcccagcctaggcccttaatcttgctgttattttccatggactaaaggtctggtcatctgagctcacgctggctcacacagctctaggggcctgctcctctaactcacagtgggttttgtgaggctctgtggcccagagcagacctgcatatctgagcaaaaatagcaaaagcctctctcagcccactggcctgaatctacactggaagccaacttgctggcacccccgctccccaacccttcttgcctgggtaggagaggctaaagatcaccctaaatttactcatctctctagtgctgcctcacattgggcctcagcagctccccagcaccaattcacaggtcacccctctcttcttgcactgtccccaaacttgctgtcaattccgagatctaatctccccctacgctctgccaggaattctttcagacctcactagcacaagcccggttgctccttgtcaggagaatttgtagatcattctcacttcaaattcctggggctgatacttctctcatcttgcaccccaacctctgtaaatagatttaccgcatttacggctgcattctgtaagtgggcatggtctcctaatggaggagtgttcattgtataataagttattcacctgagtatgcaataaagatgtggtggccactctttcatggtggtggcagcaaaaaaaaaaaaaa

SEQ ID NO: 3499 - protein, 357 aa, Homo sapiens
MATTVPDGCRNGLKSKYYRLCDKAEAWGIVLETVATAGVVTSVAFMLTLPILVCKVQDSNRRKMLPTQFLFLLGVLGIFGLTFAFIIGLDGSTGPTRFFLFGILFSICFSCLLAHAVSLTKLVRGRKPLSLLVILGLAVGFSLVQDVIAIEYIVLTMNRTNVNVFSELSAPRRNEDFVLLLTYVLFLMALTFLMSSFTFCGSFTGWKRHGAHIYLTMLLSIAIWVAWITLLMLPDFDRRWDDTILSSALAANGWVFLLAYVSPEFWLLTKQRNPMDYPVEDAFCKPQLVKKSYGVENRAYSQEEITQGFEETGDTLYAPYSTHFQLQNQPPQKEFSIPRAHAWPSPYKDYEVKKEGS

SEQ ID NO: 3500 - DNA, 1700 bp, Homo sapiens
ggtacctcgtggagaagacgggggaggggagcagcgagatttccttgcggagcaatattcctagggtacagacctcgtagcccgggcccgcgactccgccccgggagcgggcaggggcggggcgagcgctccagctggcgggaaggaggaagggccgggcgcggcgcagaggcgggcgcctaccagccggcagctccggagctgcccgcgccatgtccgcgcacaatcggggcaccgagctcgaccttagctggatctccaaaatacaagtgaatcacccggcagttctgaggcgtgcggaacaaatccaggctcgcagaaccgtgaaaaaggagtggcaggctgcttggctcctgaaagctgttacctttatagatcttactacactttcaggtgatgatacatcttccaacattcaaaggctctgttataaagccaaatacccaatccgggaagatctcttaaaagctttaaatatgcatgataaaggcattactacagccgccgtttgtgtttatcccgcccgggtgtgtgatgctgtaaaagcactcaaggctgcaggctgtaatatccctgtggcatcagtggccgctggatttccagctggacagactcatttgaagacacgattagaagagatcagattggctgtggaagatggagctacagaaatcgacgtggtaattaacagaagcttggtgctgacaggccagtgggaagccctgtatgatgagattcgtcagtttcgcaaggcctgtggggaggctcatcttaaaactatattagcgacaggagaacttggaactcttactaatgtctataaagccagtatgatagcaatgatggcaggatcagattttattaagacctctactggaaaagaaacagtaaatgccaccttcccggtagctatagtaatgctgcgggccattagagatttcttctggaaaactggaaacaagatagggtttaaaccagcaggaggcatccgcagtgcaaaggattcccttgcttggctctctcttgtaaaggaggagcttggagatgagtggctgaagccagaactctttcgaataggtgccagtactctgctctcggacattgagaggcagatttaccatcatgtgactggaagatatgcagcttatcatgatcttccaatgtcttaaatcagtcaccagttccagaaaagttctttacgacaatgtttaaaaattatttttctacgtaattgctaaaattatttaattaaaaaattgggcagtaggtaactggcattcctctctttaaaatttctaccgaacttaatggaatggaaaaagcaaactcatccacatgtggtactcatttcaggcacatctgaaatgatcttaattactagaagatctgcactattaactttgtgaagagtttctcctaaaaactttaagtaaaatgttaatggtagctttgataacatcaaattctaagggagaaaaaaacaatattaaaccgcccaagcagtgtgccctagcagaggaaaatgcaacatctcgcaagcgctgctgtaacgacttcaggagtcactgattcagcactaatttcctgctgtgaaaactcatctttcatttttgccgtggataggcgcttttattaattgttgtcctaatgaaatttctgacattgtcatatacaacgatgaatatcattaaaatttttaa

SEQ ID NO: 3501 - DNA, 1867 bp, Homo sapiens
tgtggacgctgtgaatcgtggctggcccggttctccgcttctccccatcccctactttcctccctccctccctttccctccctcgtcgactgtttcttgctggtcgcagactccctgacccctccctcacccctccctaacctcggtgccaccggattgcccttcttttcctgttgcccagcccagccctagtgtcagggcgggggcctggagcagcccgaggcactgcagcagaagagagaaaagacaacgacgaccctcagctcgccagtccggtcgctggcttcgccgccgccatggcaatgagacagacgccgctcacctgctctggccacacgcgacccgtggttgatttggccttcagtggcatcacgccttatgggtatttcttaatcagcgcttgcaaagatggtaaacctatgctacgccagggagatacaggagactggattggaacatttttgggtcataaaggtgctgtttggggtgcaacactgaataaggatgccaccaaagcagctacagcagctgcagatttcacagccaaagtgtgggatgctgtctcaggagatgaattgatgaccctggctcataaacacattgtcaagactgtggatttcacgcaggatagtaattatttgttaaccgggggacaggataaactgttacgcatatatgacttgaacaaacctgaagcagaacctaaggaaattagtggtcatacttctggtataaaaaaagctctgtggtgcagtgaggataaacagattctttctgctgatgacaaaactgttcgactttgggatcatgctactatgacagaagtgaaatctctaaattttaatatgtctgttagtagtatggaatatattcctgagggagagattttggttataacttatggacgatctattgcttttcatagtgcagtaagtttggacccaattaaatcctttgaagctcctgcaaccatcaattctgcatctcttcatcctgagaaagaatttcttgttgcaggcggtgaagattttaaactttataagtatgattataatagtggagaagaattagaatcctacaagggacactttggtcctattcactgtgtgagatttagtcctgatggagaactctatgccagtggttcagaagatggaacattgagactatggcaaactgtggtaggaaaaacgtatggcctttggaaatgtgtgcttcctgaagaagatagtggtgagctggcaaagccaaagattggttttccagagacaacagaagaggagctagaagaaattgcttcagagaattcagagtgcatctttccttcagctcctgatgttaaggcctgagcgtcaatcatatgttgcagttagtatacaactgactaaaacaagcaagcagagaaaagcatcagccttccagagttactgtctgcttaaggcagaaacagcagtaaataatgaggaaaatgaattagctccagtgctggaacaactaactaacttggtgttacctgtaagtgaaaactcaagtgtcagatgaagggaggtggagttatcctcttatagtacagtggcctgttatctttttaatgaatatatacaagccaacatccaatttctattattacaattagggttcttgtagctgtttatgttaatatggagaagaaaactatattggctgatttttttctgatcttaaagcagaatgccttttctttttttgcttcagttgtaaagaagagggaatacatgataaagtaactggtttgatttctcgttcattgtacactgcctctgaacatctaattgtttttagttgtctaaataaaatgcctctaaaacaaaaaaaaaaaaaaaaaaaa

SEQ ID NO: 3502 - protein, 350 aa, Homo sapiens
MAMRQTPLTCSGHTRPVVDLAFSGITPYGYFLISACKDGKPMLRQGDTGDWIGTFLGHKGAVWGATLNKDATKAATAAADFTAKVWDAVSGDELMTLAHKHIVKTVDFTQDSNYLLTGGQDKLLRIYDLNKPEAEPKEISGHTSGIKKALWCSEDKQILSADDKTVRLWDHATMTEVKSLNFNMSVSSMEYIPEGEILVITYGRSIAFHSAVSLDPIKSFEAPATINSASLHPEKEFLVAGGEDFKLYKYDYNSGEELESYKGHFGPIHCVRFSPDGELYASGSEDGTLRLWQTVVGKTYGLWKCVLPEEDSGELAKPKIGFPETTEEELEEIASENSECIFPSAPDVKA

SEQ ID NO: 3503 - DNA, 1242 bp, Homo sapiens
ccagggtttcctcttcaagtaggtctaaaacatttttttttctcattgacttccttcctgttctaactgccagtactcagaagtcagagttgagagacagaggcaccccggacagagacgtgaagcactgaataaatagatcagaatgactgaaaaagccccagagccacatgtggaggaggatgatgatgatgagctggacagcaagctcaattataagcctccaccacagaagtccctgaaagagctgcaggaaatggacaaagatgatgagagtctaattaagtacaagaaaacgctgctgggagatggtcctgtggtgacagatccgaaagcccccaatgtcgttgtcacccggctcaccctggtttgtgagagtgccccgggaccaatcaccatggaccttactggagatctggaagccctcaaaaaggaaaccattgtgttaaaggaaggttctgaatatagagtcaaaattcacttcaaagtgaacagggatattgtgtcaggcctgaaatacgttcagcacacctacaggactggggtgaaagtggataaagcaacatttatggttggcagctatggacctcggcctgaggagtatgagttcctcactccagttgaggaggctcccaagggcatgctggcgcgaggcacgtaccacaacaagtccttcttcaccgacgatgacaagcaagaccacctcagctgggagtggaacctgtcgattaagaaggagtggacagaatgaatgcatccacccctttccccacccttgccacctggaagaattctctcaggcgtgttcagcaccctgtccctcctccctgtccacagctgggtccctcttcaacactgccacatttccttattgatgcatcttttcccaccctgtcactcaacgtggtccctagaacaagaggcttaaaaccgggctttcacccaacctgctccctctgatcctccatcagggccagatcttccacgtctccatctcagtacacaatcatttaatatttccctgtcttacccctattcaagcaactagaggccagaaaatgggcaaattatcactaacaggtctttgactcaggttccagtagttcattctaatgcctagattcttttgtggttgttgctggcccaatgagtccctagtcacatcccctgccagagggagttcttcttttgtgagagacactgtaaacgacacaagagaacaagaataaaacaataactgtg

SEQ ID NO: 3504 - DNA, 4018 bp, Homo sapiens
atggccgacctggaggagctctcccgcctgagccctctgccccccggcagcccgggttcggcggcgcggggccgggctgagccccccgaggaggaggaggaagaggaggaggaggaagaggaggcggaggccgaggcggtggcggcgctgctgctgaacggcggcagcggtgggggcggcggaggcggcggcggaggagtggggggcggcgaggcagagacgatgtcggagccgagccccgagagcgccagccaggccggggaggacgaagacgaggaggaggacgacgaggaggaggaagatgagagcagcagcagcggcgggggtgaggaggagagtagcgccgagagcctggtgggcagcagcggcgggagcagcagcgacgagacccgctcgttgagccccggcgccgccagcagcagcagcggggatggggacggcaaggagggcctggaggagcccaagggaccgcggggcagccagggcggcggcgggggcggcagcagtagcagcagcgtagtctccagcggcggcgacgagggctacgggactgggggaggcggaagcagcgcgacctccgggggccggcggggcagcttggagatgtcgtcggatggggaacccctgagccgcatggactcggaggacagcataagcagtactataatggatgtagacagcacaatttccagtgggcgttcaactccagcaatgatgaatggacaaggaagcactacttcttcaagcaaaaatattgcctataattgttgttgggaccagtgccaggcttgcttcaactctagcccagatctggcagatcacatccgttccatacatgtagatggtcagcgaggaggggtatttgtttgcttatggaaaggttgtaaagtatataacactccatctaccagtcaaagttggttacaaaggcatatgctgacacacagtggagacaaacctttcaagtgtgttgttggtggctgcaatgccagctttgcttctcagggagggctagctcgtcatgtacccacacacttcagtcagcagaactcctcaaaagtttctagccagccaaaggccaaagaagaatctccttctaaagctggaatgaacaaaaggaggaaattaaagaacaaaagacgacgctcattaccacggccacatgatttcttcgatgcacaaacactggatgcgataagacatcgagccatatgctttaacctctcagctcatatagaaagtttagggaagggacacagtgttgtttttcatagtactgtaatagctaagagaaaagaagattctgggaagatcaaacttttgcttcattggatgcctgaagacattctgcctgatgtgtgggtgaatgaaagtgaacgacatcagttaaaaactaaagtagttcatttatcaaagctacccaaagatactgccttgcttttggacccaaacatatacagaacaatgccgcagaagaggttgaagaggtaaaaaataaataaatacataaaaagcaaacaagcggggacacctgcagtcttagtcactgacaatgggtttagggaaagttgcacattagagtcaaccccttcttttttttttttttttttttaaatccagtatttaggataatatttatgcttagtgtaaacattctgtgaatgaagtagactcttcggtggaatatattaatatattactgtatatccacattttcatggaatggtactgtgggagactgagcaaacactcttttggcaacttagtagaacagcttcttaaaggctttgcatgcttgctgctttaagctgcttttttttttcttttcttccctttagtgatttcagtagtttatattggaaagaaaaacaattacaacatgtgcccttacaaataccaaaagcactgtaaggatatttgtcttgacagtgtttattgatttgaagtcatattaggaaatatttagacaatgaaaattatcaagagataatttacctttcaattatgataaatagatgtgattggttgccatttgtgttcttttgcagaactctgataagaaaagtgttcaatttgtatttaagcaaacagtgaacgacgtttgcaatcaactaaaaattcgtctatcgaattagggctgaaaattactgttaaagagtgttgcagtatgtctggtggctcccttttcaggactagggctttctcatggagtacagtatgttaatatttacctatataactaatctgttaacggtttttgaaaaacctttcaaattatttgaataatcttcatattttcatttaacctatatgactctaattttttttctgaggaaatcatttggtttttgagttgttttttcttaatgtaagaaaaattgtattttttttacaagtatcttcaaactgaatcttttatgcaccaaagttggtcttgaaaaggaaaataaaatcactttcttgcttggtaagcaagaagccatatcgattttttttaacttacagaaatggaaatatgtgtaacttgttagtattgtattaaacaaatgttgcatagagataatagaacattgcttgtaaataattcagcagatttgtaatatatttttatattttgaaatgtactgtagatgttttctagaggcatgaaagttaaatgtatatattatggtagaaataatattgaaggatattgtacttcactagtgctgccagaggaattgttaataaaagcaccttctttaacaataaatgtctttcacagacttaagggactatgtactactgttaatatctctaagaacaaaacacattgaacatccttccagaaagtctttgagggaggacctatacccataatagaattatggcactcatttctgacagtgatcaagaaatcagttatttccttactgttggaaggacattgtaaagtatgtggttatatgcagtgaaactgcagaaaatactcctggttgaggagttttcactttactacagtgatataaaaaccagcagtttttacactaaattttttaaagaaatattagacaaaaatatagaattaaaacctttggttccaaaatgggaaaggttccacgatacataaatcatttctcatttgctttaaaaaatttaaaagtgtaaaaattatgagagactttattcgttaacaatgggggtaaagagctatatacatgaaaatgagtcttataaaattaagtgaagtgcaaataaaagcactgctactataagacattctggaatggttgtttaataagggtattatccatttgatctatagcaatgtgattttatttttaaaaagaaaagcagtgtgttttctttttttgttgttttcttttgcttaagcacttcatcaattgctttattctgtatctgcgaagtaatctgcaatctcttttgttctttttaaaatttgatttgttataaaattgccaaatagaagtgtttcagatacatagtttgtacctgtatttttattttattgcctcatgttcttgtaagtcattcttaattgaccaatgattgtagaccttgcttgagtattttttctaataaaacaaagcaaatcacatttagcttcaaattgtaacaattcaattgaattttaaaatgacacctgaaaagatacatctgatattttctatatagagcacagtaaataagttttttcattgtgtagaaatacttagatgtcaaaaccagatttcgtgatccttgattaacttctgagtactcaatcaatcataatccttttgctgcttatctgatgttggtttgatactgttaacacaccaaaaagaatatggaattgaaatgagctagctttataacttgtatgtatacatatatacacataacatccaattatgactgggtaataagtgtgaaaattttaatttgtggttttcatttattaatgtctgcccatctgtattgttgctcctaccttcaaatatgacacctgaaataataagtctgttgtccagaattt

SEQ ID NO: 3505 - protein, 295 aa, Homo sapiens
MSSDGEPLSRMDSEDSISSTIMDVDSTISSGRSTPAMMNGQGSTTSSSKNIAYNCCWDQCQACFNSSPDLADHIRSIHVDGQRGGVFVCLWKGCKVYNTPSTSQSWLQRHMLTHSGDKPFKCVVGGCNASFASQGGLARHVPTHFSQQNSSKVSSQPKAKEESPSKAGMNKRRKLKNKRRRSLPRPHDFFDAQTLDAIRHRAICFNLSAHIESLGKGHSVVFHSTVIAKRKEDSGKIKLLLHWMPEDILPDVWVNESERHQLKTKVVHLSKLPKDTALLLDPNIYRTMPQKRLKR

SEQ ID NO: 3506 - DNA, 4042 bp, Homo sapiens
caaaagaaaggaagaaagtcacaaagggctgtctgaggcacatgattgtgaagagttaaagggaaaatccattcttctgctttgtgagagctctcaagctaaagtaaatgagcctttagaagccaaacatgcagctaacaaaggtatgtatccatgtctgtggacactagttgagattttggtccaggaaaagctgaggtttggttgggggagggtgaagcgaggaggccaagagcaccacctggctgcaccccgtcaccggcgaggcggtggtcaccggacaccggcggcagagcacagcctagacgaccctcgcgaccctagagtggcgacgctcccctccctgaaacctggagtcctgagtttttcctccgcggccgctactcactccccggtgacccccagctgccgtcttgccccccagcaatcttcaggcagtccttacccactcccctccctgcagccccggaccccgatcgcccgccgggataaccgtggcagttggcttctaagaggaattatcctaggagaacagaccacagttttagacacttataaaacttctgcttatatcatgctttcccatgtggtcctggttgatgtatcagatggaaggcagatacgtttaagtcatgagcgagatccacccatcctcatgtatcagttacaaatgcactgtcctacctgcgttaggacaaatgcactaaaactgtataaagtcttcagaggatattcagttgtcatagaactactttcagtccgctttcccaaagggaaatacatgattcagagcaaatcatataaatgggtacacatccataatgaaaggaaagtgacctgcaaacatccagtcacaggacaaccatcacaggacaattgtatttttgtagtgaatgaacagactgttgcaaccatgacatctgaagaaaagaaggaacggccaataagtatgataaatgaagcttctaactataacgtgacttcagattatgcagtgcatccaatgagccctgtaggcagaacttcacgagcttcaaaaaaagttcataattttggaaagaggtcaaattcaattaaaaggaatcctaatgcaccggttgtcagacgaggttggctttataaacaggacagtactggcatgaaattgtggaagaaacgctggtttgtgctttctgacctttgcctcttttattatagagatgagaaagaagagggtatcctgggaagcatactgttacctagttttcagatagctttgcttacctctgaagatcacattaatcgcaaatatgcttttaaggcagcccatccaaacatgcggacctattatttctgcactgatacaggaaaggaaatggagttgtggatgaaagccatgttagatgctgccctagtacagacagaacctgtgaaaagagtggacaagattacatctgaaaatgcaccaactaaagaaaccaataacattcccaaccatagagtgctaattaaaccagagatccaaaacaatcaaaaaaacaaggaaatgagcaaaattgaagaaaaaaaggcattagaagctgaaaaatatggatttcagaaggatggtcaagatagacccttaacaaaaattaatagtgtaaagctgaattctctgccatctgaatatgagagtgggtcagcatgccctgctcagactgtgcactacagaccaatcaacttgagcagttcagagaacaaaatagtcaatgttagcctggcagatcttagaggtggaaatcgccccaatacagggcccttatacacagaggccgatcgagtcatacagagaacaaattcaatgcagcagttggaacagtggattaaaatccagaaggggaggggtcatgaagaagaaaccaggggaaatatgccaagtcacagagcccagattatggcccgctaccctgaaggttatagaacactcccaagaaacagcaagacaaggcctgaaagtatctgcagtgtaaccccttccactcatgacaagacattaggacccggagcggaggagaaacggaggtccatgagagatgacacaatgtggcagctctacgaatggcagcagcgtcagttttataacaaacagagcaccctccctcgacacagtactttgagtagtcccaaaaccatggtaaatatttctgaccagacaatgcactctattcccacatcaccttcccacgggtcaatagctgcttatcagggatactcccctcaacgaacttacagatcggaagtgtcttcaccaattcagagaggagatgtgacaatagaccgcagacacagggcccatcaccctaagccagaggagcttacgctgctgctaataaagctgagacggcagcaagccgaactgagtagtatccgggagcatacgttagcacagctcatgcagctaaagcttgaggcccacagcccaaaggtgggaagcccctcctgtgtgctcccgtggcatctgacctctgacacgttgatgaatgatgatgaactgctgaaaagagatggaacctgcaattgcagtgatcatattagcatgcaagtaattaacaagttgcacctggtgagtaggaaggcaggcagccagaggctccagagccatcagaagggctgtcagggcacaagactgccaagaaagaaggaaagtgactgtctactggaagaatctgtgcaggctccatcacaggcagctgcagctctgtatgagggcctctgggggagctgggaacctgtgcttctatgtgggaacatgctccactgtttccagctttgtatagaaatttctaatcatataaatctcagtattcttggacatcaaggaagtcttatatttttaagcaaccctgtctgctaccatcttcccaacaaccccaccaccatctgttttgatgcctacacagaagatataagccagtggatcctacatttttttcaagtatttgctgaaatacaaagatttatcaaaattgctaagaagcagggctcattcaggctcgaggacgctcttgcatgtgaattaaacccacaggagactgatgcacaaaaccagaatagagctttattttacaataagaattgtataactgccgagaggtcagagaaggacagtgggaaaatcacattctctgctcaaaggcagactctccagaaagccagtttaccgggaactgaggggataacgagaacatacggaggcagcacgagcgttggcaccgctactgatgatgctaccctattgcacatcaccttcactgggtactcagtcagtagtaccatgtgcatctacatagctatctctcaggttctctttgcattcctcatccgtactgctgattacatgggcccaactggacactacatgtacatcgggtacgagcatcgatccgtcacactggctgcccttggagctggcttctctgacaagactcctgctcacactgtcaccatggcttgtatctctgccaaccaagccatgaccacaggtgtatgcaactttggtcagcagaaacacaatacgagcctctggctagctaaggcactctattctgaaagtacggaaaacatgcacggtcagattttggcaaattttaaagccatggattctgattggtttgcagaaaactacatgggtagaaaaaccaagaagtttaataactggggtggatctctgtccctgggacacccatttggagccactggctgcaggttggtcatggctgctgcaacagattacggaaagaaggaggccaaggaagtctccacggtccctcattacatcttcaccattctcaacaccctccagggcgtcttcatcctattgtttggttgcctcatggacaggaagatacaagaagctttgcgcaaacgcttctgccgcgcccaagcccccagctccaccatctccctgactgatggtgcatctgcaatgttaatcatggcggaggaaaaggctctggccagtgcggttatgaagccggacgttatttttgagggtaaagtaaatgttcaaacaaatcatctctga

SEQ ID NO: 3507 - DNA, 821 bp, Homo sapiens
ctctttttccagctggaaccatggagtgtgtagaagagaagaaggttcttgctgtgccagaaacccttaagaaaaagcgaaggaattttgcagagctgaagatcaagcgcctgagaaagaagtttgcccaaaagacgcttcgaaagacaaggaggaagcttatctatgaaaaagcaaagcactatcacaaggaatacaggcagatgtacagaactgaaattcgaaaggcgaggatggcaagaaaagctggcaatttctatgtacctgcagaacccaaattggcatttgtcgtcagaatcagaggtgtcaatggcgtgagcccaaaggtccgaaaggtgttgcagcttcttcgccttcgtcaaatcttcaatggcacctttgtgaagctcgacaaggcttcgattaacatgctgaggattgtagagccatatattgcatgggggtaccccaatctgaagtcagtaaatgaactaatctacaagcgtggttatggcaaaatgaataagaagcgaattgctttgacagataacactttgattgctcgatctcttggtaaatacggcatcatctgcatggaggatctgattcatgagatctatactgttggaaaaggcttcaaagaggcaaataacttcctgtgggccttcaaattgtcttctccacgaggtggaatgaagaaaaagaccacccattttgtagaaggtggagatgctggcaacagggaggaccaggtcaacaggcttattagaagaatgaactaaggtgtctaccatgattatttttctaagctggtcggttaataaacagtacctgctctcaaa

SEQ ID NO: 3508 - protein, 246 aa, Homo sapiens [sequence omitted]

SEQ ID NO: 3509 - DNA, 863 bp, Homo sapiens
gatcccagaggaggaagtccagagacagagcaccatgacttctgagaaaggagaagaatcgaaccctgggagtttgacgtcttctatgaccccagagaacttcgtaaagaggcctgtctgctctacgaaatcaagtggggcatgagccggaagatctggcgaagctcaggcaaaaacaccaccaatcacgtggaagttaattttataaaaaaatttacgtcagaaagagattttcacccatccatcagctgctccatcacctggttcttgtcctggagtccctgctgggaatgctcccaggctattagagagtttctgagtcggcaccctggtgtgactctagtgatctacgtagctcggcttttttggcacatggatcaacaaaatcggcaaggtctcagggaccttgttaacagtggagtaactattcagattatgagagcatcagagtattatcactgctggaggaattttgtcaactacccacctggggatgaagctcactggccacaatacccacctctgtggatgatgttgtacgcactggagctgcactgcataattctaagtcttccaccctgtttaaagatttcaagaagatggcaaaatcatcttacatttttcagacttcatcttcaaaactgccattaccaaacgattccgccacacatccttttagctacagggctgatacatccttctgtggcttggagatgaataggatgattccgtgtgtgtactgattcaagaacaagcaatgatgacccactaaagagtgaatgccatttagaatctagaaatgttcacaaggtaccccaaaactctgtagcttaaaccaacaataaatatgtattacctctggc

SEQ ID NO: 3510 - protein, 36 aa, Homo sapiens
MTSEKGEESNPGSLTSSMTPENFVKRPVCSTKSSGA

SEQ ID NO: 3511 - DNA, 891 bp, Homo sapiens
gatcccagaggaggaagtccagagacagagcaccatgacttctgagaaaggtccttcaaccggtgaccccactctgaggagaagaatcgaaccctgggagtttgacgtcttctatgaccccagagaacttcgtaaagaggcctgtctgctctacgaaatcaagtggggcatgagccggaagatctggcgaagctcaggcaaaaacaccaccaatcacgtggaagttaattttataaaaaaatttacgtcagaaagagattttcacccatccatcagctgctccatcacctggttcttgtcctggagtccctgctgggaatgctcccaggctattagagagtttctgagtcggcaccctggtgtgactctagtgatctacgtagctcggcttttttggcacatggatcaacaaaatcggcaaggtctcagggaccttgttaacagtggagtaactattcagattatgagagcatcagagtattatcactgctggaggaattttgtcaactacccacctggggatgaagctcactggccacaatacccacctctgtggatgatgttgtacgcactggagctgcactgcataattctaagtcttccaccctgtttaaagatttcaagaagatggcaaaatcatcttacatttttcagacttcatcttcaaaactgccattaccaaacgattccgccacacatccttttagctacagggctgatacatccttctgtggcttggagatgaataggatgattccgtgtgtgtactgattcaagaacaagcaatgatgacccactaaagagtgaatgccatttagaatctagaaatgttcacaaggtaccccaaaactctgtagcttaaaccaacaataaatatgtattacctctggc

SEQ ID NO: 3512 - protein, 236 aa, Homo sapiens
MTSEKGPSTGDPTLRRRIEPWEFDVFYDPRELRKEACLLYEIKWGMSRKIWRSSGKNTTNHVEVNFIKKFTSERDFHPSISCSITWFLSWSPCWECSQAIREFLSRHPGVTLVIYVARLFWHMDQQNRQGLRDLVNSGVTIQIMRASEYYHCWRNFVNYPPGDEAHWPQYPPLWMMLYALELHCIILSLPPCLKISRRWQNHLTFFRLHLQNCHYQTIPPHILLATGLIHPSVAWR

SEQ ID NO: 3513 - DNA, 1694 bp, Homo sapiens
cccggatgtggagaagctggggagaaggcgtgggaggaagatggactcggtggagaagggggccgccacctccgtctccaacccgcgggggcgaccgtcccggggccggccgccgaagctgcagcgcaactctcgcggcggccagggccgaggtgtggagaagcccccgcacctggcagccctaattctggcccggggaggcagcaaaggcatccccctgaagaacattaagcacctggcgggggtcccgctcattggctgggtcctgcgtgcggccctggattcaggggccttccagagtgtatgggtttcgacagaccatgatgaaattgagaatgtggccaaacaatttggtgcacaagttcatcgaagaagttctgaagtttcaaaagacagctctacctcactagatgccatcatagaatttcttaattatcataatgaggttgacattgtaggaaatattcaagctacttctccatgtttacatcctactgatcttcaaaaagttgcagaaatgattcgagaagaaggatatgattctgttttctctgttgtgagacgccatcagtttcgatggagtgaaattcagaaaggagttcgtgaagtgaccgaacctctgaatttaaatccagctaaacggcctcgtcgacaagactgggatggagaattatatgaaaatggctcattttattttgctaaaagacatttgatagagatgggttacttgcagggtggaaaaatggcatactatgaaatgcgagctgaacatagtgtggatatagatgtggatattgattggcctattgcagagcaaagagtattaagatatggctattttggcaaagagaagcttaaggaaataaaacttttggtttgcaatattgatggatgtctcaccaatggccacatttatgtatcaggagaccaaaaagaaataatatcttatgatgtaaaagatgctattgggataagtttattaaagaaaagtggtattgaggtgaggctaatctcagaaagggcctgttcaaagcagacgctgtcttctttaaaactggattgcaaaatggaagtcagtgtatcagacaagctagcagttgtagatgaatggagaaaagaaatgggcctgtgctggaaagaagtggcatatcttggaaatgaagtgtctgatgaagagtgcttgaagagagtgggcctaagtggcgctcctgctgatgcctgttctactgcccagaaggctgttggatacatttgcaaatgtaatggtggccgtggtgccatccgagaatttgcagagcacatttgcctactaatggaaaaggttaataattcatgccaaaaatagaaattagcgtaatattgagaaaaaaatgatacagccttcttcagccagtttgcttttatttttgattaagtaaattccatgttgtaatgttacagagagtgtgatttggtttgtgatatatatatattgtgctctacttttctctttacgcaagataattatttagagactgattacagtctttctcagatttttagtaaatgcaagtaagaacatcatcaaagttcactttgtattgtaccctgtaaaactgtgtgtttgtgtgctttcaaagatgttgggattttatttatctggggacagtgtgtatggtaagacatgcccttctattaataaaactacatttctc

SEQ ID NO: 3514 - protein, 434 aa, Homo sapiens
MDSVEKGAATSVSNPRGRPSRGRPPKLQRNSRGGQGRGVEKPPHLAALILARGGSKGIPLKNIKHLAGVPLIGWVLRAALDSGAFQSVWVSTDHDEIENVAKQFGAQVHRRSSEVSKDSSTSLDAIIEFLNYHNEVDIVGNIQATSPCLHPTDLQKVAEMIREEGYDSVFSVVRRHQFRWSEIQKGVREVTEPLNLNPAKRPRRQDWDGELYENGSFYFAKRHLIEMGYLQGGKMAYYEMRAEHSVDIDVDIDWPIAEQRVLRYGYFGKEKLKEIKLLVCNIDGCLTNGHIYVSGDQKEIISYDVKDAIGISLLKKSGIEVRLISERACSKQTLSSLKLDCKMEVSVSDKLAVVDEWRKEMGLCWKEVAYLGNEVSDEECLKRVGLSGAPADACSTAQKAVGYICKCNGGRGAIREFAEHICLLMEKVNNSCQK

SEQ ID NO: 3515 - DNA, 1971 bp, Homo sapiens
tataacatctcctgctaagcaaagcccactgactaattagtcaccactacacaaggaaaaacagcattatttttagaggctgaattaatgttagttttctcattttctcatcttcattctctctgctgttgaagaaatgttcagtggccaactgattctgcttcttctcttgcaggtttcctatcctgggagcaggagagtgtgcctatttgaatgacaaaggtgccagtagtgccaggcactacacagagaggaagtggatttgttccaaatcagatatacatgtctagatgttacagcaaagccccaactaatctttagaagcatattggaactgataactccattttaaaatgagcaaagaatttatttcttataccaacaggtatatgaaaatatgctcaatatcactaataactgggaaaatacaaatcaaaatcatagtaaaatattacctgttttcatggtgctaatattacctgttctcccactgctaatgacatacccgagactgagtaatttataaataaaagagatttaattgactcatagttccacatggctggggaggtcttgcaatcatgacagaaggcaaatgggaagcaaagtcatgtcttatgtggtggcaggcagggggacttgtgcacaggaactcctatttatacaaccatcagatatcttgagacaagaacagtatggggctccctggtgtgattccgtcctgcgcggctgttctctggagcagcattcatttatcttcgtctgccttgtctcctacctaagtgtgtgtcgccacccgatggaagattcgatggacatggacatgagccccctgaggccccagaactatcttttcagttgtgaactaaaggccgacaaagatgatcactttaaggtggataatgatgaaaatgagaccagttatctttaagaacggtcagctcaggggctggtgcaaaggatgaactgcacattgttgaagcagaggccatgaatgacgaaggcagtccaattaaagtaacactggcaactttgaaaatgtctgtacagccaacggtttctcttgggggctttgaaataacaccaccagtggacttaaggttgaagtgtggttcagggccagtgcatattagtggacagcacttagtagctgtgaaggaaggtgcagagtcagaagatgaagaagaggaggatgtgaaactcttaagtatatctggaaagcagtctgcccctggaggtgggcagaaaaaagtaaaacttgctgctgctgctgatgatgatgatgatgaagatgatgatgatgatgatgacgaggaagctgaagaaaaagcgccagtgaagaaatctatacgagatactccagccaaaaatgcacaaaagtcaaatcagaatggaaaagactcaaaaccatcatcaacaccaagatcaaaaggacaagaatccttcaaaaaacaggaaaaatctcctaaaacaccaaaaggatctagttctgtagaagacattaaagcaaaaatgcaagcaagtatagaaaaacgtggttctcttcccaaagtggaaaccaagttcatcaattatgtgaagaatttcttctggatgactgaccaagaggctattcaagatctctggcagtggaggaagtctctttaagaaaatagtttaaacaatttgttaaaaattttccatcttatttcatttctgtaacagttgatatctggctgtcctttttatagtgcagagtgagaactttccctaccatgtttgataaatgttgtccaggttctattgccaagaatgtgttgtccaaaatgcctgtttagtttttaaagatggaactccaccctttgcttggttttaagtatgtatgggatgctatgataggacatagtagtagcagtggtcagacatggaaatggtggggagacaaaagtatacacgtgaaataaaactcagtattttaataaagtaaaaaaa

SEQ ID NO: 3516 - protein, 218 aa, Homo sapiens
MNDEGSPIKVTLATLKMSVQPTVSLGGFEITPPVDLRLKCGSGPVHISGQHLVAVKEGAESEDEEEEDVKLLSISGKQSAPGGGQKKVKLAAAADDDDDEDDDDDDDEEAEEKAPVKKSIRDTPAKNAQKSNQNGKDSKPSSTPRSKGQESFKKQEKSPKTPKGSSSVEDIKAKMQASIEKRGSLPKVETKFINYVKNFFWMTDQEAIQDLWQWRKSL

SEQ ID NO: 3517 - DNA, 2579 bp, Homo sapiens
ggcgccgggggacacgttggctgcgttttcggcgggcctcccgggtacaaaaatggctgtggctagcgatttctacctgcgctactacgtagggcacaagggcaagtttgggcacgagtttctggagttcgaatttcggccggacggaaagcttagatatgccaacaacagcaattacaaaaatgatgtgatgatcagaaaagaggcttatgtgcacaagagtgtaatggaagaactgaagagaattattgatgacagtgaaattacaaaagaagatgatgctttgtggcctccccctgatagggttggccgacaggagcttgaaattgtaattggagatgagcacatatcttttaccacatcaaaaataggttctcttattgatgtaaatcagtcaaaggatcctgaaggccttcgagtattttactatttggtacaagacttgaaatgtttagttttcagtcttattggattacacttcaagattaaaccaatttaaattgtatgttttcaggctgtttgtatatttaattaagggatgggaggggttatttgtcatttacagtattggggtttttatgaatgtgaagcaaacaaaaaaaatttgtatgtaaactgaaaataagaaaatacattagcaagcttaatggttatccttacttgagtccacatgggttggacagtccccacacacattaaattctgtaaatgaaagccaccttttgttaaaaatttgctctaataaaacataccaaatcctggttgcagagtagttttttgttttttccaggaggctatgtctctaattcactttagagataataagaaattgttctggtagatacatcctgtgacagaagatactttaggtggaactatgtagccagattcccatccatgaaaggcaagtgtagattgtcccttatttccttcatacatgattggatttaattttggggggcttatacaaggtctagtttttttttacagttatgacaaacccctcagggattattcacatttaaatattttcagttacaagcagtgaggtcctaaagtgttacaagagtacagtctaccccatgttaggcatatctttgattatgtctttattccttatttcacaatgtatttggtgtgtaggggaggggggagaactaaatgagttttcagctttataaattgttaaacatttagacaaacatatatgtatgtatgaatgtacataaatatttttaactcctattgaccacgagtctcacttcagtttcccagttcctttcaacctctttctgatagatttcctctttcattacttttagtaaccatgttccttgtttccttttattcttccatctgaagccccactcttaaaaagttgcactgttccagtagttataatccacttgccctaggaacaagttagcactgaattttgggtggaataattagtttctgaaggcttgccaggacccctgagcaggtaggctctagagtcgggcagtccaataacttttttgcaataatggaaacgtcctatgtgcagtccaatagggtagcaactggccaaatgaggcctactgattacttgaggtgtgccttgtataactgaatttatggtgctatttaaacaatttttttctaacgtgaaaaggataaaacataaaaaactcttgagaactataaagtgaacacctatatgcctacccctacctagattctatacttaacatcttttttactgtaatatctctattataataaatcttggtttttcacttaactggtgtaattggtgccaataaactactttttttgtagtgctatttaattttgattaaatttagatagccacgtgtctagcggctaccgtttggacagtatagctctagagcatggcttggtaacctgtttgccatggagcactagatggtccttttcactcctcaaaatgcatgcccattgccttcaggtttgccatggaaagtcaaatgatttccacttcattatgcaagtacgctatcatcttcaggtcttttgtatgtaaaatgtttctgttccagttgtagaccttgatgattgtgcagtatgaaatcgtattgtaattttcttgcatttagatgtcaacctcagaaacaggaacaatcgtcttttgaacttccagtaggcccacagttgttggttgttcctcaaaacaggttgtggctcctgttgaataagatgatccattaaaaactgaacaaggttgaggagaaatagtgcttacgttgaaaaatctttaagtctttgtccccgttctctaacttccttacgttttcgtttatttagctccatccccactatctactagaatttctcatatttaaaccaagatgggagactaggtcattaggaaaatattaccgtctacaattttcttatactttgatctgtcttttatttgattgtaagttgctgatggacagtgatcattagaaactgaattttgtataatactagttttatatgaaactagatatttattgcgctcaggttatgttccttttacctccttccttaataaagagaccacttgaaat

SEQ ID NO: 3518 - protein, 148 aa, Homo sapiens
MAVASDFYLRYYVGHKGKFGHEFLEFEFRPDGKLRYANNSNYKNDVMIRKEAYVHKSVMEELKRIIDDSEITKEDDALWPPPDRVGRQELEIVIGDEHISFTTSKIGSLIDVNQSKDPEGLRVFYYLVQDLKCLVFSLIGLHFKIKPI

SEQ ID NO: 3519 - DNA, 1752 bp, Homo sapiens
aaaaacttgtgcggggccatttttggggcagtaagatcgagcgaggagcccaagagagagcgcgcagcacgaagctcgagccgcctccgccgcgcgaccccacctcggccgccgccgcctgcgccgcgagatccgccccggcctccccgagagcgagccccggccgccgcgaccaccagccgcgctaaccgccgaccaaccgccaccgaggcgcctgagcgagagcagaggaggaggaggcatgagtgaggcgggcgaggccaccaccaccaccaccaccaccctcccgcaggctccgacggaggcggccgccgcggctccccaggaccccgcgcccaagagcccggtgggcagcggtgcgccccaggccgcggccccggcgcccgccgcccacgtcgcaggaaaccccggtggggacgcggcccccgcagccacgggcaccgcggccgccgcctctttagccaccgccgccggcagcgaagacgcggagaaaaaagttctcgccaccaaagtccttggcactgtcaaatggttcaacgtcagaaatggatatggatttataaatcgaaatgacaccaaagaagatgtatttgtacatcagactgccatcaagaagaataacccacggaaatatctgcgcagtgtaggagatggagaaactgtagagtttgatgtggttgaaggagagaagggtgcagaagctgccaatgtgactggcccggatggagttcctgtggaagggagtcgttacgctgcagatcggcgccgttacagacgtggctactatggaaggcgccgtggccctccccggaatgctggtgagattggagagatgaaggatggagtcccagagggagcacaacttcagggaccggttcatcgaaatccaacttaccgcccaaggtaccgtagcaggggacctcctcgcccacgacctgccccagcagttggagaggctgaagataaagaaaatcagcaagccaccagtggtccaaaccagccgtctgttcgccgtggataccggcgtccctacaattaccggcgtcgcccgcgtcctcctaacgctccttcacaagatggcaaagaggccaaggcaggtgaagcaccaactgagaaccctgctccacccacccagcagagcagtgctgagtaacaccaggctcctcaggcaccttcaccatcggcaggtgacctaaagaattaatgaccattcagaaataaagcaaaaagcaggccacaaccttaaccaacaccaaagaaacatccaagcaataaagtggaagactaaccaagatttggacattggaatgtttactgttattctttaagaaacaactacaaaaagaaaatgtcaacaaatttttccagcaagctgagaacctgggaattcctgcacggaagacaagagagtagcctctccagtttcagcaaccgctaggtttctattttttttcctggtttttactgttttggtaatatatatattgaaacaagaaatattaataccacatggggagaaccccaaccaaagaaatctgaaatatatagtaaatgcttttttttccgtttttgttcattttggatgctggtgctaaacctccaagtgtcatgatttaaaaaaaaaaaaaatttatgtccttcttatttatttctaggatgaggggaggataacatttttgctttcttatgtgactctctttgaaaatgtgcagtaagaaattcctcaaaaataaaatttttacccttcagagg

SEQ ID NO: 3520 - DNA, 507 bp, Homo sapiens
cagagcctccttcaagatgctgctggtcctgctctcagtggtccttctggctctgagctcagctcagagcacagataatgatgtgaactatgaagactttactttcaccataccagatgtagaggactcaagtcagagaccagatcagggaccccagagacctcctcctgaaggactcctacctagaccccctggtgatagtggtaaccaagatgatggtcctcagcagagaccaccaaaaccaggaggccatcaccgccatcctcccccacctccttttcaaaatcagcaacgaccaccccaacgaggacaccgtcaactctctctaccccgatttccttctgtcagcctgcaggaagcatcatcattcttccggagggacagaccagcaagacatccccaggagcaaccactctggtaatctagaattcagtggcagaaaataaataagaagataacttccttcagaaagccatgacattgaaataatgtggtcataactctttc

SEQ ID NO: 3521 - protein, 134 aa, Homo sapiens
MLLVLLSVVLLALSSAQSTDNDVNYEDFTFTIPDVEDSSQRPDQGPQRPPPEGLLPRPPGDSGNQDDGPQQRPPKPGGHHRHPPPPPFQNQQRPPQRGHRQLSLPRFPSVSLQEASSFFRRDRPARHPQEQPLW

SEQ ID NO: 3522 - DNA, 662 bp, Homo sapiens
gggggggggagcacaaagttgggagtgacaccagagcctcctgcaagatgcttctgattctgctgtcagtggccctgctggccttcagctcagctcaggatttaaatgaagatgtcagccaggaagatgttcccctcgtaatatcagatggaggagactctgagcagttcatagatgaggagcgtcagggaccacctttgggaggacagcaatctcaaccctctgctggtgatgggaaccaggatgatggccctcagcagggaccaccccaacaaggaggccagcagcaacaaggtccaccacctcctcagggaaagccacaaggaccaccccaacagggaggccatccccctcctcctcaaggaaggccacaaggaccaccccaacagggaggccatccccgtcctcctcgaggaaggccacaaggaccaccccaacagggaggccatcagcaaggtcctcccccacctcctcctggaaagccccagggaccacctccccaagggggccgcccacaaggacctccacaggggcagtctcctcagtaatccaggattcaatgacaggaagtgaataagaagataacagtgtttcaaatgccgtgaaacatggcatcatgctctaacttcagtataccaataaaacaatcagcttgcaatttc

SEQ ID NO: 3523 - protein, 166 aa, Homo sapiens
MLLILLSVALLAFSSAQDLNEDVSQEDVPLVISDGGDSEQFIDEERQGPPLGGQQSQPSAGDGNQDDGPQQGPPQQGGQQQQGPPPPQGKPQGPPQQGGHPPPPQGRPQGPPQQGGHPRPPRGRPQGPPQQGGHQQGPPPPPPGKPQGPPPQGGRPQGPPQGQSPQ

SEQ ID NO: 3524 - DNA, 659 bp, Homo sapiens
tgcagggggggggaaaagttgggagtgacaccagagccttctgcaagatgcttctgattctgctgtcagtggccctgctggccttcagctcagctcaggacttagatgaagatgtcagccaagaagacgttcccttggtaatatcagatggaggagactctgagcagttcatagatgaggagcgtcagggaccacctttgggaggacagcaatctcaaccctctgctggtgatgggaaccagaatgatggccctcagcagggaccaccccaacaaggaggccagcagcaacaaggtccaccacctcctcagggaaagccacaaggaccaccccaacagggaggccatccccctcctcctcaaggaaggccacaaggaccaccccaacagggaggccatccccgtcctcctcgaggaaggccacaaggaccaccccaacagggaggccatcagcaaggtcctcccccacctcctcctggaaagccccagggaccacctccccaagggggccgcccacaaggacctccacaggggcagtctcctcagtaatctaggattcaatgacaggaagtgaataagaagatgacagtgtttcaaatgccttgaaacataatgtgatcatgctctaacttcaatataccaataaaataatcagcttgc

SEQ ID NO: 3525 - protein, 166 aa, Homo sapiens
MLLILLSVALLAFSSAQDLDEDVSQEDVPLVISDGGDSEQFIDEERQGPPLGGQQSQPSAGDGNQNDGPQQGPPQQGGQQQQGPPPPQGKPQGPPQQGGHPPPPQGRPQGPPQQGGHPRPPRGRPQGPPQQGGHQQGPPPPPPGKPQGPPPQGGRPQGPPQGQSPQ

SEQ ID NO: 3526 - DNA, 1747 bp, Homo sapiens
cctctagccctccctgcgtttagattcagttgcaccttttattattttaactcttctccttaggacacgcagcccccaatttgtccctccgcctgggcggcccctggtcccgcgcgccagcatgggagagcgagggacctgcccgcggcccgccggcgtgtgcaaggaggtccagccgccgcgcccgctacccggagtctgaggacgggtgtccagggacggagaggcaggtgagagggaggtggctaagctggctatggtgacaggacgatgttggccagaaagagtatcatcccggaggagtatgtgctggcgcgcatcgccgcagagaacctgcgcaagccgcgcatccgagaccgcctccccaaagcccgcttcatcgccaagagcggggcctgcaacctggcgcataagaacatccgtgagcaaggacgctttctacaggacatcttcaccaccttggtggacctgaaatggcgccacacgctggtcatctttaccatgtccttcctctgcagctggctgctcttcgctatcatgtggtggctggtggcctttgcccatggggacatctatgcttacatggagaaaagtggaatggagaaaagtggtttggagtccactgtgtgtgtgactaatgtcaggtctttcacttctgcttttctcttctccattgaagttcaagttaccattgggtttggagggaggatgatgacagaggaatgccctttggccatcacggttttgattctccagaatattgtgggtttgatcatcaatgcagtcatgttaggctgcattttcatgaaaacagctcaggctcacagaagggcagaaactttgattttcagccgccatgctgtgattgccgtccgaaatggcaagctgtgcttcatgttccgagtgggtgacctgaggaaaagcatgatcattagtgcctctgtgcgcatccaggtggtcaagaaaacaactacacctgaaggggaggtggttcctattcaccaactggacattcctgttgataacccaatcgagagcaataacatttttctggtggcccctttgatcatctgccacgtgattgacaagcgcagtcccctgtatgacatctcagcaactgacctggccaaccaagacttggaggtcatagttattctggaaggagtggttgaaactactggcatcaccacacaagcacgaacctcctacattgctgaggagatccaatggggccaccgctttgtgtccattgtgactgaggaagaaggagtgtattctgtggattactccaaatttggcaacactgttaaagtagctgctccacggtgcagtgcccgagagctggatgagaaaccttccatccttattcagaccctccaaaagagtgaactgtctcatcaaaattctctgaggaagcgcaactccatgagaagaaacaattccatgaggaggaacaattctatccgaaggaacaattcttccctcatggtaccaaaggtgcaatttatgactccagaaggaaatcaaaacacatcggaatcatgacagcaagataaccccaagacagtcttttatcaagttttgacggtttatgctgggcactgccagactgaaccagagctggaacacaataatgtgtccttctacattttattacactaaatgatattcatattcaagcaacagcactttctgtagtaataaaaagtaacacaccaagtggaggattcatggcttatgcttgttt

SEQ ID NO: 3527 - protein, 424 aa, Homo sapiens
MLARKSIIPEEYVLARIAAENLRKPRIRDRLPKARFIAKSGACNLAHKNIREQGRFLQDIFTTLVDLKWRHTLVIFTMSFLCSWLLFAIMWWLVAFAHGDIYAYMEKSGMEKSGLESTVCVTNVRSFTSAFLFSIEVQVTIGFGGRMMTEECPLAITVLILQNIVGLIINAVMLGCIFMKTAQAHRRAETLIFSRHAVIAVRNGKLCFMFRVGDLRKSMIISASVRIQVVKKTTTPEGEVVPIHQLDIPVDNPIESNNIFLVAPLIICHVIDKRSPLYDISATDLANQDLEVIVILEGVVETTGITTQARTSYIAEEIQWGHRFVSIVTEEEGVYSVDYSKFGNTVKVAAPRCSARELDEKPSILIQTLQKSELSHQNSLRKRNSMRRNNSMRRNNSIRRNNSSLMVPKVQFMTPEGNQNTSES

SEQ ID NO: 3528 - DNA, 1289 bp, Homo sapiens
gccggaggagacgcacgcagctgactttgtcttctccgcacgactgttacagaggtctccagagccttctctctcctgtgcaaaatggcaactcttaaggaaaaactcattgcaccagttgcggaagaagaggcaacagttccaaacaataagatcactgtagtgggtgttggacaagttggtatggcgtgtgctatcagcattctgggaaagtctctggctgatgaacttgctcttgtggatgttttggaagataagcttaaaggagaaatgatggatctgcagcatgggagcttatttcttcagacacctaaaattgtggcagataaagattattctgtgactgccaattctaagattgtagtggtaactgcaggagtccgtcagcaagaaggggagagtcggctcaatctggtgcagagaaatgttaatgtcttcaaattcattattcctcagatcgtcaagtacagtcctgattgcatcataattgtggtttccaacccagtggacattcttacgtatgttacctggaaactaagtggattacccaaacaccgcgtgattggaagtggatgtaatctggattctgctagatttcgctaccttatggctgaaaaacttggcattcatcccagcagctgccatggatggattttgggggaacatggcgactcaagtgtggctgtgtggagtggtgtgaatgtggcaggtgtttctctccaggaattgaatccagaaatgggaactgacaatgatagtgaaaattggaaggaagtgcataagatggtggttgaaagtgcctatgaagtcatcaagctaaaaggatataccaactgggctattggattaagtgtggctgatcttattgaatccatgttgaaaaatctatccaggattcatcccgtgtcaacaatggtaaaggggatgtatggcattgagaatgaagtcttcctgagccttccatgtatcctcaatgcccggggattaaccagcgttatcaaccagaagctaaaggatgatgaggttgctcagctcaagaaaagtgcagataccctgtgggacatccagaaggacctaaaagacctgtgactagtgagctctaggctgtagaaatttaaaaactacaatgtgattaactcgagcctttagttttcatccatgtacatggatcacagtttgctttgatcttcttcaatatgtgaatttgggctcacagaatcaaagcctatgcttggtttaatgcttgcaatctgagctcttgaacaaataaaattaactattgtagtgtg

SEQ ID NO: 3529 - DNA, 2874 bp, Homo sapiens
attcagtaaaccactgggagtccggcagcatggaggcagcgcgccctcccccgacggcagggaagttcgtggtggtcggcggcggcatcgcgggcgtcacttgtgcggagcagttggctactcactttccatcggaagatattctcttggtaacagcttctcctgttattaaagcagttacaaatttcaagcagatttctaaaatattggaagaattcgatgttgaagaacaatcaagtaccatgttaggaaaacgctttcccaacattaaggttatagaatctggcgtaaagcaactgaagagtgaagaacactgcattgtaacagaagatggcaatcagcacgtatataagaaactctgtctgtgtgctggagctaaaccaaagttgatatgtgaaggaaatccttatgtattaggaatccgtgatacagacagtgctcaggaatttcagaaacagcttactaaagctaaaagaataatgatcatagggaacggtggtattgcacttgagttagtgtatgaaattgaaggctgtgaagtgatttgggccattaaagataaagctatagggaatactttcttcgatgcaggagcagctgaattcttgacttcaaagctcattgctgaaaaatcagaggctaaaattgcacataaaagaaccagatatacaactgaaggaaggaaaaaggaagctagaagcaaatctaaagcagataatgtaggaagtgcattgggaccagattggcatgaaggcttgaatcttaaaggaacaaaagagttttctcataagattcaccttgaaactatgtgtgaagtaaagaaaatctaccttcaggatgagtttagaattttgaagaaaaagtccttcacttttccaagagaccataagtcagttacagctgatacagagatgtggcctgtctatgtggaattgaccaatgaaaagatatatggctgcgatttcattgtcagtgctacaggagttacaccaaatgtagaaccttttctccatggtaacagttttgatctaggagaagatggtggcctgaaagtggatgatcatatgcacacatcccttcctgatatctatgctgccggtgacatctgtactacatcctggcagctgagcccagtctggcagcagatgaggctgtggacccaggctagacagatgggatggtatgcagcaaagtgcatggctgcagcgagttcaggagactctattgacatggatttcagctttgaactgtttgctcatgtgacaaaattttttaactataaggttgtactgctgggaaaatacaatgcacagggcttaggttcagatcatgaattaatgctgagatgtaccaaaggacgaggaatacatcaaagtcgtcatgcaaaatggacgaatgatgggagctgtcttaattggtgaaaccgatttagaagaaacatttgaaaacctaatcttaaaccaaatgaatctttcatcatatggagaagatctgctagatccaaatattgatatagaagattattttgactaaaaatggaatttcttcaggaatcatataaagttccaaatgacaccagaaaaatcacaagtcaataaaatgaatgactgtattgagttaatgatgaccacactgaaaattacagaagtgataatgatattcgtggaaaaatataaaaacataaattctaagtttgaaatcagttcaaagtttatttatagatatatctttccaacacaacactgaccgcttagataaaaatcttaagttatttatttctgtgttttaaacataaatatgtttacttgtgatttagctttggagcaaatttaggtaagttatctacttagccaaatgtactctagtagactagaaccattctttgtgaaatgtcaaaatatggctatggtttcaggaactttaaaatcggttgtattttactttaaatagagatgtagcaatatctcgtttgctaatatttatattgatgacttactccttttttgttgaattgtacttctggttttataacctgaaatcatctacaagcttgtccaactctagcccacgggtctaatgcagcccagaacagctttgaatgcagcccaacacaaatctgtaaactttcttaaaacatgagatttttcttgcaatttttttttttttaagctcatcagctatcgtcagtgttagcatattttatgtgcggcccaagacaattcttcttccaatgtggctcagggaagccaaaagattggacatccctgatctacatatttaacttaaagtatcactcagtgaacctctgtcagtataatattgctttcaaaaagatggttatgtcaaaagaaaaaatatagctaagtatataaaggcataaaaaacttaagacaattacatgaacttattctcaaatattttacattttttgtaaactttcttaaaacatgagatttttcttgcaattttttttttaagctcatcagctatcatcagtgttagcatattttatgtgcggcccaagacaattcttcttccaatgtggctcagggaagccaaaagattggacatccttgatctacatatttaacttaaagtatcactcagtgaaattcttttaaaaactattgtctaactacaaaaataatggcatatacatgcataaaccatctttaattagaaaatttagtaacagtcatatcaggcatcatcgatttttcttttcttagctcctgtattcttagaaccagattgctgaagcatgtttgcagccttcttctggaagttgcctgaatttttttcctccatctttttatcaccttgttcagaatgacaagtttgagacgattcagcctacaaaaaaaaaaaaaaaaa

SEQ ID NO: 3530 - protein, 463 aa, Homo sapiens
MEAARPPPTAGKFVVVGGGIAGVTCAEQLATHFPSEDILLVTASPVIKAVTNFKQISKILEEFDVEEQSSTMLGKRFPNIKVIESGVKQLKSEEHCIVTEDGNQHVYKKLCLCAGAKPKLICEGNPYVLGIRDTDSAQEFQKQLTKAKRIMIIGNGGIALELVYEIEGCEVIWAIKDKAIGNTFFDAGAAEFLTSKLIAEKSEAKIAHKRTRYTTEGRKKEARSKSKADNVGSALGPDWHEGLNLKGTKEFSHKIHLETMCEVKKIYLQDEFRILKKKSFTFPRDHKSVTADTEMWPVYVELTNEKIYGCDFIVSATGVTPNVEPFLHGNSFDLGEDGGLKVDDHMHTSLPDIYAAGDICTTSWQLSPVWQQMRLWTQARQMGWYAAKCMAAASSGDSIDMDFSFELFAHVTKFFNYKVVLLGKYNAQGLGSDHELMLRCTKGRGIHQSRHAKWTNDGSCLNW

SEQ ID NO: 3531 - DNA, 701 bp, Homo sapiens
actggctgctctgaaaagccatctttgcattgtgcctcgtcagcctccttgctcgccgcagccgcctccgccgcgcgcctcctccgccgccgcggactccggcagctttatcgccagagtccctgaactctcgctttcttttttatcccctgcatcgcgtcaccggcgtgccccaccatgtcagacgcagccgtagacaccagctccgaaatcaccaccgaggacttaaaggagaagaaggaagttgtggaagaggcggaaaatggaagagacgcccctgctaacaggaatgctaatgaggaaaatggggagccggaggctgacaacgaggtagatgaagaagaggaagaaggtggggaggaagaggaggaggaagaaggtgatggtgaggaagaggacggagatgaagatgagggagctgagtcagctacgggcaagcgggcagctgaagatgatgaggatgacacgcgctctccaccacccaacccaaaccatgagaatttgcaacaggggagggaaaaagaaccaaaacttccaaggccctgctttttttttcttaaaagtactttaaaaaggaaacttgtattttttatttacattttatatttttgtacatattgttagggtcggccatttttaatgatctcggatgaccaaaccagccttcggagcgttctctgtcctacttctcactttacttg

SEQ ID NO: 3532 - DNA, 1184 bp, Homo sapiens
actggctgctctgaaaagccatctttgcattgtgcctcgtcagcctccttgctcgccgcagccgcctccgccgcgcgcctcctccgccgccgcggactccggcagctttatcgccagagtccctgaactctcgctttcttttttatcccctgcatcgcgtcaccggcgtgccccaccatgtcagacgcagccgtagacaccagctccgaaatcaccaccgaggacttaaaggagaagaaggaagttgtggaagaggcggaaaatggaagagacgcccctgctaacaggaatgctaatgaggaaaatggggagccggaggctgacaacgaggtagatgaagaagaggaagaaggtggggaggaagaggaggaggaagaaggtgatggtgaggaagaggacggagatgaagatgagggagctgagtcagctacgggcaagcgggcagctgaagatgatgaggatgacgatgtcgatacccagaagcagaagaccgacgaggatgaccagacagcaaaaaaggaaaagttaaactaaaaaaaaaaggccgccgtgacctattcgccctccacttcccgtctcagaatctaaacgtggtcaccttcgagtagaggggcccgcccgcccaccgtgggcagtgccacccgcagatgacacgcgctctccaccacccaacccaaaccatgagaatttgcaacaggggagggaaaaagaaccaaaacttccaaggccctgctttttttttcttaaaagtactttaaaaaggaaacttgtattttttatttacattttatatttttgtacatattgttagggtcggccatttttaatgatctcggatgaccaaaccagccttcggagcgttctctgtcctacttctcactttacttgtggtgtggccatgttcattataatctcaaaggagaaaaaaaaacttgtaaaaaatgcaaaaatgacaacagaaaaaccatcttattccgagcattccagtaacttttttgtgtatgtacttagctgtactataagtagttggtttgtatgagatggttaaaaaggccaaagataaaaggtttcttttttttccttgtctgtgaagttgctgtttatttttttttggcctgtttgatgtatgtgtgaaacaatgttgtccaacaataaacaggaattttattttgctgagctgttct

SEQ ID NO: 3533 - DNA, 4875 bp, Homo sapiens
agtagggaggtgggcaggagccagtgatgacggaatggcaatcacatttgacctctgatctgtttatttcctcctccttgacgtctccatataaatgttacacgggcatccccacactcggatacgcacccacagtggctgattcgggggtaaccgtgtcatttgcttgcaacactggcacctctgccctgcaccccgggagtgagcagtgagtgaggctcgggtctgggcgctggctccgaatcttcgggctgggagagactccaccatctgggggcggcctgggggagcagccttagtgtcttcctgctgatgcaatccgctaggtcgcgagtctccgccgcgagagggccggtctgcaatccagcccgccacgtgtactcgccgccgcctcgggcactgccccaggtcttgctgcagccgggaccgcgctctgcagccgcagacccggtccacacggccaggggctacgacccttgggatctgccctccgctcagctcgagcttccctcgtggccgacggaacaatgaaggattgcagtaacggatgctccgcagagtgtaccggagaaggaggatcaaaagaggtggtggggacttttaaggctaaagacctaatagtcacaccagctaccattttaaaggaaaaaccagaccccaataatctggtttttggaactgtgttcacggatcatatgctgacggtggagtggtcctcagagtttggatgggagaaacctcatatcaagcctcttcagaacctgtcattgcaccctggctcatcagctttgcactatgcagtggaattatttgaaggattgaaggcatttcgaggagtagataataaaattcgactgtttcagccaaacctcaacatggatagaatgtatcgctctgctgtgagggcaactctgccggtatttgacaaagaagagctcttagagtgtattcaacagcttgtgaaattggatcaagaatgggtcccatattcaacatctgctagtctgtatattcgtcctacattcattggaactgagccttctcttggagtcaagaagcctaccaaagccctgctctttgtactcttgagcccagtgggaccttatttttcaagtggaacctttaatccagtgtccctgtgggccaatcccaagtatgtaagagcctggaaaggtggaactggggactgcaagatgggagggaattacggctcatctctttttgcccaatgtgaagcagtagataatgggtgtcagcaggtcctgtggctctatggagaggaccatcagatcactgaagtgggaactatgaatctttttctttactggataaatgaagatggagaagaagaactggcaactcctccactagatggcatcattcttccaggagtgacaaggcggtgcattctggacctggcacatcagtggggtgaatttaaggtgtcagagagatacctcaccatggatgacttgacaacagccctggaggggaacagagtgagagagatgtttggctctggtacagcctgtgttgtttgcccagtttctgatatactgtacaaaggcgagacaatacacattccaactatggagaatggtcctaagctggcaagccgcatcttgagcaaattaactgatatccagtatggaagagaagagagcgactggacaattgtgctatcctgaatggaaaatagaggatacaatggaaaatagaggataccaactgtatgctactgggacagactgttgcatttgaattgtgatagatttctttggctacctgtgcataatgtagtttgtagtatcaatgtgttacaagagtgattgtttcttcatgccagagaaaatgaattgcaatcatcaaatggtgtttcataacttggtagtagtaacttaccttaccttacctagaaaaacattaatgtaagccatataacatgggattttcctcaatgattttagtgcctccttttgtacttcactcagatactaaatagtagtttattctttaatataagttacattctgctcctcaaacaaatgcaattttttgtgtgtgtttgaaagctaatttgagaaaatttcataggttacatttcctgcagcctatctttatccacagaaagtgttttcttttttttaaatcaagacttttaaaactggatttcctcccatcactgttttttgaaggtcctccaagtccgtgttaaggtaaatatctgttttcttcctgatgtcacagcctgagcatactctgtgcattaggaagacctgagtgcatttcccaccattgtcctttccacattatgttgtagctggctggctgtcaggcgactacaagactgagggtcttgtgccttatagatctttgtatcccccatggctgacatatagtaggtactcagtaaatggttttataatgaatcagtgaacattttgcttctatagaagtgtaccttctttgtttctatattatgaaacctctttattagaatttgtgattgattctgacagtgtatagatttaccttatattgtctttattttccatgagctactaagtcattagagatactctgaagcatagttagtttaggaaatcacttcatattgattgtattagaattatcttggaattgaagatatatccctagagcaggggaccccaacccccaggccatgggccacacagcaggaagaggtgagtggtgggccattgaggagcttcatctgtatttatggctacttcccatcactcgaattaccacctgaactccacctcttgtcagctcagtggcagcattagattctcataggagcacaaatcctattgtgaactctgcatgcaagggatctaggctatgcgctccttatgagaatctaatgcttgatgacctgaggtgtaacagtttcatcctgaaaccacccttcaccctgcagtctgtggaaaaattgtcttccacaaaactggtccctggtgccaaaaatgttggggaccactgctctagagagaggtcatgatatcataccaaccaaatggaaatgacaaatgttttatgtcaagtgttaattgcagaaataaatcttttttttttttttttggtagaaaacaaagaggcatactctgatttttatactctgtttttgcaggtgctcttttctttgaatggagatttgatgagcaagtggttaggatgcagggagagctactatgggtgatattttccttgtttaggagctgtgagttaaaattgtatcctttgtggtttatctaaggaaagtcaaatcttgacagaaaacatttttccttggaaggtcaactctcagacattgtattttggtttccctcagtcctcataacttccttcttgctgaacatattttattctcttttcagagaaggaaaataaaaaggattctaaaagtttgatgcattggaaaaatttccttgaggcatttagcaacacatagaaaatgggctttgattcttttccaaaacttttagccatagggtcttttatagacagggatagtaaaatgaaaattgagaaatataagatgaaaaggaatgataaaaatatcttttagggggcttttaattggtgatctgaaatcttgggagaagctgttcttttcaggcctgaggtgctcttgactgtcgcctgcgcactgtgtaccccgagcaacattctaagggtgtgctttcgccttggctaactcctttgacctcattcttcatatagtagtctaggaaaaagttgcaggtaatttaaactgtctagtggtacatagtaactaaatttctattcctatgagaaatgagaattatttatttgccatcaacacattttatactttgcatctccaaatttattgtggcgagacttgtccattgtgaaagttagagaacattatgtttgtatcatttctttcataaaacctcaagagcatttttaagcccttttcatcagacccagtgaaaactaaggatagatgtttaaaaactggaggtctcctgataaggagaacacaatccaccattgtcatttaagtaataagacaggaaattgaccttgacgctttcttgttaaatagatttaacaggaacatctgcacatcttttttccttgtgcactatttgtttaattgcagtggattaatacagcaagagtgccacattataactaggcaattatccattcttcaagacttagttattgtcacactaattgatcgtttaaggcataagatggtctagcattaggaacatgtgaagctaatctgctcaaaaagatcaacaaattaatattgttgctgatatttgcataattggctgcaattatttaatgtttaattgggttgatcaaatgagattcagcaattcacaagtgcattaatataaacagaactggtggcacttaaaatgataatgattaacttatattgcatgttctcttcctttcacttttttcagtttctacatttcagaccgagcttgtcagcttttttgaaaacacatcagtagaaaccaagattttaaaatgaagtgtcaagacaaaggcaaaacctgagcagttcctaaaaagatttgctgttagaaattttctttgtggcagtcatttattaaggattcaactcgtgatacaccaaaagaagagttgacttcagagatgtgttccatgctctctagcacaggaatgaataaatttataacacctgctttagcctttgttttcaaaagcacaaaggaaaagtgaaagggaaagagaaacaagtgactgagaagtcttgttaaggaatcaggttttttctacctggtaaacattctctattcttttctcaaaagattgctgtaagaaaaaatgtaagac

SEQ ID NO: 3534 - protein, 386 aa, Homo sapiens
MKDCSNGCSAECTGEGGSKEVVGTFKAKDLIVTPATILKEKPDPNNLVFGTVFTDHMLTVEWSSEFGWEKPHIKPLQNLSLHPGSSALHYAVELFEGLKAFRGVDNKIRLFQPNLNMDRMYRSAVRATLPVFDKEELLECIQQLVKLDQEWVPYSTSASLYIRPTFIGTEPSLGVKKPTKALLFVLLSPVGPYFSSGTFNPVSLWANPKYVRAWKGGTGDCKMGGNYGSSLFAQCEAVDNGCQQVLWLYGEDHQITEVGTMNLFLYWINEDGEEELATPPLDGIILPGVTRRCILDLAHQWGEFKVSERYLTMDDLTTALEGNRVREMFGSGTACVVCPVSDILYKGETIHIPTMENGPKLASRILSKLTDIQYGREESDWTIVLS

SEQ ID NO: 3535 - DNA, 2321 bp, Homo sapiens
aacacattttcagttttgcctgcatcataagagtgagcactccattgctttctttcctggccacactgctacaatccagcactaactatccatgtccagggtaaggatcgagatcgagaagcccacactgccagtgaaaaagctacgtctttactgcataaattagaggaagcaatttcggaacaacggaaccttcaaactataaatactgaattatcgaacacttgccaggcacttcagcagaagacaaggaaactgaagaagctttttagatgaggaatttcctcactatgattccctgtcctgcgcagatgcaattcaacaacctcttcaagaaaaattgaagcagtgttgccacaaactatatggtggtcaagaagcaagaatacatcagacacccctgaccttgaaacatacgtgctggtacacacctctgctggatgccttatctctggatagttttacagcagttccaaccctggaatcaacacctttctcaggtgtagccaaccaaatccacactctgtgtgaaaggcccacatatggagaagtaaaggatggtgctttggatgtaaaaagacaacacaagtgcccaggccccacaagtggccccagcccaggaacgaatctctcaggctgcatcaggatgaatgatgacccaagtatggaagagaatggtgttgaacgcgtgtgtcctgagagcctgctgcagtccagggaatattcctcactaccattacccagacacacttcatcgacagacggtactataacttcaagtgatcctggattagaaattctgaatatggcttcttgtgaccttgacagaaactcgctctgtaagaaagaggaggatacaagatcagcttctcccacgatagaggcccaaggcacaagtccagctcatgataatattgcattccaagactctacgagtaaggataaaaccatattaaatctggaagccaaagaggaaccagaaacaatagaagaacataaaaaagaacatgcttcaggagactctgtggtttcccctcttcctgtaaccactgtgaaatcggttaaccttagacaaagtgagaacacttctgctaatgagaaggaggtggaggcagaatttctcagattatctttgggatttaagtgtgactggtttaccttggagaagagagtgaagcttgaagagaggtcccgtgacttggcagaagaaaatttgaagaaagaaatcactaactgtttaaaactattagagtctttaacacctctgtgtgaagatgacaaccaggcacaggaaatcattaagaagctggagaagagtataaagtttcttagccagtgtgcagcacgagtggccagtagggctgagatgttgggagccatcaatcaggaaagccgggttagtaaagcagttgaagtgatgattcagcacgtagaaaacttgaagaggatgtatgccaaagagcacgctgaattagaagaactgaaacaggttcttctgcagaatgaaaggtctttcaatcctcttgaagatgatgatgactgccaaattaaaaaacgttcagcttctctaaactccaagccatcttctctacgaagagtgactattgcctctttacccagaaatattggaaatgcaggaatggtggctgggatggaaaataatgatcgattcagtagaaggtcaagcagttggcgtattttggggtcaaagcagagtgaacaccgtccctcattacctcgatttattagcacctattcctgggcagatgctgaagaagaaaaatgtgaactaaaaactaaagatgactcagagccatctggagaagaaacagtagaaaggacaaggaagccaagtctttctgaaaagaaaaataatccatcaaagtgggatgtctcttcagtttatgacacaatagcttcctgggcaacaaatctcaagtcctccatcagaaaggctaataaggccctctggctctctattgcattcattgtactgtttgcagctttgatgagcttcctcacaggccaattattccagaagtctgtggatgccgctcccacacagcaagaggactcatggacgtctctagaacatatcttgtggccatttaccagactccgacacaatgggccaccaccagtgtgacagcaggacatcctaatatatggatcttgatttttaagtttcagtatctgaacttcgtaaattagtaacttttagctgggaaagtatagcatgaaaccagaggttctcagaatgactgtaagatagcttacatttcctctttttgcctttatctccccaactaaaatacaatggg

SEQ ID NO: 3536 - DNA, 2525 bp, Homo sapiens
ccagccctggcgtgggcccagcccggcccaggcagcaatggggttcctgcagctgctggtcgtagcggtgctggcatccgaacaccgggtggctggtgcagccgaggtcttcgggaattccagcgagggtcttattgaattttctgtggggaaatttagatacttcgagctcaataggccctttccagaggaagctattttgcatgatatttcaagcaatgtgacttttcttattttccaaatacactcacagtatcagaatacaactgtttccttttctccgactctcctttccaattcctcggaaacaggcactgccagtggactggttttcatccttagaccagagcagagtacatgcacttggtacttggggacttcaggcatacagcctgtccagaatatggctatcctactctcctactcagaaagagatcctgtccctggaggctgtaatttggagttcgatttagatattgatccccacattacttgggagtataattcctttgaaacgactatcaagtttgccccagcaaacctaggctatgcgagaggcgtagatcccccaccatgtgacgctgggacagaccaggactccaggtggaggttgcagtatgatgtctatcagtattttctgcctgagaatgacctcactgaggagatgttgctgaagcatctgcagaggatggtcagtgtgccccaggtgaaggccagtgctctcaaggtggttaccctaacagctaatgataagacaagtgtttccttctcctccctcccgggacaaggtgtcatatacaatgtcattgtttgggacccgtttctaaatacatctgctgcctacattcctgctcacacatacgcttgcagctttgaggcaggagagggtagttgtgcttccctaggaagagtgtcttccaaagtgttcttcactctttttgccctgcttggtttcttcatttgtttctttggacacagattctggaaaacagaattattcttcataggctttatcatcatgggattcttcttttatatactgattacaagactgacacctatcaagtatgatgtgaatctgattctgacagctgtcactggaagcgtcggtggaatgttcttggtagctgtgtggtggcgatttggaatcctctcgatctgcatgctctgtgttggactagtgctggggttcctcatctcgtcagtgactttctttactccactgggaaacctaaagatttttcatgatgatggtgtattctgggtcactttctcttgcatagctatcctcattccagtagttttcatgggctgcctaagaatactgaacatactgacttgtggagtcattggctcctattcggtggttttagccattgacagttactggtccacaagcctttcctacatcactttgaacgtactcaagagagcgctcaacaaggatttccacagagctttcacaaatgtgccttttcaaactaatgacttcattatcctggcagtatggggcatgctggctgtaagtggaattacgttacagattcgaagagagagaggacgaccgttcttccctccccacccatacaagttatggaagcaagagagagagcgccgagtgacaaacattctggaccctagctaccacattcctccattgagagagaggctctatggccgattaacccagattaaagggctcttccagaaggagcagccagctggagagagaacgcctttgcttctgtagatgcccaggggcttggtcagtgtgcctcagctttggagttcatgcctggagtggttcaacagtctctggtgcaagtctaataagagatcaggcatatatatctgttctttgcataatattatggtgcccttattgatatatggtaagggtgtactaggggattaggatgattgtaagagaatgagaaagatgaccaaaaggttggtggtagggaggctttttcttatttccaaatacttgagaaattaccttttggtttacaaatctatgatcaacttattccattaaatagatacattaaaaaaattaaaaactgattcttctgcagagcactggtgtttctttttataaccccttgaaacaagtctctcacctgagcctgtctaaactttcggagggagtttattattgagtctttatctgtgacagtatttggagatttagggatttgatacttaggcctttgaattttagaatacaaaaagagaagcaagccagacatggtggctcacacctgtaatcccaatactgggaagccaaggtgggagtatcgcttgagcccaggagtttgagaccgacatgggcaacatgacaagaccccatctctacaaaaaaattaaaaaattagccaggcatggtggcacatgcctactcccagctcccaaggagactgagatgggaggatccctggagccctgaagattgaggctacagtgagccttgattgtgtcactgcactccagcttgggtgacagagaccctgtctcgagaaatt

SEQ ID NO: 3537 - protein, 570 aa, Homo sapiens
MGFLQLLVVAVLASEHRVAGAAEVFGNSSEGLIEFSVGKFRYFELNRPFPEEAILHDISSNVTFLIFQIHSQYQNTTVSFSPTLLSNSSETGTASGLVFILRPEQSTCTWYLGTSGIQPVQNMAILLSYSERDPVPGGCNLEFDLDIDPNIYLEYNFFETTIKFAPANLGYARGVDPPPCDAGTDQDSRWRLQYDVYQYFLPENDLTEEMLLKHLQRMVSVPQVKASALKVVTLTANDKTSVSFSSLPGQGVIYNVIVWDPFLNTSAAYIPAHTYACSFEAGEGSCASLGRVSSKVFFTLFALLGFFICFFGHRFWKTELFFIGFIIMGFFFYILITRLTPIKYDVNLILTAVTGSVGGMFLVAVWWRFGILSICMLCVGLVLGFLISSVTFFTPLGNLKIFHDDGVFWVTFSCIAILIPVVFMGCLRILNILTCGVIGSYSVVLAIDSYWSTSLSYITLNVLKRALNKDFHRAFTNVPFQTNDFIILAVWGMLAVSGITLQIRRERGRPFFPPHPYKLWKQERERRVTNILDPSYHIPPLRERLYGRLTQIKGLFQKEQPAGERTPLLL

SEQ ID NO: 3538 - DNA, 3068 bp, Homo sapiens
agactatctttctagacaaggcagttgaggaggagggagcgcttgagggggactggcctggcgtgcactccgcacctcggggacattattgcgcgtggaacggctgcttttggaaggcacaacttcctgaatggaccatgactcccaccaaagatccctgtctctgattcaccaaacagcttcaaccctgaaaccaggacgagaagttgacaacatctgagtggacagctaattgacctaagacttcagaccagactattgcccagaagaaaagatgtttggttttcacaagccaaagatgtaccgaagtatagagggctgctgtatttgcagagctaagtcctccagttctcgattcactgacagtaaacgctatgaaaaggacttccagagctgttttggattgcatgagactcgttcaggagacatctgcaatgcctgtgtcctgcttgtgaaaagatggaagaagttgccagcaggatcaaaaaaaaactggaatcatgtggtagatgcaagggctggacccagtctaaagactacattgaaaccaaagaaagtgaaaactctatctgggaacaggataaaaagcaaccagatcagtaaactgcagaaggaatttaaacgtcataattctgatgctcacagtaccacctcaagtgcctccccagctcaatctccttgttacagtaaccagtcagatgacggctcagatacagagatggcttctggttctaacagaacaccagttttttcctttttagatctcacttactggaaaagacagaagatatgttgtgggatcatctataaaggccgttttggggaagtcctcattgacacacatctcttcaagccttgctgcagcaataagaaagcagctgctgagaagccagaggagcaggggccagagcctctgcccatctccactcaggagtggtgactgaggtttttatgtagaaggggaacaaaaaaaaaaatatctgaattttgaaaaaccacaaagctacaaactgaccctcttttttttttgagacggagttttgctcttgttacccaggctggagtgcagtggcgtgatcttggctcactgcaacttccgtctcccgggttcaagtgattctcctgcctcagcctcccaagtagctgggtttataggtgcccgccaccagacccggctaattttttagttttagtagagacggggtttcaccacgttggccaggctggtcttaaatgaccctcttatttttaacttggatacctgctattctgccaaaagacaatttctagagtagttttgaatgggttgatttcccccactcccacaaactctgaagccagtgtctagcttactaaaaaaagagttgtatataatatttaagatgctgagtatttcataggaaagctgaatgctgctgtaaagtgctctttaagtcttttttttttttaatccccttctaatgaatgaaactaggggaatttcaggggacagagatgggatttgttgtatgataaactgtatgtagtttttagtctttctgttttgagaagcagtggttggggcatttttaagatggctggctactcttgttttccctcatgataataaatttgtcataactcagtaacatgaacttgcccctagaggtagttgttaataattttgaaatattaaggtcttgccaagcttctgatgattcacacctgtactactgattattaagcaggacagactgagctttctgttgcaaataccttggaggagaaagtaatttctaaatatacagagaggtaacttgactatatatgttgcatcctgtgcctcccttcatattaatatttgataaagattttaatttatgtaaaacttctaaagcagaatcaaagctcctcttggggaaatggcaagtctttaggataggcaagaccctgtatgaatagtaccaaagcattaccgcatggtagagaacacactcgattaaaaatgttaagctatctgaaaaataaaatgtgcaagtcttcaggatggcacaaaacaaaggttaatgcttcttggggcacatttcttagagggcttgctgagtgtgtaaatataatcgacttttgtttgtgttacatgacttctgtgacttcattgaaaatctgcacaattcagtttcagctctggattacttcagttgacctttgtgaaggtttttatctgtgtagaatgggtgtttgacttgttttagcctattaaatttttattttctttcactctgtattaaaagtaaaacttactaaaagaaaagaggtttgtgttcacattaaatggttttggtttggcttcttttagtcaggctttctgaacattgagatatcctgaacttagagctcttcaatcctaagattttcatgaaaagcctctcacttgaacccaaaccagagtactcttactgcctcttttctaaatgttcaggaaaagcattgccagttcagtcttttcaaaatgagggagaaacatttgcctgccttgtaataacaagactcagtgcttattttttaaactgcattttaaaaattggatagtataataacaataaggagtaagccaccttttataggcaccctgtagttttatagttcttaatctaaacattttatatttccttcttttggaaaaaacctacatgctacaagccaccatatgcacagactatacagtgagttgagttggctctcccacagtctttgaggtgaattacaaaagtccagccattatcatcctcctgagttatttgaaatgattttttttgtacattttggctgcagtattggtggtagaatatactataatatggatcatctctacttctgtatttatttatttattactagacctcaaccacagtcttctttttccccttccacctctctttgcctgtaggatgtactgtatgtagtcatgcactttgtattaatatattagaaatctacagatctgttttgtactttttatactgttggatacttataatcaaaacttttactagggtattgaataaatctagtcttactagaaaataaaa

SEQ ID NO: 3539 - DNA, 659 bp, Homo sapiens
ctttcccaagcggctggcgaagacggcagaggtgcaggtcctggtgcttgatggtcgaggccatctcctgggccgcctggcggccatcgtggtaaacaggtactgctgggccggaaggtggtggtcgtacgctgcgaaggcatcaacatttctggcaatttctacagaaacaagttgaagtacctcgctttcctccgcaagcggatgaacaccaactcttaccgaggctcctaccacttccgggcccccagccgcatcttctggcggaccgtgcgaggtatgctgccccacaagaccaagcgaggccaggccgctctggaccgcctcaaggtgtttgatggcatcccaccgccctacgacaagaaaaagcggatggtggttcctgttgccctcaaggttgtgcgtctgaagcctacaagaaagtttgcctatctggggcgcctggctcacgagtttggctggaagtaccaggcagggacagccaccctggaggagaagaggaaagagaaagccaagatccactacgggaagaagaaacagctcatgaggctacggaaacaggccgagaagaacgtggagaagaaaattgacaaatacacagaggtcctcaagacccacggcctcctgatctgagcccaataaagactgttaattcctca

SEQ ID NO: 3540 - DNA, 3887 bp, Homo sapiens
ctgaggggacccgccagtttctaactcagtggcgtttgccctgattcccggggcctggctttcagcgtagcaattctgccggcgaagaaggtgagcgcagtgctgtgtggcagcagagctccttaggacgaggagcagcgggacgaggaagggcagactggtgaaatcgcaaactgggcgtctgttccggcgccggacccctatttgcaaaggtccatggctaatgaaacacagaaggttggtgccatccattttccttttcccttcacaccctattccatccaggaagacttcatggcagagctgtaccgggttttggaggctggcaagattgggatatttgagagtccaactggcactgggaagtccttaagtcttatttgtggggccctctcttggctccgtgactttgaacagaagaagcgtgaagaagaggcacgactccttgaaactggaactggccccttacatgatgagaaagatgaatccctgtgtctgtcttcttcctgcgaaggggctgcaggcaccccgaggcctgctggagaaccggcctgggttactcagtttgtgcagaagaaagaagagagggacctggtggaccgactaaaggcggagcaggccaggaggaagcagcgagaagaacgcctgcagcagctgcagcacagggtgcagctcaagtatgcagccaagcgcctgaggcaggaagaagaagaaagagagaatctcctccgcctcagcagggagatgctagagacaggcccggaggctgagcggctggagcagctggagtctggggaggaggagctggtcctcgccgaatacgagagtgatgaggagaaaaaggtggcgagcagagtggatgaggatgaggatgacctggaggaagaacacataactaagatttattactgtagtcggacacactcccagctggcccagtttgtgcatgaggtgaagaagagcccctttggcaaggatgttcggctggtctcccttggctcccggcagaacctttgtgtaaatgaagacgtgaaaagcctaggttctgtgcagcttatcaacgaccgctgtgtggacatgcagagaagcaggcacgagaagaagaaaggagctgaggaggagaagccaaagaggaggaggcaggagaagcaggcagcctgccccttctacaaccacgagcagatgggccttctccgggatgaggccctggcagaggtgaaggacatggagcagctgctggcccttgggaaggaggcccgggcctgtccctattacgggagccgccttgccatccctgcagcccagctggtggtgctgccctatcagatgctgctgcatgcggccactcggcaggccgcgggcatccggctgcaggaccaggtggtgatcatcgacgaggcgcacaacctgatcgacaccatcacgggcatgcacagcgtggaggtcagcggctcccagctctgccaggcccattcccagctgctgcagtacgtggagcgatacgggaagcgtttgaaggccaagaacctgatgtacctgaagcagatcctgtatttgctggagaaattcgtggctgtgctaggggggaacattaagcaaaatcccaatacacagagtctgtcacagacagggacggagctgaagaccatcaacgactttctcttccagagccagatcgacaacatcaacctgttcaaggtgcagcgatactgtgagaagagcatgatcagcagaaagctctttggattcactgaacggtacggagcagtgttctcatcccgggagcagcccaaactggctgggtttcagcaattcctgcagagcctgcagcccaggacgactgaagctcttgcagcccctgcagacgagagtcaggccagcaccctgcgaccagcttctccactgatgcacatccaaggcttcctggcagctctcactacggccaaccaggacggcagggtcatcctgagccgccaaggcagcctcagtcagagcaccctgaagtttttgctcctgaatccagctgtgcactttgcccaagtggtgaaggaatgccgggcagtggtcattgcggggggtaccatgcagccggtgtctgacttccggcagcagctgctggcctgtgccggggtggaagctgagcgcgtggtggagttttcctgtggtcacgtgatccctccagacaacatcctgcccctcgtcatctgcagcgggatctccaaccagccgctggaattcacgttccagaaaagagagctgcctcagatgatggacgaggtgggtcgcattctctgtaacctgtgcggtgtggttcctggaggggtggtctgtttcttcccctcctacgagtacctgcgccaggtccatgcccactgggagaagggtggcctgctgggccgtctggctgccaggaagaagatattccaggaacctaagagcgcacaccaggtggagcaggtgctgctggcatattccaggtgcatccaggcctgtggccaggagagaggccaggtgacaggggccctgctcctctctgtggttggaggaaagatgagtgaagggatcaacttctctgacaacctaggccggtgtgtggtgatggtgggcatgcccttccccaacatcaggtctgcagagctgcaggagaagatggcctacttggatcaaaccctcagcccccggccaggcacccccagggaaggctctggtggagaacctgtgcatgaaggccgtcaaccagtccataggcagggccatcaggcaccagaaggattttgccagcgtagtgctcctggaccagcgatatgcccggccccctgtcctggccaagctgccggcctggatccgagcccgtgtggaggtcaaagctacctttggccccgccattgctgctgtgcagaagtttcaccgggagaagtcggcctcttcctgatgggcaaccacaccactgcctggcgccgtgcccttcctttgtcctgcccgctggagacagtgtttgtcgtgggcgtggtctgcggggatcctgttacaaaggtgaaacccaggaggagagtgtggagtccagagtgctgccaggacccaggcacaggcgttagctcccgtaggagaaaatgggggaatcctgaatgaacagtgggtcctggctgtccttggggcgttccagggcagctcccctcctggaatagaatctttctttccatcctgcatggctgagagccaggcttccttcctggtctccgcaggaggctgtggcagctgtggcatccactgtggcatctccgtcctgcccaccttcttaagaggcgagatggagcaggcccatctgcctctgccctttctagccaaggttatagctgccctggactgctcactctctggtctcaatttaaaatgatccatggccacagggctcctgcccaggggcttgtcaccttcccctcctccttcctgagtcactccttcagtagaaggccctgctccctatcctgtcccacagccctgcctggatttgtatccttggcttcgtgccagttcctccaagtctatggcacctccctccctctcaaccacttgagcaaactccaagacaccttctaccccaacaccagcaattatgccaagggccgttaggctctcaacatgactatagagaccccgtgtcatcacggagacctttgttcctgtgggaaaatatccctcccacctgcaacagctgcccctgctgactgcgcctgtcttctccctctgaccccagagaaaggggctgtggtcagctgggatcttctgccaccatcagggacaaacgggggcaggaggaaagtcactgatgcccagatgtttgcatcctgcacagctataggtccttaaataaaagtgtgctgttggtt

SEQ ID NO: 3541 - protein, 960 aa, Homo sapiens
MANETQKVGAIHFPFPFTPYSIQEDFMAELYRVLEAGKIGIFESPTGTGKSLSLICGALSWLRDFEQKKREEEARLLETGTGPLHDEKDESLCLSSSCEGAAGTPRPAGEPAWVTQFVQKKEERDLVNRLKAEQARRKQREERLQQLQHRVQLKYAAKRLRQEEEERENLLRLSREMLETGPEAERPEQLESGEEELVLAEYESDEEKKVASRVDEDEDDLEEEHITKIYHCSRTHSQLAQFVHEVKKSPFGKDVRLVSLGSRQNLCVNEDVRSLGSVQLINNRCVDMQRSRHEKKKGAEEEKPKRRRQEKQAACPFYNHEQMGLLRDEALAEVKDMEQLLALGKEARACPYYGSRLAIPAAQLVVLPYQMLLHAATRQAAGIRLQDQVVIIDEAHNLIDTTTSMHSVEVSGSQLCQAHSQLLQYMERYGKRLKAKNLMYLKQILYLLEKFVAVLGGNIKQNPNTQSLSQTGMELKTINDFLFQSQIDNINLFKVQRYCEKSMISRKLFGFTERYGAVFSSREQPKLAGFQQFLQSLQPRTTEALAAPADESQASVPQPASPLMHIEGFLAALTTANQDGRVILSRQGSLSQSTLKFLLLNPAVHFAQVVKECRAVVIAGGTMQPVSNFRQQLLACAGVEAERVVEFSCGHVIPPDNILPLVICSGVSNQPLEFTFQKRDLPQMMDEVGRILCNLCGVVSGGVVCFFPSYEYLRQVHAHWEKGGLLGRLAARKKIFQEPKSAHQVEQVLLAYSRCGQACGQERGPVTGALLLSVVGGKMSEGINFSDNLGRCVVMVGMPFPNIRSAELQEKMAYLDQTLPRAPGQAHPGKALVENLCMKAVNQSIGRAIRHQKDFASIVLLDQRYARPLCWPSCRPGSEPVWRSKLPLAPPLLLCRSFTGRSRPLPDGQPHHRPAPCPSFVLPSGDSVCRGRGLQGSCYKGETQEESVESRALPGPRHRR

SEQ ID NO: 3542 - DNA, 465 bp, Homo sapiens
atgagtctgacttccagttccagcggacgagttgaatggatggcagcagttaccgttgctgctgggacagctgcaattggttatctagcttacaaaagattttatgttaaagatcatcgaaataaagctgtgataaaccttcacatccagaaagacaaccccaagacagtacatgcttttgacatggaggatttgggagataatgctgtgtactgccgtttctggagagagccacgacctgccccagctgttggagaagctgaaaataaagggaatcaacaatcagccaatcatccaagccagcaacctgctcgctgtggctaccagcctccccaccactatttacgtagcctctatcctcctaaggctccttcacaagatggcagagaccgaagcaggtcattaagtatctggctgaacgatgggttaaggccagagtgggcttcagagctggggccactatga

SEQ ID NO: 3543 - DNA, 1386 bp, Homo sapiens
cctcccccctttcccaaggacaatctgcaagaaagcagcggcggaggagagctaagactaaaagagtggatcatgacccatgaagagcaccatgcagccaaaaccctggggattggcaaagccattgctgtcttaacctctggtggagatgcccaaggtatgaatgctgctgtcagggctgtggttcgagttggtatcttcaccggtgcccgtgtcttctttgtccatgagggttatcaaggcctggtggatggtggagatcacatcaaggaagccacctgggagagcgtttcgatgatgcttcagctgggaggcacggtgattggaagtgcccggtgcaaggactttcgggaacgagaaggacgactccgagctgcctacaacctggtgaagcgtgggatcaccaatctctgtgtcattgggggtgatggcagcctcactggggctgacaccttccgttctgagtggagtgacttgttgagtgacctccagaaagcaggtaagatcacagatgaggaggctacgaagtccagctacctgaacattgtgggcctggttgggtcaattgacaatgacttctgtggcaccgatatgaccattggcactgactctgccctgcatcggatcatggaaattgtagatgccatcactaccactgcccagagccaccagaggacatttgtgttagaagtaatgggccgccactgtggatacctggcccttgtcacctctctgtcctgtggggccgactgggtttttattcctgaatgtccaccagatgacgactgggaggaacacctttgtcgccgactcagcgagacaaggacccgtggttctcgtctcaacatcatcattgtggctgagggtgcaattgacaagaatggaaaaccaatcacctcagaagacatcaagaatgttcgtatgaatgaagccagagaggccttagaatccatagcccattcccttctggcttctgagtctcctgacattgcttctccccttggtccttctgcacatctctccctggttccctgcccctgattgcctcccacaaagaaccattacaagacaagaggctgagctgtccatggtttacccaagtctctgcttgttttcttcctttgactctgcgtaaccctctctctgtccctctgttggtcccttcagctggtggttaagcgtctgggatatgacacccgggttactgtcttggggcatgtgcagaggggtgggacgccatcagcctttgacagaattctgggcagcaggatgggtgtggaagcagtgatggcacttttggaggggaccccagataccccagcctgtgtagtgagcctctctggtaaccaggctgtgcgcctgcccctcatggaatgtgtccaggtg

SEQ ID NO: 3544 - protein, 322 aa, Homo sapiens [sequence omitted]

SEQ ID NO: 3545 - DNA, 4853 bp, Homo sapiens
acgcagagcgctgctgggctgccgggtctcccgcttccccctcctgctccaagggcctcctgcatgagggcgcggtagagacccggacccgcgccgtgctcctgccgtttcgctgcgctccgcccgggcccggctcagccaggccccgcggtgagccatgattcgcctcggggctccccagacgctggtgctgctgacgctgctcgtcgccgctgtccttcggtgtcagggccaggatgtccggcaaccaggaccaaagggacagaaaggagaacctggagacatcaaggatattgtaggacccaaaggacctcctgggcctcagggacctgcaggggaacaaggacccagaggggatcgtggtgacaaaggtgaaaaaggtgcccctggacctcgtggcagagatggagaacctgggacccctggaaatcctggcccccctggtcctcccggcccccctggtccccctggtcttggtggaaactttgctgcccagatggctggaggatttgatgaaaaggctggtggcgcccagttgggagtaatgcaaggaccaatgggccccatgggacctcgaggacctccaggccctgcaggtgctcctgggcctcaaggatttcaaggcaatcctggtgaacctggtgaacctggtgtctctggtcccatgggtccccgtggtcctcctggtccccctggaaagcctggtgatgatggtgaagctggaaaacctggaaaagctggtgaaaggggtccgcctggtcctcagggtgctcgtggtttcccaggaaccccaggccttcctggtgtcaaaggtcacagaggttatccaggcctggacggtgctaagggagaggcgggtgctcctggtgtgaagggtgagagtggttccccgggtgagaacggatctccgggcccaatgggtcctcgtggcctgcctggtgaaagaggacggactggccctgctggcgctgcgggtgcccgaggcaacgatggtcagccaggccccgcagggcctccgggtcctgtcggtcctgctggtggtcctggcttccctggtgctcctggagccaagggtgaagccggccccactggtgcccgtggtcctgaaggtgctcaaggtcctcgcggtgaacctggtactcctgggtcccctgggcctgctggtgcctccggtaaccctggaacagatggaattcctggagccaaaggatctgctggtgctcctggcattgctggtgctcctggcttccctgggccacggggccctcctggccctcaaggtgcaactggtcctctgggcccgaaaggtcagacgggtgaacctggtattgctggcttcaaaggtgaacaaggccccaagggagaacctggccctgctggcccccagggagcccctggacccgctggtgaagaaggcaagagaggtgcccgtggagagcctggtggcgttgggcccatcggtccccctggagaaagaggtgctcccggcaaccgcggtttcccaggtcaagatggtctggcaggtcccaagggagcccctggagagcgagggcccagtggtcttgctggccccaagggagccaacggtgaccctggccgtcctggagaacctggccttcctggagcccggggtctcactggccgccctggtgatgctggtcctcaaggcaaagttggcccttctggagcccctggtgaagatggtcgtcctggacctccaggtcctcagggggctcgtgggcagcctggtgtcatgggtttccctggccccaaaggtgccaacggtgagcctggcaaagctggtgagaagggactgcctggtgctcctggtctgaggggtcttcctggcaaagatggtgagacaggtgctgcaggaccccctggccctgctggacctgctggtgaacgaggcgagcagggtgctcctgggccatctgggttccagggacttcctggccctcctggtcccccaggtgaaggtggaaaaccaggtgaccagggtgttcccggtgaagctggagcccctggcctcgtgggtcccaggggtgaacgaggtttcccaggtgaacgtggctctcccggtgcccagggcctccagggtccccgtggcctccccggcactcctggcactgatggtcccaaaggtgcatctggcccagcaggcccccctggggctcagggccctccaggtcttcagggaatgcctggcgagaggggagcagctggtatcgctgggcccaaaggcgacaggggtgacgttggtgagaaaggccctgagggagcccctggaaaggatggtggacgaggcctgacaggtcccattggcccccctggcccagctggtgctaatggcgagaagggagaagttggacctcctggtcctgcaggaagtgctggtgctcgtggcgctccgggtgaacgtggagagactgggccccccggaccagcgggatttgctgggcctcctggtgctgatggccagcctggggccaagggtgagcaaggagaggccggccagaaaggcgatgctggtgcccctggtcctcagggcccctctggagcacctgggcctcagggtcctactggagtgactggtcctaaaggagcccgaggtgcccaaggccccccgggagccactggattccctggagctgctggccgcgttggacccccaggctccaatggcaaccctggaccccctggtccccctggtccttctggaaaagatggtcccaaaggtgctcgaggagacagcggcccccctggccgagctggtgaacccggcctccaaggtcctgctggaccccctggcgagaagggagagcctggagatgacggtccctctggtgccgaaggtccaccaggtccccagggtctggctggtcagagaggcatcgtcggtctgcctgggcaacgtggtgagagaggattccctggcttgcctggcccgtcgggtgagcccggcaagcagggtgctcctggagcatctggagacagaggtcctcctggccccgtgggtcctcctggcctgacgggtcctgcaggtgaacctggacgagagggaagccccggtgctgatggcccccctggcagagatggcgctgctggagtcaagggtgatcgtggtgagactggtgctgtgggagctcctggagcccctgggccccctggctcccctggccccgctggtccaactggcaagcaaggagacagaggagaagctggtgcacaaggccccatgggaccctcaggaccagctggagcccggggaatccagggtcctcaaggccccagaggtgacaaaggagaggctggagagcctggcgagagaggcctgaagggacaccgtggcttcactggtctgcagggtctgcccggccctcctggtccttctggagaccaaggtgcttctggtcctgctggtccttctggccctagaggtcctcctggccccgtcggtccctctggcaaagatggtgctaatggaatccctggccccattgggcctcctggtccccgtggacgatcaggcgaaaccggccctgctggtcctcctggaaatcctggaccccctggtcctccaggtccccctggccctggcatcgacatgtccgcctttgctggcttaggcccgagagagaagggccccgaccccctgcagtacatgcgggccgaccaggcagccggtggcctgagacagcatgacgccgaggtggatgccacactcaagtccctcaacaaccagattgagagcatccgcagccccgagggctcccgcaagaaccctgctcgcacctgcagagacctgaaactctgccaccctgagtggaagagtggagactactggattgaccccaaccaaggctgcaccttggacgccatgaaggttttctgcaacatggagactggcgagacttgcgtctaccccaatccagcaaacgttcccaagaagaactggtggagcagcaagagcaaggagaagaaacacatctggtttggagaaaccatcaatggtggcttccatttcagctatggagatgacaatctggctcccaacactgccaacgtccagatgaccttcctacgcctgctgtccacggaaggctcccagaacatcacctaccactgcaagaacagcattgcctatctggacgaagcagctggcaacctcaagaaggccctgctcatccagggctccaatgacgtggagatccgggcagagggcaatagcaggttcacgtacactgccctgaaggatggctgcacgaaacataccggtaagtggggcaagactgttatcgagtaccggtcacagaagacctcacgcctccccatcattgacattgcacccatggacataggagggcccgagcaggaattcggtgtggacatagggccggtctgcttcttgtaaaaacctgaacccagaaacaacacaatccgttgcaaacccaaaggacccaagtactttccaatctcagtcactctaggactctgcactgaatggctgacctgacctgatgtccattcatcccaccctctcacagttcggacttttctcccctctctttctaagagacctgaactgggcagactgcaaaataaaatctcggtgttctatttatttattgtcttcctgtaagaccttcgggtcaaggcagaggcaggaaactaactggtgtgagtcaaatgccccctgagtgactgcccccagcccaggccagaagacctcccttcaggtgccgggcgcaggaactgtgtgtgtcctacacaatggtgctattctgtgtcaaacacctctgtattttttaaaacatcaattgatattaaaaatgaaaagattattggaaagt

SEQ ID NO: 3546 - DNA, 1747 bp, Homo sapiens
atgagccaccacccgtcgggcctccgggccggcttcagctccacctcataccgccgtaccttcggtccaccgccctcactatcccccggggccttctcctactcgtccagctcccgcttctccagcagccgcctgctgggctccgcgtccccgagctcctcggtgcgcctgggcagcttccgtagcccccgagcgggagcgggcgccctcctgcgcctgccctcggagcgcctcgacttctccatggccgaggccctcaaccaggagttcctggccacgcgcagcaacgagaagcaggagctgcaggagctcaacgaccgcttcgccaacttcatcgagaaggtacgctttctggagcagcagaacgcggccctgcgcggggagctgagccaagcccggggccaggagccggcgcgcgccgaccagctgtgccagcaggagctgcgcgagctgcggcgagagctggagctgttgggccgcgagcgtgaccgggtgcaggtggagcgcgacgggctggcggaggacctggcggcgctcaagcagaggttggaggaggagacgcgcaagcgggaggacgcggagcacaacctcgtgctcttccgcaaggacgtggacgatgccactctgtcccgcctggaactagagcgcaagattgagtctctgatggatgagattgagttcctcaagaagctgcacgaggaggagctgcgagacctgcaggtgagtgtggagagccagcaggtgcagcaggtggaggtggaagccacggtgaagcccgagctgacggcagcgctgagggacatccgcgcgcagtacgagagcatcgccgcgaagaacctgcaggaggcggaggagtggtacaagtccaagtacgcggacctgtccgacgctgccaaccggaaccacgaggccctgcgccaggccaagcaggagatgaacgagtcccgacgccagatccagagtctaacgtgcgaggtggacgggctgcgcggcacgaacgaggcgctgctcaggcagttgagagagctggaggagcagttcgccctggaggcggggggctaccaggcgggcgctgcgcggctcgaggaggagctgcgacagctaaaagaggagatggcgcggcacctgagggagtaccaggagctcctcaacgtcaagatggccctggacatcgagatcgccacctaccgcaagctgctggagggcgaggagagccggatctccgtgcccgtccattcttttgcctccttaaatataaagacgactgtgcctgaggtggagcctccccaggacagccacagccggaagacggttctgatcaagaccattgagacccggaatggggaggtggtgacagagtcccagaaggagcagcgcagtgagctggacaagtcttctgcccacagttactgaaccccttggtccggagccttgactctgccctaggcctgctcaaagcccaaaccctaagaccactcctgaattgtctcctctccctctgcatgtgtctaaaaggtggtaccaggcatccctttcctggcttatggccaagccctacccggccagcagtcgctggcctctccctgccctgacacttgatgtgacctatgtgcttcccttttcatgtcccgataagaagccaatgatcccccctcaggacaaatctactccagccacgatgagaagtgggtgagccagggtctgagtttcacatttgaaccaaataaaatgctgtcaagagaaaaaa

SEQ ID NO: 3547 - protein, 470 aa, Homo sapiens
MSHHPSGLRAGFSSTSYRRTFGPPPSLSPGAFSYSSSSRFSSSRLLGSASPSSSVRLGSFRSPRAGAGALLRLPSERLDFSMAEALNQEFLATRSNEKQELQELNDRFANFIEKVRFLEQQNAALRGELSQARGQEPARADQLCQQELRELRRELELLGRERDRVQVERDGLAEDLAALKQRLEEETRKREDAEHNLVLFRKDVDDATLSRLELERKIESLMDEIEFLKKLHEEELRDLQVSVESQQVQQVEVEATVKPELTAALRDIRAQYESIAAKNLQEAEEWYKSKYADLSDAANRNHEALRQAKQEMNESRRQIQSLTCEVDGLRGTNEALLRQLRELEEQFALEAGGYQAGAARLEEELRQLKEEMARHLREYQELLNVKMALDIEIATYRKLLEGEESRISVPVHSFASLNIKTTVPEVEPPQDSHSRKTVLIKTIETRNGEVVTESQKEQRSELDKSSAHSY

SEQ ID NO: 3548 - DNA, 2328 bp, Homo sapiens
gtttctgtcgcaggctgcgaggaaaggcccctaggctgggtctgggtgcttggcggcggcggcttcctccccgctcgtcctccccgggcccagaggcacctcggcttcagtcatgctgagcagagtatggaagcacctgactacgaagtgctatccgtgcgagaacagctattccacgagaggatccgcgagtgtattatatcaacacttctgtttgcaacactgtacatcctctgccacatcttcctgacccgcttcaagaagcctgctgagttcaccacagtttcatcctacaaaatgggcgtaacaatgtctacctactccattgtgtggaccaaaggagatggttaatgtgaaagccctttgtgaacctgaagtgagcaactgctggatgaatgtcattacgggcacaggctctgtgtcatctcctctcctagtgcttccacagccaggaccagagacctccctgatgactggggaacctgtggatgatgaagatgccaccgtcaacaagattgcgctcgagctgtgcacctttaccctggcaattgccctgggtgctgtcctgctcctgcccttctccatcatcagcaatgaggtgctgctctccctgcctcggaactactacatccagtggctcaacggctccctcatccatggcctctggaaccttgtttttctcttctccaacctgtccctcatcttcctcatgccctttgcatatttcttcactgagtctgagggctttgctggctccagaaagggtgtcctgggccgggtctatgagacagtggtgacgttgatgctcctcactctgctggtgctaggtatggtgtgggtggcatcagccattgtggacaagaacaaggccaacagagagtcactctatgacttttgggagtactatctcccctacctctactcatgcatctccttccttggggttctgctgctcctggtgtgtactccactgggtctcgcccgcatgttctccgtcactgggaagctgctagtcaagccccggctgctggaagacctggaggagcagctgtactgctcagcctttgaggaggcagccctgacccgcaggatctgtaatcctacttcctgctggctgcctttagacatggagctgctacacagacaggtcctggctctgcagacacagagggtcctgctggagaagaggcggaaggcttcagcctggcaacggaacctgggctaccccctggctatgctgtgcttgctggtgctgacgggcctgtctgtgctcattgtggccatccacatcctggagctgctcatcgatgaggctgccatgccccgagtcatgcagggtacctccttaggccaggtctccttctccaagctgggctcctttggtgccgtcattcaggttgtactcatcttttacctaatggtgtcctcagttgtgggcttctatagctctccactcttccggagcctgcggcccagatggcacgacactgccatgacgcagataattgggaactgtgtctgtctcctggtcctaagctcagcacttcctgtcttctctcgaaccctggggctcactcgctttgacctgctgggtgactttggacgcttcaactggctgggcaatttctacattgtgttcctctacaacgcagcctttgcaggcctcaccacactctgtctggtgaagaccttcactgcagctgtgcgggcagagctgatccgggcctttgggctggacagactgccgctgcccgtctccggtttcccccaggcatctaggaagacccagcaccagtgacctccagctgggggtgggaaggaaaaaactggacactgccatctgctgcctaggcctggagggaagcccaaggctacttggacctcaggacctggaatctgagagggtgggtggcagaggggagcagagccatctgcactattgcataatctgagccagagtttgggaccaggacctcctgcttttccatacttaactgtggcctcagcatggggtagggctgggtgactgggtctagcccctgatcccaaatctgtttacacatcaatctgcctcactgctgttctgggccatccccatagccatgtttacatgatttgatgtgcaatagggtggggtaggggcagggaaaggactgggccagggcaggctcgggagatagattgtctcccttgcctctggcccagcagagcctaagcactgtgctatcctggaggggctttggaccacctgaaagaccaaggggatagggaggaggaggcttcagccatcagcaataaagttgatcccagggtttgctttgttttttt

SEQ ID NO: 3549 - protein, 484 aa, Homo sapiens
MVNVKALCEPEVSNCWMNVITGTGSVSSPLLVLPQPGPETSLMTGEPVDDEDATVNKIALELCTFTLAIALGAVLLLPFSIISNEVLLSLPRNYYIQWLNGSLIHGLWNLVFLFSNLSLIFLMPFAYFFTESEGFAGSRKGVLGRVYETVVTLMLLTLLVLGMVWVASAIVDKNKANRESLYDFWEYYLPYLYSCISFLGVLLLLVCTPLGLARMFSVTGKLLVKPRLLEDLEEQLYCSAFEEAALTRRICNPTSCWLPLDMELLHRQVLALQTQRVLLEKRRKASAWQRNLGYPLAMLCLLVLTGLSVLIVAIHILELLIDEAAMPRVMQGTSLGQVSFSKLGSFGAVIQVVLIFYLMVSSVVGFYSSPLFRSLRPRWHDTAMTQIIGNCVCLLVLSSALPVFSRTLGLTRFDLLGDFGRFNWLGNFYIVFLYNAAFAGLTTLCLVKTFTAAVRAELIRAFGLDRLPLPVSGFPQASRKTQHQ

SEQ ID NO: 3550 - DNA, 3595 bp, Homo sapiens
ggaggtgggaagtatcccgggctgggggtgggggtacgccgcacagctccagtcgccgtcgcggcttccggtgctaggtggagggaaggaaggagggagccggggagtgggccagggcagcagccgggctgaagtcggcttggggagccagagggagcggagcggaacctgcggggcagaggcggcggccgcagcggcgcagctgatagcaggaacaggatcaagtcttccataccagggaccaggccaaaaccagactgccactgcccctacttgggccccactgtccccagaaagcagctgctgtgatcatgggcaatatctttggaaaccttctcaagagcctgattgggaagaaggagatgcgcatcctgatggtgggcctggatgccgcaggaaagaccaccatcctatacaagctgaaactgggggagatcgtcaccaccatccctaccattgggttcaatgtggagacagtggagtataagaacatcagctttacagtgtgggatgtgggtggccaggacaagattcgacccctctggagacactacttccagaacacccaagggttgatatttgtggtcgacagcaatgatcgggagcgagtaaatgaggcccgggaagagctgatgagaatgctggcggaggacgagctccgggatgctgtactccttgtctttgcaaacaaacaggatctgcctaatgctatgaacgctgctgagatcacagacaagctgggcctgcattcccttcgtcaccgtaactggtacattcaggccacctgtgccaccagcggggacgggctgtacgaaggcctggactggctggccaatcagctcaaaaacaagaagtgaaagccagacagccctaacaaagcaccccacccacccctgacatacctactgtcaccctgccccagtcctaccccttcctctccatgcaagtgtggccagggccctgggtatcatgtccacatgcccagcaagagccttgcctcccctgcctcccctcctttttcctgtccacctatatgaccaatccctaattgctgtcctgatgatgagtcattccaatttactggatttaaaacaaaaagttgttacggtttcatggggtggcccctctctctctctcacctctgggtttcgggaggtcgagtggggtattctctttgtttggcagtggttgctgtcctcttggcatctgagtcctttccctgtccccacaagcccttctactccctgtttgcctttcctttgccaccctctccctgttttacatggaaattgcacgggcctctctgtgtttgcgtgcatgtgtgcgcctgtatatacatgtatagagagatatatttgtgggggccggggggagcggggagggggtggagtgaagctcagggcttgcagccaggacactgcccactggagcctgtcatctgccccttccgtgttggtgagattaagggaagaaggtgggagggcattagtcaagccggactgccccagtctttgactggttaccctcctctctgcaggtaggtttttctggatgataggacagatgatggattcttcaccaccattttccttgtactcttctctccacccttcttagggctggaggatggcatttatctctagatgactgttcccaaggagatgccactctgctctgccttactgttgggaaggagagaggaacccactcactcttatcagcttagagtgttcaactgatccttccccaccatcttcagatctgttcctctggagcttgactggggggtggggatggcaagtccatggtgtgtgttagggacccagggcattgggggaagggaggcgaaggcctgaggttttccatcttcattctcttttgttattaggagaaggtgaggcatgggccaatcccattcctgccttccagtgccccaccacccttctgatcttaggggttggatgggtcatctgtccttggtcagaattttctcaccctagtactcctactggcctgaccagggctgactgggtattctaatgaggagctgggaagtggggtgacatagctgaccttagtatcaacccccctcttctccaactcttgttttctagtccaggatatgctaaaggacgaagattttctattgtttccaggccctcagaccatccttgctgtcccttcaccctccatgcccctgccatcctcactcacttctcataaatggatctgggggttagagtggaggaaataaaatcctgaagtggttgtcagtgcttgtgggatgcagtggtcttcaggattctccccgcattattatgtagttgttcagaagctgttgctactgcgtctctctgtctgcagggggcacttgttcctgaggtcctcgcctgggtcctgacttctgtagtttctgtgaagacgtggctgtcctgtgggctcctgtgtgtgctggctgcgcctgagctccgagacagctgcccataacctgctaaggtcagggcccagggccccccacagcatggctgagggaccccttcccagtagggctgtcccaagccccactccatggggccaggtttcctggccacttttgttgatagcagatggatcaatattagtaaccccatccaagattgaactgtgaaagagaggttccaggggtatctccctcagtgccagttacttagtgatgtgttacccaggatgcagcaggtgtgtgcaggtatcttgctctctaggcctgtgtgtgtgtgtgagtgtgtgtgtatatgggtgtgggtgtgtttgtgtgtggtggttgtggggggggtgttggaggttctatttcatttaaaaatgtattcatttccctggccccacagatgcttccctccatactttttatttgctctgtttcctcagatttattttgtcttgccccattgcctctccttccttgaactctttccttttcaatctcaactcattcactgctgttgctcatttgcccttttccatgtattttttcctacttaggattttccactctatctttgtggttcatgaggactttgcctcttctcctgcctcattccctgactttctctagttagatgtcagtcctaaataggttttcctcacttcaggcctcacccctcaccttgtttttttgggggctccagggaccaatctggggctggaaatgttaggaggttgccttggtgctgccccagatctgtccagcagggggcagtaagtgatcttggtagtatccctggctgctaagcccttggcaggggtggtcctttctacattcccattcacttaacagctcttttgggattgggtgtttcattccatttctgcccactccctctcctctcctctctggtaggtttaattttatgctttccctgattccagctttctgcttcctgaggactcccgctccccccaccccaaagtttgtctgtggtgttatagtggtaactgcagttcctcctctggaatgtagactgtatatgtttaataactcaccttctctatccttgctcaaaatgtgggataacgcgatgactgtgaccctggttggaaattaaacttgttttatgca

SEQ ID NO: 3551 - protein, 181 aa, Homo sapiens
MGNIFGNLLKSLIGKKEMRILMVGLDAAGKTTILYKLKLGEIVTTIPTIGFNVETVEYKNISFTVWDVGGQDKIRPLWRHYFQNTQGLIFVVDSNDRERVNEAREELMRMLAEDELRDAVLLVFANKQDLPNAMNAAEITDKLGLHSLRHRNWYIQATCATSGDGLYEGLDWLANQLKNKK

SEQ ID NO: 3552 - DNA, 1901 bp, Homo sapiens
agtgcggcgcagcgcagctcctgaggttttggttatgaacaggattcggattcacgtcttgccaaccaatcgggggaggatcactccagtgcccaggtctcaggaacctctgtcttgtgcattcactcatcgtccatgctctcaccctcgtctggaggggcaggagttttgcattaagcatatccttgaagacaagaatgcacccttcaagcagtgtagttatatatcgacgaagaatggaaaaagatgtcccaatgctgccccaaagccagagaagaaagatggggtgtccttctgtgctgaacatgtccgtaggaatgccctggcacttcatgctcaaatgaagaagaccaacctagggcctgtgggtgaaacactcctgtgccagctgagctcatatgctaagacagagctggggtctcagactccagaaagtagtcgcagtgaagccagccgaatactagacatgctggtgtctacacagcagaagaagtggccctgattatgcgtgaaaagctaattcgtttgcagtcgttgtatattgatcagtttaaacgacttcagcatctgctcaaggagaagaagcgccgatacttacataatcgcaaagtggaacatgaagctctaggcagtagtctcctgactggcccagagggacttttggccaaagaacgagagaacttaaagcgattaaaatgtctgcgacgataccgccagcgctatggagtggaagccttactgcataggcagttgaaggaacggagaatgctggccacagatggtgctgcccaacaggcccataccactcgttccagtcagaggtgcttggcctttgtggatgatgttcgttgttccaatcagtctcttccaatgaccagacactgccttacccagaaagatgcgactgccattggtgacctgttaactctttactgtggtctaatggagacagcactcgactgaaagtgaaggacccagactctagttgacttggatgttgtgggtgatggtatgcagtgtcctccttcacctttgctttttgatccttcactaacccttgaagatcatttagtcaaagaaattgctgaagacacagtggatattttgggccagatgcagatggctggagatgggtgcagatcccagggatctcgaaattctgagaaagcctctgcaccattgtctcagagtggattggctactgcaaatgggaagccagaacccacttctattagttgatagtttggggaaccattttactttggtggatttaaatttctcgttcttcaaagaagtatttctgatcatctctcacaaaacacaggcaacccagactaccttgtttttcttctggattgagtattatagtcaaacgtaaagccaaattttgaggacgtggaccgtgggtttcttcccactcagggcaaggaagagaaagagagataatccctatcaaagcttctgggatcatttgggactatacctaaaaggaaagtgacatctttgtaatgggatttcccaagtcatggatagaaatccacttaagtagctaggtgggagctgtctttgtgagtggtgtctttgagatactgatggccctaatatcggttatctctatctgaagacctgcagtttagcttttcttcacctctacttaattgggcagtctttaacccctttccctggtgaactctggctttttatcctctgagaaaacagcccacaggactgggtcctccttatccgtcttgcttttaacctatgtaaatttctgtggttgctatcttatgtaaaatatagtaaaaatttattgtatatagtttctattaaatgttaaagaaaatgttatgaaaatatcaaacagtcacctgaattgaatgcaaaaaaaaaaaaaaaaaaaa

SEQ ID NO: 3553 - protein, 152 aa, Homo sapiens
MREKLIRLQSLYIDQFKRLQHLLKEKKRRYLHNRKVEHEALGSSLLTGPEGLLAKERENLKRLKCLRRYRQRYGVEALLHRQLKERRMLATDGAAQQAHTTRSSQRCLAFVDDVRCSNQSLPMTRHCLTQKDATAIGDLLTLYCGLMETALD

SEQ ID NO: 3554 - DNA, 15789 bp, Homo sapiens
atggacagccagaagctggctggtgaggataaagattcagaaccggcagctgatggacctgcagcttctgaggacccaagtgccactgagtcagacctgcccaacccacatgtgggagaggtctctgtccttagttctgggagtcccaggcttcaggagactcctcaggactgcagtgggggtccggtgcggcgttgtgctctctgtaactgcggggagcccagtctacacgggcagcgggagctacggcgctttgagttgccatttgattggccccggtgtccagtggtgtcccctggggggagcccagggcccaatgaggcagtgctgcccagtgaggacctatcacagattggtttccctgagggccttacacctgcccacctaggagaacctggagggtcctgctgggctcaccattggtgtgctgcatggtcggcaggcgtatgggggcaggagggcccagaactatgtggtgtggacaaggccatcttctcagggatctcacagcgctgctcccactgcaccaggctcggtgcctccatcccttgccgctcacctggatgtccacggctttaccacttcccctgcgcgactgccagcggttccttcctatccatgaaaacactgcagctgctatgcccagagcacagtgagggggctgcatatctggaggaggctcgctgtgcagtgtgtgaggggccaggggagttgtgtgacctgttcttctgtaccagctgtgggcatcactatcacggggcctgcctggacactgctctgactgcccgcaaacgtgctggctggcagtgccctgaatgcaaagtgtgccaagcctgcaggaaacctgggaatgactctaagatgttggtttgtgagacgtgtgacaaaggataccatactttctgcctaaaaccacccatggaggaactgcctgctcactcttggaagtgcaaggcgtgccgggtgtgccgggcctgtggggcgggctcagcagaactgaatcccaactcggagtggtttgagaactactctctctgtcaccgctgtcacaaagcccagggaggtcagactatccgctccgttgctgagcagcataccccggtgtgtagcagattttcacccccagagcctggcgatacccccactgacgagcccgatgctctgtacgttgcatgccaagggcagccaaagggtgggcacgtgacctctatgcaacccaaggaaccagggcccctgcaatgtgaagccaaaccactagggaaagcaggggtccaacttgagccccagttggaggcccccctaaacgaggagatgccactgctgcccccacctgaggagtcacccctgtccccaccacctgaggaatcacccacgtccccaccacctgaggcatcacgcctgtcaccaccacctgaggaattgcccgcatccccacttcctgaggcattgcacctgtcccggccgctggaggaatcgcccctctctccgccgcctgaggagtctcctctgtctcccccacctgaatcatcacctttttctccactggaggagtcgcccttgtctccaccggaagagtcacccccatctcctgcacttgagacgcctctatccccaccacctgaagcatcgcccctgtccccaccatttgaagaatctcctttgtccccgccacctgaggaattgcccacttccccgccacctgaagcatctcgcctgtctccaccacctgaggagtcacccatgtcccctccacctgaagagtcacccatgtctccaccaccggaggcatctcgtctgttcccaccatttgaagagtctcctctgtcccctccacctgaggagtctcccctttccccaccacctgaggcatcacgcctgtccccaccacctgaggactcgcctatgtccccaccacctgaagaatcacctatgtcccccccacctgaggtatcgcgcctatcccccctgcctgtggtgtcacgcctgtctccaccgcctgaggaatctcccttgtccccaccggccctgtctcctttgggggagttagagtacccctttggtgccaaaggggacagtgaccctgagtcaccgttggctgcccccatcctggagacacccatcagccctccaccagaagctaactgcactgaccctgagcctgtcccccctatgatccttcccccatctccaggctccccagtggggccggcttctcccatcctgatggagccccttcctcctcagtgttcgccactccttcagcattccctggttccccaaaactcccctccttcccagtgctctcctcctgccctaccactgtccgttccctccccgttgagtcccatagggaaggtagtgggggtctcagatgaggctgagctgcacgagatggagactgagaaagtttcagaacctgaatgcccagccttggaacccagtgccaccagtcctctcccttccccaatgggggacctttcctgccccgcccccagccctgccccagccctggatgacttctctggcctaggggaagacacagcccctctggatgggattgatgctccgggttcacagccagagcctggacagacccctggcagtttggctagtgaacttaaaggctcccctgtgctcctggaccccgaggagctggcccctgtgacccctatggaggtctaccccgaatgcaagcagacagcagggcagggctcaccatgtgaagaacaggaagagccacgtgcaccggtggcccccacaccacccactctcatcaaatccgacatcgttaacgagatctctaatctgagccagggtgatgccagtgccagttttcctggctcagagcccctcctgggctctccagacccggaggggggtggctccctgtccatggagttgggggtctctacggatgttagtccagcccgagatgagggctccctacggctctgtactgactcactgccagagactgatgactcactattgtgcgatgctgggacagctatcagcggaggcaaagctgagggggagaaggggcggcggcgcagctccccagcccgttcccgcatcaaacagggtcgcagcagcagtttcccaggaagacgccggcctcgtggaggagcccatggaggacgtggtagaggacgggcccggctaaagtcaactgcttcttccattgagactctggtagttgctgacattgatagctctcccagtaaggaggaggaggaagaagatgatgacaccatgcagaataccgtggttctcttctccaacacagacaaatttgtcctaatgcaggacatgtgtgtggtatgtggcagctttggccggggggcagagggccacctccttgcctgttcgcagtgctctcagtgctatcacccttactgtgtcaacagcaagatcaccaaggtgatgctgctcaagggctggcgttgtgtggagtgtattgtgtgtgaggtgtgtggccaggcctccgacccctcacgcctgctgctctgtgatgactgtgatattagctaccacacatactgcctggaccccccactgctcaccgtccccaagggcggctggaagtgcaagtggtgtgtgtcctgtatgcagtgtggggctgcttcccctggcttccactgtgaatggcagaatagttacacacactgtgggccctgtgccagcctggtgacctgccctatctgtcatgctccttacgtagaagaggacctactaatccagtgccgccactgtgaacggtggatgcatgcaggctgtgagagcctcttcacagaggacgatgtggagcaggcagccgatgaaggctttgactgtgtctcctgccagccctacgtggtaaagcctgtggcgcctgttgcacctccagagctggtgcccatgaaggtgaaagagccagagccccagtactttcgcttcgaaggtgtgtggctgacagaaactggcatggccttgctgcgtaacctgaccatgtcaccactgcacaagcggcgccaacggcgaggacggcttggcctcccaggcgaggcaggattggagggttctgagccctcagatgcccttggccctgatgacaagaaggatggggacctggacaccgatgagctgctcaagggtgaaggtggtgtggagcacatggagtgcgaaattaaactggagggccccgtcagccctgatgtggagcctggcaaagaggagaccgaggaaagcaaaaaacgcaagcgtaaaccatatcggcctggcattggtggtttcatggtgcgacagcggaaatcccacacacgcacgaaaaaggggcctgctgcacaggcggaggtgttgagtggggatgggcagcccgacgaggtgatacctgctgacctgcctgcagagggcgccgtggagcagagcttagctgaaggggatgagaagaagaagcaacagcggcgagggcgcaagaagagcaaactggaggacatgttccctgcttacttgcaggaagccttctttgggaaggagctgctggacctgagccgtaaggccctttttgcagttggggtgggccggccaagctttggactagggaccccaaaagccaagggagatggaggctcagaaaggaaggaactccccacatcgcagaaaggagatgatggtccagatattgcagatgaagaatcccgtggcctcgagggcaaagccgatacaccaggacctgaggatgggggcgtgaaggcatccccagtgcccagtgaccctgagaagccaggcaccccaggtgaagggatgcttagctctgacttagacaggatttccacagaagaactgcccaagatggaatccaaggacctgcagcagctcttcaaggatgttctgggctctgaacgagaacagcatctgggttgtggaacccctggcctagaaggcagccgtacgccactgcagaggccctttcttcaaggtggactccctttgggcaatctgccctccagcagcccaatggactcctacccaggcctctgccagtccccgttcctggattctagggagcgcgggggcttctttagcccggaacccggtgagcccgacagcccctggacgggctcaggtggcaccacgccctccacccccacaacccccaccacggagggtgagggcgacggactctcctataaccagcggagtcttcagcgctgggagaaggatgaggagttgggccagctgtccaccatctcacctgtgctctatgccaacattaattttcctaatctcaagcaagactacccagactggtcaagccgttgcaaacaaatcatgaagctctggagaaaggttccagcagctgacaaagccccctacctgcaaaaggccaaagataaccgggcagctcaccgcatcaacaaggtgcagaagcaggctgagagccagatcaacaagcagaccaaggtgggcgacatagcccgtaagactgaccgaccggccctacatctccgcattcccccgcagccaggggcactgggcagcccgccccccgctgctgcccccaccattttcattggcagccccactacccccgccggcttgtctacctctgcggacgggttcctgaagccgccggcgggctcggtgcctggccctgactcgcctggtgagctcttcctcaagctcccaccccaggtgcccgcccaagtgccttcgcaggacccctttggactggcccctgcctatcccctggagccccgcttccccacggcaccgcccacctatcccccctatcctagtcctacgggggcccctgcgcagcccccgatgctgggcgcctcatctcgtcctggggctggccagccaggggaattccacactaccccacctggcacccccagacaccagccctccacacctgacccattcctcaaaccccgctgcccctcgctggataacttggctgtgcctgagagccctggggtagggggaggcaaagcttccgagcccctgctctcgcccccaccttttggggagtcccggaaggccctagaggtgaagaaggaagagcttggggcatcctctcctagctatgggcccccaaacctgggctttgttgactcaccctcctcaggcacccacctgggtggcctggagttaaagacacctgatgtcttcaaagcccccctgacccctcgggcatctcaggtagagccccagagcccgggcttgggcctaaggccccaggagccaccccctgcccaggctttggcaccttctcctccaagtcacccagacatctttcgccctggctcctacactgacccatatgctcagcccccattgactcctcggccccaacctccgccccctgagagctgctgtgctctgccccctcgctcactgccctccgaccctttctcccgagtgcctgccagtcctcagtcccagtccagctcccagtctccactgacaccccggcctctgtctgctgaagctttttgcccatcacccgttacccctcgcttccagtcccctgacccttattctcgcccaccctcacgccctcagtcccgtgacccatttgccccattgcataagccaccccgaccccagccccctgaagttgcctttaaggctgggtctctagcccacacttcgctgggggctggggagttcccagcagccctgcccgcggggccagcaggtgagctccatgccaaggtcccaagtgggcagccccccaattttgtccggtcccctgggacgggtgcatttgtgggcaccccctctcccatgcgtttcactttccctcaggcagtaggggagccttccctaaagccccctgtccctcagcctggtctcccgccaccccatgggatcaacagccattttgggcccggccccaccttgggcaagcctcaaagcacaaactacacagtagccacagggaacttccacccatcgggcagccccctggggcccagcagcgggtccacaggggagagctatgggctgtccccactacgccctccgtcggttctgccaccacctgcacccgacggatccctcccctacctgtcccatggagcctcacagcgatcaggcatcacctctcctgtcgaaaagcgagaagacccagggactggaatgggtagctctttggcgacagctgaactcccaggtacccaggacccaggcatgtccggccttagccaaacagagctggagaagcaacggcagcgccagcgactacgagagctgctgattcggcagcagatccagcgcaacaccctgcggcaggagaaggaaacagctgcagcagctgcaggagcagtggggcctccaggcagctggggtgctgagcccagcagccctgcctttgagcagctgagtcgaggccagaccccctttgctgggacacaggacaagagcagccttgtggggttgcccccaagcaagctgagtggccccatcctggggccagggtccttccctagcgatgaccgactctcccggccacctccaccagccacgccttcctctatggatgtgaacagccggcaactggtaggaggctcccaagctttctatcagcgagcaccctatcctgggtccctgcccttacagcagcaacagcaacaactgtggcagcaacaacaggcaacagcagcaacctccatgcgatttgccatgtcagctcgctttccatcaactcctggacctgaacttggccgccaagccctaggttccccgttggcgggaatttccacccgtctgccaggccctggtgagccagtgcctggtccagctggtcctgcccagttcattgagctgcggcacaatgtacagaaaggactgggacctgggggcactccgtttcctggtcagggcccacctcagagaccccgtttttaccctgtaagtgaggacccccaccgactggctcctgaagggcttcggggcctggcggtatcaggtcttcccccacagaaaccctcagccccaccggcccctgaattgaacaacagtcttcatccaacaccccacaccaagggtcctaccctgccaactggtttggagctggtcaaccggcccccgtcgagcactgagcttggccgccccaatcctctggccctggaagctgggaagttgccctgtgaggatcccgagctggatgacgattttgatgcccacaaggccctagaggatgatgaagagcttgctcacctgggtctgggtgtggatgtggccaagggtgatgatgaacttggcaccttagaaaacctggagaccaatgacccccacttggatgacctgctcaatggagacgagtttgacctgctggcatatactgatcctgagctggacactggggacaagaaggatatcttcaatgagcacctgaggctggtagaatcggctaatgagaaggctgaacgggaggccctgctgcggggggtggagccaggacccttgggccctgaggagcgccctccccctgctgctgatgcctctgaaccccgcctggcatctgtgctccctgaggtgaagcccaaggtggaggagggtggacgccacccttctccttgccaattcaccattgctacccccaaggtagagcccgcacctgctgccaattcccttggcctggggctaaagccaggacagagcatgatgggcagccgggatacccggatgggcacagggccattttctagcagtgggcacacagctgagaaggcctcctttggggccacgggaggaccaccagctcacctgctgacccccagcccactgagtggcccaggaggatcctccctgctggaaaagtttgagctcgagagtggggctttgaccttgcctggtggacctgcagcatctggggatgagctagacaagatggagagctcactggtagccagcgagttacccctgctcattgaggacctgttggagcatgagaagaaggagctgcagaagaagcagcagctttcagcacagttgcagcctgcccagcagcagcagcaacagcagcagcagcattccctactgtctgcaccaggccctgcccaggccatgtctttgccacatgagggctcttctcccagtttggctgggtcccaacagcagctttccctgggtcttgcaggtgcccgacagccaggtttgccccagccactgatgcccacccagccaccagctcatgccctccagcaacgcctggctccatccatggctatggtgtccaatcaagggcatatgctaagtgggcagcatggagggcaggcaggcttggtaccccagcagagctcacagccagtgctatcacagaagcccatgggcaccatgccaccttccatgtgcatgaagccgcagcaattggcaatgcagcagcagctggcaaacagcttcttcccagatacagacctggacaaatttgctgcagaagatatcattgatcccattgcaaaggccaagatggtggctttgaaaggcatcaagaaagtgatggctcagggcagcattggggtggcacctggtatgaacagacagcaagtgtctctgctagcccagaggctctcggggggacctagcagtgatctgcagaaccatgtggcagctgggagtggccaggagcggagtgctggtgatccctcccagcctcgtcccaacccgcccacttttgctcagggagtgatcaatgaagctgaccagcggcagtatgaggagtggctgttccatacccagcagctcctacagatgcagctgaaggtgctagaggagcagattggtgtacaccgcaagtcccggaaggctctgtgtgccaagcagcgcactgccaaaaaagctggccgtgagttcccagaagctgatgctgagaagctcaagctggttacagagcagcagagcaagatccagaaacaactggatcaggtccggaaacagcagaaggagcacactaatctcatggcagaatatcggaacaagcagcagcaacaacagcagcagcagcagcaacaacagcaacagcactcagctgtgctggctctcagcccttcccagagtccccggctgctcaccaagctccctggtcagctgctccctggccatgggctgcagccaccacaggggcctccgggtgggcaagccggaggtcttcgcctgacccctgggggtatggcactacctggacagcctggtggccccttccttaatacagctctggcccaacagcagcaacagcaacattctggtggggctggatccctggctggcccttcagggggcttcttccctggcaaccttgctcttcgaagcctcggacctgattcaaggcttttacaggaaaggcagctgcagctgcagcagcaacgtatgcagctggcccagaaactgcagcagcagcagcagcagcaacagcagcagcagcaccttctaggacaggtggcaatccagcagcaacagcagcagggtcctggagtacagacaaaccaagctctgggtcccaagccccagggccttatgcctcccagcagccaccaaggcctcctggtccagcagctgtcccctcaaccaccccaggggccccagggcatgctgggccctgcccaggtggctgtgttgcagcagcagcaccctggagctttgggcccccagggccctcacagacaggtgcttatgacccagtcccgggtgctcagttccccccagctggcacagcagggtcagggccttatgggacacaggctggtcacagcccagcagcagcagcagcaacaacagcaccaacagcaagggtccatggcagggctgtcccatcttcagcagagtctgatgtcacacagtgggcagcccaaactgagcgctcagcccatgggctctttacagcagcttcagcagcagcagcagctgcaacagcaacagcaacttcagcagcagcagcagcagcagctacaacagcaacagcaacttcagcagcaacagcttcaacagcagcaacagcagcagcagcttcaacaacagcagcagcaacagcttcaacagcagcaacagcagctacaacagcaacagcaacaacaacagcagcagtttcaacagcagcagcaacagcagcagatgggccttttaaaccagagtcgaactttactgtctcctcagcaacaacagcagcagcaagtggcacttggccctggcatgccagcaaagcctcttcaacacttttctagccctggagccctgggtccaaccctcctcctgacgggcaaggaacaaaacaccgtagacccagccgtttcttcagaggccactgaggggccctctacacatcagggagggccgttagcaataggaactacccctgagtcaatggccactgaaccaggagaggtaaagccctcactctctggggactcacaactcctgcttgtccaaccccagccccagcctcagcccagctctctgcagctgcagccacctctgaggcttccaggacaacagcagcagcaagttagcctgctccacacagcaggtggaggaagccatgggcagctaggcagtggatcatcttctgaggcctcatctgtgccccacctgctggctcagccctctgtttccttaggggatcagcctgggtccatgacccagaaccttctgggcccccaacagcccatgctagagcggcccatgcaaaataatacagggccacaacctcccaaaccaggacctgtcctccagtctgggcagggtctgcctggggttggaatcatgcctacggtgggtcagcttcgagcacagctccaaggagtcctggccaaaaacccacagctgcggcacttaagtcctcagcagcagcagcagctacaggcactcctcatgcagcggcagctgcagcagagtcaggcagtacgccagaccccaccctaccaggagcctgggacccagacctctcccctccagggcctcctgggctgccaacctcaacttgggggcttccctggaccacagacaggccccctccaggagctaggggcagggcctcgacctcagggcccaccccggctccctgccccaccaggagccttatctacaggaccagtccttggccctgtccatcccacacctccaccatccagccctcaagagccaaagagaccttcacaattaccttcccccagctcccagcttcccactgaggcccagctccctcccacccatccagggacccccaaacctcaggggccaaccttggagccgcctcctgggagggtctcacctgctgctgcccagcttgcagataccttgtttagcaagggtctgggaccttgggatcccccagacaacctagcagaaacccagaagccagagcagagcagcctggtacctgggcatctggaccaggtgaatggacaggtggtgcctgaggcatcccaactcagcatcaagcaggaacctcgggaagagccatgtgccctgggagcccagtcagtgaagagggaggccaatggggagccaataggggcaccaggaaccagcaaccacctcctgctggcaggccctcgctcagaagctgggcatctgctcttgcagaagctactccgggcaaagaatgtgcaactcagcactgggcgggggtccgaggggctgcgagctgagatcaacgggcacattgacagcaagctggctgggctggagcagaaactacagggtacccccagcaacaaggaggatgcagcagcaaggaagcctttgacaccgaagcccaagcgggtacagaaggcaagcgacaggttggtgagctcccgaaagaagctgcggaaggaggacggggtcagggccagcgaggccttgctgaaacagctgaaacaggagctgtccctgctgcccctaacggagcctgctatcaccgccaattttagcctctttgccccctttggcagtggctgcccagtcaatgggcagagccagctgaggggggcctttggaagtggggcgctgcccactggccctgactactattcccagctgcttaccaagaataacctgagtaacccgccgacaccaccctcgtcgctgccccccaccccacccccatcggtgcagcagaagatggtgaatggcgtcaccccatctgaagagctgggggagcaccccaaggatgctgcctctgcccgggatagtgaaagggcactgagggatacttcagaggtgaagagtctagacctgctggctgccttgcctacaccccctcacaatcagactgaggatgtcaggatggagagtgatgaggatagcgattctcctgacagcattgtgccagcttcatcccctgagagcatcttgggggaggaggcccctcgtttccctcatctgggctcaggccggtgggagcaagaggaccgggccctctcccctgtcatccccctcattcctcgggccagcatcccagtcttcccagataccaaaccttatggggcccttggcctggaggtccctggaaagctgcctgtcacaacttgggaaaagggcaaaggaagtgaggtgtcagtcatgctcacagtctctgctgctgcagccaagaacctgaatggcgtgatggtggcagtggcggagctgctgagcatgaagatccccaactcctatgaggtgctgttcccagagagccccgcccgggcaggcactgagccaaagaagggggaagctgagggtcctggtgggaaggaaaagggtctggaaggcaagagcccagacactggccctgattggctgaagcagtttgatgcagtgttgcctggctataccctgaagagccaactagacatcttgagcctcctgaaacaggagagccccgccccagagccacccactcagcacagctatacctacaatgtctccaatctggatgtgcgacagctctcggccccacctcctgaagaaccctccccgcccccttcccccttggcaccttctcctgccagtccccctactgagcccttggttgaacttcccaccgaacccttggctgagccacccgtcccctcacctctgccactggcctcatcccctgaatcagcccgacccaagccccgtgcccggccccctgaagaaggtgaagattcccgtcctcctcgcctcaagaaatggaaaggagtgcgctggaagcggcttcggctgctgctgaccatccagaagggcagtgggcggcaggaggatgagcgggaagtggcagagtttatggagcagcttggcacagccttgcgacctgacaaggtaccgcgagacatgcgtcgctgctgtttctgtcatgaggagggtgacggggccactgatgggcctgcccgtctgctgaacctggacctggacctgtgggtgcacctcaactgtgccctttggtccacggaggtgtatgagacccagggcggggcactgatgaatgtggaggttgccctgcaccgaggactgctaaccaagtgctccctgtgccagcgaactggtgccaccagcagctgcaatcgcatgcgttgccccaatgtctaccattttgcttgtgccatccgtgccaagtgcatgttcttcaaggacaagaccatgctgtgtccaatgcataagatcaaggggccctgtgagcaagagctgagctcttttgctgtcttccggcgggtctacattgagcgggacgaggtgaagcaaatcgctagcatcattcagcggggagaacggctgcacatgttccgtgtggggggccttgtgttccacgccatcggacagctgctgcctcaccagatggctgactttcatagtgccactgccctctatcccgtgggctacgaggccacgcgcatctattggagcctccgcaccaacaatcgtcgctgctgctatcgctgttctattggtgagaacaacgggcggccggagtttgtaatcaaagtcatcgagcagggcctggaggacctggtcttcactgacgcctctccccaggccgtgtggaatcgcatcattgagcctgtggctgccatgagaaaagaggctgacatgctgcgactcttccctgagtatctgaagggcgaggagctctttgggctgacggtgcatgccgtgcttcgcatagctgaatcactgcccggggtggagagctgtcaaaactatttattccgctatgggcgccacccccttatggagctgccactcatgatcaaccccactggctgtgcccgatcagagcctaaaatcctcacacactacaaacggccccataccctgaacagcaccagcatgtctaaggcatatcagagcaccttcacaggcgagaccaacaccccctacagcaagcagtttgtgcactccaagtcatctcagtaccggcggctgcgcaccgaatggaagaacaacgtgtacctggctcgctcccgtatccagggcctggggctctatgcagccaaggacctagaaaagcacacaatggttatcgagtacattggcaccatcattcggaacgaggtggccaaccggcgggagaaaatctacgaagagcagaatcgaggcatctacatgttccgaataaacaatgaacatgtgattgatgctacgttgaccggcggccctgccaggtacattaaccattcctgtgcccctaactgtgtggccgaagtcgtgacatttgacaaagaggacaaaatcatcatcatctccagccggcgaatccccaaaggagaggagctaacctatgactatcagtttgattttgaggacgatcagcacaagatcccctgccactgtggagcctggaattgtcggaaatggatgaactaa

SEQ ID NO: 3555 - DNA, 1578 bp, Homo sapiens
gcgcccttaaagatggtgagggggctcatgctctgagtagaaggtggtgacctccaggagcggtgggatgatgagggcccgggcgcctcttgcaatggagacggtcatttcttcagatagctccccagctgtggaaaatgagcatcctcaagagaccccagaatccaacaatagcgtgtatacttccttcatgaagtctcatcgctgctatgacctgattcccacaagctccaaattggttgtatttgatacgtccctgcaggtgaagaaagctttttttgctttggtgactaacggtgtacgagctgcccctttatgggatagtaagaagcaaagttttgtgggcatgctgaccatcactgatttcatcaatatcctgcaccgctactataaatcagccttggtacagatctatgagctagaagaacacaagatagaaacttggagagaggtgtatctccaggactcctttaaaccgcttgtctgcatttctcctaatgccagcttgtttgatgctgtctcttcattaattcggaacaagatccacaggctgccagttattgacccagaatcaggcaatactttgtacatcctcacccacaagcgcattctgaagttcctcaaattgtttatcactgagttccccaagccagagttcatgtccaagtctctggaagagctacagattggcacctatgccaatattgctatggttcgcactaccacccccgtctatgtggctctggggatttttgtacagcatcgagtctcagccctgccagtggtggatgagaaggggcgtgtggtggacatctactccaagtttgatgttatcaatctggcagcagaaaagacctacaacaacctagatgtatctgtgactaaagccttgcaacatcgatcacattactttgagggtgttctcaagtgctacctgcatgagactctggagaccatcatcaacaggctagtggaagcagaggttcaccgacttgtagtggtggatgaaaatgatgtggtcaagggaattgtatcactgtctgacatcctgcaggccctggtgctcacaggtggagagaagaagccctgagctgggggaaggggtcatgcagcaccaggggatatgcccaactcactgcctgctggaagctctgtgggaatcagatgaaacttgagggaattgtgactctgttccctgttcagggtcccctgcccttctatctgggagctagggaaggtatgggggaggaaagagaatggatttatagctacccttaccctcacacatacacttgaaaaaactttcagcctagccagttctagcccctgtcctcttagatatatccccctttctgggtgaactataggctctgtgcctctcagacaaattctgatctctaagagatccccagacctcacttgcctctgcctccatcttggccctgattcaaccctaagataatagcacaacaaaattcttcataaagatatttttattcacctgttccgtgctatatggaggaggccaagtccatttagtgacatttcttcccataatgtgagtggggaggattgtgg

SEQ ID NO: 3556 - protein, 331 aa, Homo sapiens
METVISSDSSPAVENEHPQETPESNNSVYTSFMKSHRCYDLIPTSSKLVVFDTSLQVKKAFFALVTNGVRAAPLWDSKKQSFVGMLTITDFINILHRYYKSALVQIYELEEHKIETWREVYLQDSFKPLVCISPNASLFDAVSSLIRNKIHRLPVIDPESGNTLYILTHKRILKFLKLFITEFPKPEFMSKSLEELQIGTYANIAMVRTTTPVYVALGIFVQHRVSALPVVDEKGRVVDIYSKFDVINLAAEKTYNNLDVSVTKALQHRSHYFEGVLKCYLHETLETIINRLVEAEVHRLVVVDENDVVKGIVSLSDILQALVLTGGEKKP

SEQ ID NO: 3557 - DNA, 1305 bp, Homo sapiens
ctcgactcttagcttgtcggggacggtaaccgggacccggtgtctgctcctgtcgccttcgcctcctaatccctagccactatggtgatgcatctccatccacgttggccaggctggtgtccagattggcaatgcctgctgggagctctactgcctggaacacggcatccagcccgatggccagatgccaagtgacaagaccattgggggaggagatgactccttcaacaccttcttcagtgagacgggcgctgcacctaccgccagctcttccaccctgagcagctcatcacaggcaaggaagatgctgccaataactatgcccgagggcactacaccattggcaaggagatcattgaccttgtgttggaccgaattcgcaagctggctgaccagtgcaccggtcttcagggcttcttggttttccacagctttggtgggggaactggttctgggttcacctccctgctcatggaacgtctctcagttgattatggcaagaagtccaagctggagttctccatttacccagcaccccaggtttccacagctgtagttgagccctacaactccatcctcaccacccacaccaccctggagcactctgattgtgccttcatggtagacaatgaggccatctatgacatctgtcgtagaaacctcgatatcgagcgcccaacctacactaaccttaaccgccttattagccagattgtgtcctccatcactgcttccgtcatctctgctgagaaagcctaccatgaacagctttctgtagcagagatcaccaatgcttgctttgagccagccaaccagatggtgaaatgtgaccctcgccatggtaaatacatggcttgctgcctgttgtaccgtggtgacgtggttcccaaagatgtcaatgctgccattgccaccatcaaaaccaagcgcagcatccagtttgtggattggtgccccactggcttcaaggttggcatcaactaccagcctcccactgtggtgcctggtggagacctggccaaggcgagttttcagaggcccgtgaagatatggctgcccttgagaaggattatgaggaggttggtgtggattctgttgaaggagagggtgaggaagaaggagaggaatactaattatccattccttttggccctgcagcatgtcatgctcccagaatttcagcttcagcttaactgacagacgttaaagctttctggttagattgttttcacttggtgatcatgtcttttccatgtgtacctgtaatatttttccatcatatctcaaagtaaagtcattaacatc

SEQ ID NO: 3558 - protein, 241 aa, Homo sapiens
MERLSVDYGKKSKLEFSIYPAPQVSTAVVEPYNSILTTHTTLEHSDCAFMVDNEAIYDICRRNLDIERPTYTNLNRLISQIVSSITASVISAEKAYHEQLSVAEITNACFEPANQMVKCDPRHGKYMACCLLYRGDVVPKDVNAAIATIKTKRSIQFVDWCPTGFKVGINYQPPTVVPGGDLAKASFQRPVKIWLPLRRIMRRLVWILLKERVRKKERNTNYPFLLALQHVMLPEFQLQLN

SEQ ID NO: 3559 - DNA, 2527 bp, Homo sapiens
ctccagcagcacccgagagggtcaggagaaaagcggaggaagctgggtaggccctgaggggcctcggtaagccatcatgaccacccggcaagccacgaaggatcccctcctccggggtgtatctcctacccctagcaagattccggtacgctctcagaaacgcacgcctttccccactgttacatcgtgcgccgtggaccaggagaaccaagatccaaggagatgggtgcagaaaccaccgctcaatattcaacgccccctcgttgattcagcaggccccaggccgaaagccaggcaccaggcagagacatcacaaagattggtggggatcagtcagcctcggaaccccttggaagagctcaggcctagccctaggggtcaaaatgtggggcctgggccccctgcccagacagaggctccagggaccatagagtttgtggctgaccctgcagccctggccaccatcctgtcaggtgagggtgtgaagagctgtcacctggggcgccagcctagtctggctaaaagagtactggttcgaggaagtcagggaggcaccacccagagggtccagggtgttcgggcctctgcatatttggcccccagaacccccacccaccgactggaccctgccagggcttcctgcttctctaggctggagggaccaggacctcgaggccggacattgtgtccccagaggctacaggctctgatttcaccttcaggaccttcctttcacccttccactcgccccagtttccaggagctaagaagggagacagctggcagcagccggacttcagtgagccaggcctcaggattgctcctggagaccccagtccagcctgctttctctcttcctaaaggagaacgcgaggttgtcactcactcagatgaaggaggtgtggcctctcttggtctggcccagcgagtaccattaagagaaaaccgagaaatgtcacataccagggacagccatgactcccacctgatgccctcccctgcccctgtggcccagcccttgcctggccatgtggtgccatgtccatcaccctttggacgggctcagcgtgtaccctccccaggccctccaactctgacctcatattcagtgttgcggcgtctcaccgttcaacctaaaacccggttcacacccatgccatcaacccccagagttcagcaggcccagtggctgcgtggtgtctcccctcagtcctgctctgaagatcctgccctgccctgggagcaggttgccgtccggttgtttgaccaggagagttgtataaggtcactggagggttctgggaaaccaccggtggccactccttctggaccccactctaacagaacccccagcctccaggaggtgaagattcaacgcatcggtatcctgcaacagctgttgagacaggaagtagaggggctggtagggggccagtgtgtccctcttaatggaggctcttctctggatatggttgaacttcagcccctgctgactgagatttctagaactctgaatgccacagagcataactctgggacttcccaccttcctggactgttaaaacactcagggctgccaaagccctgtcttccagaggagtgcggggaaccacagccctgccctccggcagagcctgggcccccagaggccttctgtaggagtgagcctgagataccagagccctccctccaggaacagcttgaagtaccagagccctaccctccagcagaacccaggcccctagagtcctgctgtaggagtgagcctgagataccggagtcctctcgccaggaacagcttgaggtacctgagccctgccctccagcagaacccaggcccctagagtcctactgtaggattgagcctgagataccggagtcctctcgccaggaacagcttgaggtacctgagccctgccctccagcagaacccgggccccttcagcccagcacccaggggcagtctggacccccagggccctgccctagggtagagctgggggcatcagagccctgcaccctggaacatagaagtctagagtccagtctaccaccctgctgcagtcagtgggctccagcaaccaccagcctgatcttctcttcccaacacccgctttgtgccagcccccctatctgctcactccagtctttgagacccccagcaggccaggcaggcctcagcaatctggcccctcgaaccctagccctgagggagcgcctcaaatcgtgtttaaccgccatccactgcttccacgaggctcgtctggacgatgagtgtgccttttacaccagccgagcccctccctcaggccccacccgggtctgcaccaaccctgtggctacattactcgaatggcaggatgccctgtgtttcattccagttggttctgctgccccccagggctctccatgatgagacaaccactcctgccctgccgtacttcttccttttagcccttatttattgtcggtctgcccatgggactgggagccgcccacttttgtcctcaataaagtttctaaagta

SEQ ID NO: 3560 - DNA, 675 bp, Homo sapiens
tccagaccaacctggtgccctatccccgcatccacttccctctggccacatatgcccctgtcatctctgctgagaaagcctaccatgaacagctttctgtagcagagatcaccaatgcttgctttgagccagccaaccagatggtgaaatgtgaccctcgccatggtaaatacatggcttgctgcctgttgtaccgtggtgacgtggttcccaaagatgtcaatgctgccattgccaccatcaagaccaagcgtaccatccagtttgtggattggtgccccactggcttcaaggttggcatcaactaccagcctcccactgtggtgcctggtggagacctggccaaggtacagagagctgtgtgcatgctgagcaacaccacagccattgctgaggcctgggctcgcctggaccacaagtttgacctgatgtatgccaaacgtgcctttgttcaccacccacaccaccctggagcactctgattgtgccttcatggtagacaatgaggccatctatgacatctgtcgtagaaacctcgatatcgagcgcccaacctacactaaccttaaccgccttattagccagattgtgtcctccatcactgcttccctgagatttgatggagccctgaatgttgacctgacagaattccagaccaacctggtgccctacccc

SEQ ID NO: 3561 - DNA, 565 bp, Homo sapiens
aatacatggcttgctgcctgttgtaccgtggtgacgtggttcccaaagatgtcaatgctgccattgccaccatcaagaccaagcgtaccatccagtttgtggattggtgccccactggcttcaaggttggcatcaactaccagcctcccactgtggtgcctggtggagacctggccaaggtacagagagctgtgtgcatgctgagcaacaccacagccattgctgaggcctgggctcgcctggaccacaagtttgacctgatgtatgccaaacgtgcctttgttcactggtacgttggggaggggatggaggaaggtgagttttcagaggcccgtgaggacatggctgcccttgagaaggattatgaggaggttggtgtggattctgttgaaggagagggtgaggaagaaggagaggaatactaaagttaaaacgtcacaaaggtgctgcttttacagggaagcttattctgttttaaacattgaaaagttgtggtctgacatgaatgctttgttacagacccaagctgtccatttctgtgatgggttttgaataaagtattccc

SEQ ID NO: 3562 - DNA, 1039 bp, Homo sapiens
ctccttgactcgaaccttggacagtggcattgggaccttcccacccccagaccatggtagcagtgggacccccagcaagaatcttcctaagaccaagccaccgcggctggatcccccacctggggtacccccagctcggcccccaccccttaccaaagtcccccgccgcgcccacacactggagcgggaggtgccaggcatagaggagctgctggtgagtgggcggcaccccagcatgccagccttccctgcactgctacccgctgctccgggccaccggggccatgagacctgtcctgatgatccctgtgaagacccaggccccacccctcctgtccagctggccaagaactggaccttccccaatactagggcagccggcagctcctcggaccctctcatgtgcccaccccgacaactggaggggctgcccaggacccccatggccctgcccgtggaccggaagcgaagccaggagcccagccgcccgtcccctacgccccagggcccacctttcgggggtagccgcacccccagcacttcggacatggccgaggaaggcagagtggccagcgggggccccccagggctggagacctcggagtctctcagtgactcactctacgactcgctgtcctcttgtgggagtcagggctgaggggctgcgccacgccacggccccgctggagctggggaccacagactggaccggctctcttcatgcccagcccccggagacggggacccctccctgaagggaccaaggaggcaggtggataagaaggtgaaaagggggtccctggcacaccccaccacccactgcttcggcggatgagatgaccgtgctcagctcagggagagaccccgcccttggtcccttctctcacccagagtaaggctcttcctggaagggactgggggttaaaggccactgtgtcgcagccccccagtccctacttcaggctgagccatcttgtggtgctgggcttcctgcccgaagccctcgcgaggccctcctggaggcccccgtgctggtgga

SEQ ID NO: 3563 - protein, 882 aa, Homo sapiens
MFMGAGDAPLGSRPGHPHSSSQVKSKLQIGPPSPGEAQGPLLPSPARGLKFLKLPPTSEKSPSPGGPQLSPQLPRNSRIPCRNSGSDGSPSPLLARRGLGGGELSPEGAQGLPTSPSPCYTTPDSTQLRPPQSALSTTLSPGPVVSPCYENILDLSRSTFRGPSPEPPPSPLQVPTYPQLTLEVPQAPEVLRSPGVPPSPCLPESYPYGSPQEKSLDKAGSESPHPGRRTPGNSSKKPSQGSGRRPGDPGSTPLRDRLAALGKLKTGPEGALGSEKNGVPARPGIEKTRGPGKSGESAGDMVPSIHRPLEQLEAKGGIRGAVALGTNSLKQQEPGLMGDPGARVYSSHSMGARVDLEPVSPRSCLTKVELAKSRLAGALCPQVPRTPAKVPTSAPSLGKPNKSPHSSPTKLPSKSPTKVVPRPGAPLVTKESPKPDKGKGPPWADCGSTTAQSTPLVPGPTDPSQGPEGLAPHSAIEEKVMKGIEENVLRLQGQERAPGAEVKHRNTSSIASWFGLKKSKLPALNRRTEATKNKEGAGGGSPLRREVKMEARKLEAESLNISKLMAKAEDLRRALEEEKAYLSSRARPRPGGPAPGPNTGLGQVQGQLAGMYQGADTFMQQLLNRVDGKELPSKSWREPKPEYGDFQPVSSDPKSPWPACGPRNGLVGPLQGCGKPPGKPSSEPGRREEMPSEDSLAEPVPTSHFTACGSLTRTLDSGIGTFPPPDHGSSGTPSKNLPKTKPPRLDPPPGVPPARPPPLTKVPRRAHTLEREVPGIEELLVSGRHPSMPAFPALLPAAPGHRGHETCPDDPCEDPGPTPPVQLAKNWTFPNTRAAGSSSDPLMCPPRQLEGLPRTPMVRIAAEERERTREQEGVMWGDQFLQ

SEQ ID NO: 3564 - DNA, 2572 bp, Homo sapiens
agagtggagactgctgcacggactctggaaccatgaacatatttgatcgaaagatcaactttgatgcgcttttaaaattttctcatataaccccgtcaacgcagcagcacctgaagaaggtctatgcaagttttgccctttgtatgtttgtggcggctgcaggggcctatgtccatatggtcactcatttcattcaggctggcctgctgtctgccttgggctccctgatattgatgatttggctgatggcaacacctcatagccatgaaactgaacagaaaagactgggacttcttgctggatttgcattccttacaggagttggcctgggccctgccctggagttttgtattgctgtcaaccccagcatccttcccactgctttcatgggcacggcaatgatctttacctgcttcaccctcagtgcactctatgccaggcgccgtagctacctctttctgggaggtatcttgatgtcagccctgagcttgttgcttttgtcttccctggggaatgttttctttggatccatttggcttttccaggcaaacctgtatgtgggactggtggtcatgtgtggcttcgtcctttttgatactcaactcattattgaaaaggccgaacatggagatcaagattatatctggcactgcattgatctcttcttagatttcattactgtcttcagaaaactcatgatgatcctggccatgaatgaaaaggataagaagaaagagaagaaatgaagtgaccatccagcctttcccaattagacttcctctccttccacccctcatttcctttttgcacacattacaggtggtgtgttctgtgataatgaaaagcatcagaaaagcttttgtactttgtggtttcctctattttgaattttttgatcaaaaaactgattagcagaatatagtttggagtttggcttcatcttcctggggttcccctcactcccttttttgtcaaccccatctgtagcctcttcctctactcaggcagtcgacccgccacgatgagaagtgggaccagcagagggcgccaacttcaggagtccgctttcccaccaggcttcattcacccagtggacctgaactgtttggtagagccacccggcccttccttcctcattgttgtttggtatgcgcacagttcctgtgggactgggccgtgagttttccattggaaagaagttcagtggtcccattgttaactcagcctcaaatctcaactgtcaggccctacaaagaaaatggagagcctcttctggtggatgctttgctccctctgagctgcccatgctggtctggcaaacacacctttctgctttgccttcacaaaagtaatgtgttccctttcccaccccttgcctgaccctcagggagtcagcctgcttccatccatgggtgggaagacttcagcacaaaggaaagactaattcttgtcaggcatttttgaaaaggctgattatgtgtatcaaggtacagcatcgtagggttcccctaaacttgccctgtttttgtttttttagtttgttatccccttactgagcggcctctactaggtggctgtgattaaatgtcccaagcaaggatagggaaggggaatggttgagcctctggagatcattgtaaccaatcctgccagacctgtttggggcagtggggagcaaacctagataaggacctgtttggggcagcagggagcaaaatctcctttaacaaccaagcagttcctcattcacatcaacagagcgaggctgtgataacttaggaggcagcaatcctaatagtccttcagtgcattttagtctgtctccaactggacaccagtaggtagtgtcaagccagagattcggggcagtagataaatgttcattttactgatgcactttagtttttggtctgttacctgttttccagaaatttgtggccttttaggcgggagttaggcgaccaaaccagtgagagccccaatccctgcagttttgtggcttcaagtgtgggtggacagtcctaatggggatctccagctccttcctgtgggctgccacagacagctacccccagaagggtcaatgttgggagtggttgtggctctgagctgctctacagagcttcagtgtgagaggatcgagccattgaaagctcattaccagtaggacataatttttggctctccctattcacaaccagtgcacagtttgacacagtggcctcaggttcacagtgcaccatgtcactgtgctatcctacgaaatcatttgtttctaagttgtgtttattcctggagtgacatgccaccccgaatggctcactttcactgaggatgctgtcctctgatttagctgctgcctccagcctctggcttgagaacttactaaaggcacttccttcctgttaaacccctgttaactctccataaatttggtgattctctgctaggcctaagattttgagttaacatctcttgaagccaaactccaccttctgtgctttttgcttgggataatggagtttttctttagaaacagtgccaagaatgacaagatattaaaaaaaaaaaa

SEQ ID NO: 3565 - protein, 237 aa, Homo sapiens
MNIFDRKINFDALLKFSHITPSTQQHLKKVYASFALCMFVAAAGAYVHMVTHFIQAGLLSALGSLILMIWLMATPHSHETEQKRLGLLAGFAFLTGVGLGPALEFCIAVNPSILPTAFMGTAMIFTCFTLSALYARRRSYLFLGGILMSALSLLLLSSLGNVFFGSIWLFQANLYVGLVVMCGFVLFDTQLIIEKAEHGDQDYIWHCIDLFLDFITVFRKLMMILAMNEKDKKKEKK

SEQ ID NO: 3566 - DNA, 3237 bp, Homo sapiens
gcgaagtgaagggtggcccaggtggggccaggctgactgaatgtatctcctagctatggactaaataatacatggggggaaataaacaagtattcatgagggtgaaaatgtgacccagcaggaaaattacaactattttcaattgacgttgaataggatgagtcatggaatttaagtgatttactgaagattatactactggtagatagaagagctaaagaaagatggatactatgatgctgaatgtgcggaatctgtttgagcagcttgtgcgccgggtggagattctcagtgaaggaaatgaagtccaatttatccagttggcgaaggactttgaggatttccgtaaaaagtggcagaggactgaccatgagctggggaaatacaaggatcttttgatgaaagcagagactgagcgaagtgctctggatgttaagctgaagcatgcacgtaatcaggtggatgtagagatcaaacggagacagagagctgaggctgactgcgaaaagctggaacgacagattcagctgattcgagagatgctcatgtgtgacacatctggcagcattcaactaagcgaggagcaaaaatcagctctggcttttctcaacagaggccaaccatccagcagcaatgctgggaacaaaagactatcaaccattgatgaatctggttccattttatcagatatcagctttgacaagactgatgaatcactggattgggactcttctttggtgaagactttcaaactgaagaagagagaaaagaggcgctctactagccgacagtttgttgatggtccccctggacctgtaaagaaaactcgttccattggctctgcagtagaccaggggaatgaatccatagttgcaaaaactacagtgactgttcccaatgatggcgggcccatcgaagctgtgtccactattgagactgtgccatattggaccaggagccgaaggaaaacaggtactttacaaccttggaacagtgactccaccctgaacagcaggcagctggagccaagaactgagacagacagtgtgggcacgccacagagtaatggagggatgcgcctgcatgactttgtttctaagacggttattaaacctgaatcctgtgttccatgtggaaagcggataaaatttggcaaattatctctgaagtgtcgagactgtcgtgtggtctctcatccagaatgtcgggaccgctgtccccttccctgcattcctaccctgataggaacacctgtcaagattggagagggaatgctggcagactttgtgtcccagacttctccaatgatcccctccattgttgtgcattgtgtaaatgagattgagcaaagaggtctgactgagacaggcctgtataggatctctggctgtgaccgcacagtaaaagagctgaaagagaaattcctcagagtgaaaactgtacccctcctcagcaaagtggatgatatccatgctatctgtagccttctaaaagactttcttcgaaacctcaaagaacctcttctgacctttcgccttaacagagcctttatggaagcagcagaaatcacagatgaagacaacagcatagctgccatgtaccaagctgttggtgaactgccccaggccaacagggacacattagctttcctcatgattcacttgcagagagtggctcagagtccacatactaaaatggatgttgccaatctggctaaagtctttggccctacaatagtggcccatgctgtgcccaatccagacccagtgacaatgttacaggacatcaagcgtcaacccaaggtggttgagcgcctgctttccttgcctctggagtattggagtcagttcatgatggtggagcaagagaacattgaccccctacatgtcattgaaaactcaaatgccttttcaacaccacagacaccagatattaaagtgagtttactgggacctgtgaccactcctgaacatcagcttctcaagactccttcatctagttccctgtcacagagagtccgttccaccctcaccaagaacactcctagatttgggagcaaaagcaagtctgccactaacctaggacgacaaggcaacttttttgcttctccaatgctcaagtgaagtcacatctgcctgttacttcccagcattgactgactataagaaaggacacatctgtactctgctctgcagcctcctgtactcattactacttttagcattctccaggcttttactcaagtttaattgtgcatgagggttttattaaaactatatatatctccccttccttctcctcaagtcacataatatcagcactttgtgctggtcattgttgggagcttttagatgagacatctttccaggggtagaagggttagtatggaattggttgtgattctttttggggaagggggttattgttcctttggcttaaagccaaatgctgctcatagaatgatctttctctagtttcatttagaactgatttccgtgagacaatgacagaaaccctacctatctgataagattagcttgtctcagggtgggaagtgggagggcagggcaaagaaaggattagaccagaggatttaggatgcctccttctaagaaccagaagttctcattccccattatgaactgagctataatatggagctttcataaaaatgggatgcattgaggacagaactagtgatgggagtatgcgtagctttgatttggatgattaggtctttaatagtgttgagtggcacaaccttgtaaatgtgaaagtacaactcgtatttatctctgatgtgccgctggctgaactttgggttcatttggggtcaaagccagtttttcttttaaaattgaattcattctgatgcttggcccccatacccccaaccttgtccagtggagcccaacttctaaaggtcaatatatcatcctttggcatcccaactaacaataaagagtaggctataagggaagattgtcaatattttgtggtaagaaaagctacagtcattttttctttgcactttggatgctgaaatttttcccatggaacatagccacatctagatagatgtgagctttttcttctgttaaaattattcttaatgtctgtaaaaacgattttcttctgtagaatgtttgacttcgtattgacccttatctgtaaaacacctatttgggataatatttggaaaaaaagtaaatagctttttcaaaatgaaaaaaaaaa

SEQ ID NO: 3567 - protein, 632 aa, Homo sapiens
MDTMMLNVRNLFEQLVRRVEILSEGNEVQFIQLAKDFEDFRKKWQRTDHELGKYKDLLMKAETERSALDVKLKHARNQVDVEIKRRQRAEADCEKLERQIQLIREMLMCDTSGSIQLSEEQKSALAFLNRGQPSSSNAGNKRLSTIDESGSILSDISFDKTDESLDWDSSLVKTFKLKKREKRRSTSRQFVDGPPGPVKKTRSIGSAVDQGNESIVAKTTVTVPNDGGPIEAVSTIETVPYWTRSRRKTGTLQPWNSDSTLNSRQLEPRTETDSVGTPQSNGGMRLHDFVSKTVIKPESCVPCGKRIKFGKLSLKCRDCRVVSHPECRDRCPLPCIPTLIGTPVKIGEGMLADFVSQTSPMIPSIVVHCVNEIEQRGLTETGLYRISGCDRTVKELKEKFLRVKTVPLLSKVDDIHAICSLLKDFLRNLKEPLLTFRLNRAFMEAAEITDEDNSIAAMYQAVGELPQANRDTLAFLMIHLQRVAQSPHTKMDVANLAKVFGPTIVAHAVPNPDPVTMLQDIKRQPKVVERLLSLPLEYWSQFMMVEQENIDPLHVIENSNAFSTPQTPDIKVSLLGPVTTPEHQLLKTPSSSSLSQRVRSTLTKNTPRFGSKSKSATNLGRQGNFFASPMLK

SEQ ID NO: 3568 - DNA, 3347 bp, Homo sapiens
ctatcccatagtctcgctgccctgagcctcccgtgccggccggccggccgggggaacaggcgggcgctcggggggcgctcggggggcggggggagttccggttccggttctttgtgcggctgcatcggcggctccgggaagatggcggcccgggcgggtttccagtctgtggctccaagcggcggcgccggagcctcaggaggggcgggcgcggctgctgccttgggcccgggcggaactccggggcctcctgtgcgaatgggcccggctccgggtcaagggctgtaccgctccccgatgcccggagcggcctatccgagaccaggtatgttgccaggcagccgaatgacacctcagggaccttccatgggaccccctggctatggggggaacccttcagtccgacctggcctggcccagtcagggatggatcagtcccgcaagagacctgcccctcagcagatccagcaggtccagcagcaggcggtccaaaatcgaaaccacaatgcaaagaaaaagaagatggctgacaaaattctacctcaaaggattcgtgaactggtaccagaatcccaggcctatatggatctcttggcttttgaaaggaaactggaccagactatcatgaggaaacggctagatatccaagaggccttgaaacgtcccatcaagcaaaaacggaagctgcgaattttcatttctaacactttcaatccggctaagtcagatgccgaggatggggaagggacggtggcttcctgggagcttcgggtagaaggacggctcctggaggattcagccttgtccaaatatgatgccactaaacaaaagaggaagttctcttccttttttaagtccttggtgattgaactggacaaagacctgtatgggccagacaaccatctggtagaatggcacaggaccgccactacccaggagaccgatggctttcaggtgaagcggccgggagacgtgaatgtacggtgtactgtcctactgatgctggattaccagcctccccagtttaaattagacccccgcctagctcgactcctgggcatccatacccagactcgtccagtgatcatccaagcactgtggcaatatattaagacacataagctccaggaccctcacgagcgggagtttgtcatctgtgacaagtacctgcagcagatctttgagtctcaacgtatgaagttttcagagatccctcagcggctccatgccttgcttatgccaccagaacctatcatcattaatcatgtcatcagtgttgacccgaatgatcagaaaaagacagcttgttatgacattgatgttgaagtggatgacaccttgaagacccagatgaattcttttctgctgtccactgccagccaacaggagattgctactctagacaacaagatccatgagacaatagaaaccatcaaccagctgaagactcagcgggagttcatgctgagctttgccagagaccctcagggtttcatcaatgactggcttcagtcccagtgcagggacctcaagacaatgactgatgtggtgggtaacccagaggaggagcgccgagctgagttctacttccagccctgggctcaggaggctgtgtgccgatacttctactccaaggtgcagcagagacgacaagaattagagcaagccctgggaatccggaatacatagggcctctcccacagccctgattcgactgcaccaattcttgatttgggccctgtgctgcctgcctcatagtatctgccttggtcttgcttggggcgttccaggggatgctgttggttcaaggacaacaccagaatgaagagggtctcacaagacacctgttatcctcttctttcaccctatctcttcccacccccagcttccctttgccccacaaagttcccatgtgcctgtaccctcccctggtctacataggacctctagatagtgttagagagagaacatgtagtggtaatgagtgcttggaatggattgggcctcaggccaggtggtcttcaaggggaccagctaactgatcctgcccttcagagacccaggagttgggagctttcgctccttctccaagactcaggcctgtgggcactctataagctagttgatcttggctctcctgataacagaatccaatttccttccttccctccacaggtttggaacaaactctcccttcacttgttgccctgtagcactacagaaaccctggttcttgggctccactgagccccaggtcagtccccagccctctgggttggcctgctgtcagtgcttctctcactccttagttggggtccacatcagtattggagttttgttctttattgctccctcccagacactccctgtggctgccctttgtgattccctcagatctgccctaatcccgggcatttgggtgggggaatcttgcctttccctttcagagccccagggatctcatctggggaactgtcattgccagcagaggctgttccttcctgctgtttggagatgtgactcattcattcactcactccaccctgcctctgcatcccttaatggagaaacgggcctaaaaccaaacgggtaaaaagccctgggccatccctgtcttcctgtcccttgtctgcccagttgacacctactggtgacttctagggcactgaggagtgaaagcgcctagggctggagaatagcgctgagttgggtttgtgactcttccctctccctgcctcacaggattgtgactccccagcccctgccctcaaagcttcagacccctcaggtagcagcaggaccttgtgatcttggccccttggatctgagatggtttttgcatctttccaggagagcctcacattcttcttccaggttgtatcacccccgagttagcatatcccaggctcgcagactcaacacagcaagggtgggagacagctgggcacaaagggggaattccgttcagcatgggctctaaacccacagaactgacaaagcccctgcttccccaccccctcctcaggctcctgcgagcacacccccacccccaaatccctccctgttctacactggggacagcagaattttctccccgtcttccccttcctgccattttccctcccttgaaaggttgacactggacaaccttggggcagctgagccctggccgcctcctggctggaaccatgagaaggaagctcagtacttcccacagtgtccctgttgataactgtttttattaactgaattgtttttttcatggaccaaacttttttttgtactgtccccttattgatgttacccagttttaataaaagaatcttctgaaaaaaaaaaaaaaaaaa

SEQ ID NO: 3569 - protein, 476 aa, Homo sapiens
MGPAPGQGLYRSPMPGAAYPRPGMLPGSRMTPQGPSMGPPGYGGNPSVRPGLAQSGMDQSRKRPAPQQIQQVQQQAVQNRNHNAKKKKMADKILPQRIRELVPESQAYMDLLAFERKLDQTIMRKRLDIQEALKRPIKQKRKLRIFISNTFNPAKSDAEDGEGTVASWELRVEGRLLEDSALSKYDATKQKRKFSSFFKSLVIELDKDLYGPDNHLVEWHRTATTQETDGFQVKRPGDVNVRCTVLLMLDYQPPQFKLDPRLARLLGIHTQTRPVIIQALWQYIKTHKLQDPHEREFVICDKYLQQIFESQRMKFSEIPQRLHALLMPPEPIIINHVISVDPNDQKKTACYDIDVEVDDTLKTQMNSFLLSTASQQEIATLDNKIHETIETINQLKTQREFMLSFARDPQGFINDWLQSQCRDLKTMTDVVGNPEEERRAEFYFQPWAQEAVCRYFYSKVQQRRQELEQALGIRNT

SEQ ID NO: 3570 - DNA, 648 bp, Homo sapiens
tgcactgtgactcaggccttcccatcaggcctatttgtctacccaataaagcgtgttttttccagaaacaagaagagttgggagagggagcttcagtgcatgtggcagtgcgtgtgctggcgcgtatcattgcacagcttggctcgccaaagaccctccctcgagggagagaaaccacagcccccagaattcagcgggcctctccgagagcacggcgcgtctgaggatgcgtatgttgacccgaatgatcagaaaaagacagcttgttatgacattgatgttgaagtggatgacaccttgaagacccagatgaattcttttctgctgtccactgccagccaacaggagattgctactctagacaacaagatccatgagacaatagaaaccatcaaccagctgaagactcagcgggagttcatgctgagctttgccagagaccctcagggtttcatcaatgactggcttcagtcccagtgcagggacctcaagacaatgactgatgtggtgggtaacccagaggaggagcgccgagctgagttctacttccagccctgggctcaggaggctgtgtgccgatacttctactccaaggtgcagcagagacgacaagaattagagcaagccctgggaatccggaatacatag

SEQ ID NO: 3571 - DNA, 1918 bp, Homo sapiens
gtacctcacggaagccggctttggccctgcggctgctaccgtcgccgcggagaaattgttggatctggcagtctaggaatgaatctcctctcagcctttaagctcacctggtcagaatccttggatgagcctgtgggaccgttcctcctagcccggtggtttggaaccagtggctttgggactgtaagaggatggacaaagattctcaggggctgctagattcatccctgatggcatcaggcactgccagccgctcagaggatgaggagtcactggcagggcagaagcgagcctcctcccaggccttgggcaccatccctaaacggagaagctcctccaggttcatcaagaggaagaagttcgatgatgagctggtggagagcagcctggcaaaatcttctacccgggcaaagggggccagtggggtggaaccagggcgctgttcggggagtgaaccctcctccagtgagaagaagaaggtatccaaagcccccagcactcctgtgccacccagcccagccccagcccctggactcaccaagcgtgtgaagaagagtaaacagccacttcaggtgaccaaggatctgggccgctggaagcctgcagatgacctcctgctcataaatgctgtgttgcagaccaacgacctgacctccgtccacctgggcgtgaaattcagctgccgcttcacccttcgggaggtccaggagcgttggtacgccctgctctacgatcctgtcatctccaagttggcctgtcaggccatgaggcagctgcacccagaggctattgcagccatccagagcaaggccctgtttagcaaggctgaggagcagctgctgagcaaagtgggatcgaccagccagcccaccttggagaccttccaggacctgctgcacagacaccctgatgccttctacctggcccgtaccgcgaaggccctgcaggcccactggcagctcatgaagcagtattacctgctggaggaccagacagtgcagccgctgcccaaaggggaccaagtgctgaacttctctgatgcagaggacctgattgatgacagtaagctcaaggacatgcgagatgaggtcctggaacatgagctgatggtggctgaccggcgccagaagcgagagattcggcagctggaacaggaactgcataagtggcaggtgctagtggacagcatcacaggcatgagctctccggacttcgacaaccagacactggcagtgctgcggggccgcatggtgcggtacctgatgcgctcgcgtgagatcaccctgggcagagcaaccaaggataaccagattgatgtggacctgtctctggagggtccggcctggaagatatcccggaaacaaggtgtcatcaagctgaagaacaacggtgatttcttcattgccaatgagggtcgacggcccatctacatcgatggacggccggtgctctgtggctccaaatggcgcctcagcaacaactctgtggtggagatcgccagcctgcgattcgtcttccttatcaaccaggacctcattgccctcatcagggctgaggctgccaagatcacaccacagtgaggagtggtggcaggactcgtgggccctctccggcctgtttcccctgccactccagcccccttgagctgggaactcaggctcctggaaaaacctgggcagtgggaggctcagctgcgggccattgatttgagcctttgagggaggatagggctggcctttgtgaagccagcagaggctgagaacctcaggcttccctagatccagagcccctccccatcttcctctctctaaaaacaaccctaccccccattgccaccttcactcctgtgtctccagctgattagcctcagactcttcttttattgtttttcttttgtaaataaaaagcaccaggttcc

SEQ ID NO: 3572 - DNA, 3655 bp, Homo sapiens
ggcacgaggcgctaggtagagcgccgggacctgtgacagggctggtagcagcgcacaggaaaggcggcttttagccaggtatttcagtgtctgtagacaagatggaatcatctccatttaatagacggcaatggacctcactatcattgagggtaacagccaaagaactttctcttgtcaacaagaacaagtcatcggctattgtggaaatattctccaagtaccagaaagcagctgaagaaacaaacatggagaagaagagaagtaacaccgaaaatctctcccagcactttagaaaggggaccctgactgtgttaaagaagaagtgggagaacccagggctgggagcagagtctcacacagactctctacggaacagcagcactgagattaggcacagagcagaccatcctcctgctgaagtgacaagccacgctgcttctggagccaaagctgaccaagaagaacaaatccaccccagatctagactcaggtcacctcctgaagccctcgttcagggtcgatatccccacatcaaggacggtgaggatcttaaagaccactcaacagaaagtaaaaaaatggaaaattgtctaggagaatccaggcatgaagtagaaaaatcagaaatcagtgaaaacacagatgcttcgggcaaaatagagaaatataatgttccgctgaacaggcttaagatgatgtttgagaaaggtgaaccaactcaaactaagattctccgggcccaaagccgaagtgcaagtggaaggaagatctctgaaaacagctattctctagatgacctggaaataggcccaggtcagttgtcatcttctacatttgactcggagaaaaatgagagtagacgaaatctggaacttccacgcctctcagaaacctctataaaggatcgaatggccaagtaccaggcagctgtgtccaaacaaagcagctcaaccaactatacaaatgagctgaaagccagtggtggcgaaatcaaaattcataaaatggagcaaaaggagaatgtgcccccaggtcctgaggtctgcatcacccatcaggaaggggaaaagatttctgcaaatgagaatagcctggcagtccgttccacccctgccgaagatgactcccgtgactcccaggttaagagtgaggttcaacagcctgtccatcccaagccactaagtccagattccagagcctccagtctttctgaaagttctcctcccaaagcaatgaagaagtttcaggcacctgcaagagagacctgcgtggaatgtcagaagacagtctatccaatggagcgtctcttggccaaccagcaggtgtttcacatcagctgcttccgttgctcctattgcaacaacaaactcagtctaggaacatatgcatctttacatggaagaatctattgtaagcctcacttcaatcaactctttaaatctaagggcaactatgatgaaggctttgggcacagaccacacaaggatctatgggcaagcaaaaatgaaaacgaagagattttggagagaccagcccagcttgcaaatgcaagggagacccctcacagcccaggggtagaagatgcccctattgctaaggtgggtgtcctggctgcaagtatggaagccaaggcctcctctcagcaggagaaggaagacaagccagctgaaaccaagaagctgaggatcgcctggccaccccccactgaacttggaagttcaggaagtgccttggaggaagggatcaaaatgtcaaagcccaaatggcctcctgaagacgaaatcagcaagcccgaagttcctgaggatgtcgatctagatctgaagaagctaagacgatcttcttcactgaaggaaagaagccgcccattcactgtagcagcttcatttcaaagcacctctgtcaagagcccaaaaactgtgtccccacctatcaggaaaggctggagcatgtcagagcagagtgaagaatctgtgggtggaagagttgcagaaaggaaacaagtggaaaatgccaaggcttctaagaagaatgggaatgtgggaaaaacaacctggcaaaacaaagaatctaaaggagagacagggaagagaagtaaggaaggtcatagtttggagatggagaatgagaatcttgtagaaaatggtgcagactccgatgaagatgataacagcttcctcaaacaacaatctccacaagaacccaagtctctgaattggtcgagttttgtagacaacacctttgctgaagaattcactactcagaatcagaaatcccaggatgtggaactctgggagggagaagtggtcaaagagctctctgtggaagaacagataaagagaaatcggtattatgatgaggatgaggatgaagagtgacaaattgcaatgatgctgggccttaaattcatgttagtgttagcgagccactgccctttgtcaaaatgtgatgcacataagcaggtatcccagcatgaaatgtaatttacttggaagtaactttggaaaagaattccttcttaaaatcaaaaacaaaacaaaaaaacacaaaaaacacattctaaatactagagataactttacttaaattcttcattttagcagtgatgatatgcataagtgctgtaaggcttgtaactggggaaatattccacctgataatagcccagattctactgtattcccaaaaggcaatattaaggtagatagatgattagtagtatattgttacacactattttggaattagagaacatacagaaggaatttaggggcttaaacattacgactgaatgcactttagtataaagggcacagtttgtatatttttaaatgaataccaatttaattttttagtatttacctgttaagagattatttagtctttaaattttttaggttaattttcttgctgtgatatatatgaggaatttactactttatgtcctgctctctaaactacatcctgaactcgacgtcctgaggtataatacaacagagcactttttgaggcaattgaaaaaccaacctacactcttcggtgcttagagagatctgctgtctcccaaataagcttttgtatctgccagtgaatttactgtactccaaatgattgctttcttttctggtgatatctgtgcttctcataattactgaaagctgcaatattttagtaataccttcgggatcactgtcccccatcttccgtgttagagcaaagtgaagagtttaaaggaggaagaagaaagaactgtcttacaccacttgagctcagacctctaaaccctgtatttcccttatgatgtcccctttttgagacactaatttttaaatacttactagctctgaaatatattgatttttatcacagtattctcagggtgaaattaaaccaactataggcctttttcttgggatgattttctagtcttaaggtttggggacattataaacttgagtacatttgttgtacacagttgatattccaaattgtatggatgggagggagaggtgtcttaagctgtaggcttttctttgtactgcatttatagagatttagctttaatattttttagagatgtaaaacattctgctttcttagtcttacctagtctgaaacatttttattcaataaagattttaattaaaatttg

SEQ ID NO: 3573 - protein, 759 aa, Homo sapiens
MESSPFNRRQWTSLSLRVTAKELSLVNKNKSSAIVEIFSKYQKAAEETNMEKKRSNTENLSQHFRKGTLTVLKKKWENPGLGAESHTDSLRNSSTEIRHRADHPPAEVTSHAASGAKADQEEQIHPRSRLRSPPEALVQGRYPHIKDGEDLKDHSTESKKMENCLGESRHEVEKSEISENTDASGKIEKYNVPLNRLKMMFEKGEPTQTKILRAQSRSASGRKISENSYSLDDLEIGPGQLSSSTFDSEKNESRRNLELPRLSETSIKDRMAKYQAAVSKQSSSTNYTNELKASGGEIKIHKMEQKENVPPGPEVCITHQEGEKISANENSLAVRSTPAEDDSRDSQVKSEVQQPVHPKPLSPDSRASSLSESSPPKAMKKFQAPARETCVECQKTVYPMERLLANQQVFHISCFRCSYCNNKLSLGTYASLHGRIYCKPHFNQLFKSKGNYDEGFGHRPHKDLWASKNENEEILERPAQLANARETPHSPGVEDAPIAKVGVLAASMEAKASSQQEKEDKPAETKKLRIAWPPPTELGSSGSALEEGIKMSKPKWPPEDEISKPEVPEDVDLDLKKLRRSSSLKERSRPFTVAASFQSTSVKSPKTVSPPIRKGWSMSEQSEESVGGRVAERKQVENAKASKKNGNVGKTTWQNKESKGETGKRSKEGHSLEMENENLVENGADSDEDDNSFLKQQSPQEPKSLNWSSFVDNTFAEEFTTQNQKSQDVELWEGEVVKELSVEEQIKRNRYYDEDEDEE

SEQ ID NO: 3574 - DNA, 816 bp, Homo sapiens
atggaagattcccacaagagtaccacgtcagagacagcacctcaacctggttcagcagttcagggagctcacatttctcatattgctcaacaggtatcatctttatcagaaagtgaggagtcccaggactcatccgacagcataggctcctcacagaaagcccacgggatcctagcacggcgcccatcttacagaaaaattttgaaagacttatcttctgaagatacacggggcagaaaaggagacggagaaaattctggagtttctgctgctgtcacttctatgtctgttccaactcccatctatcagactagcagcggacagtacattgccattgccccaaatggagccttacagttggcaagtccaggcacagatggagtacagggacttcagacattaaccatgacaaattcaggcagtactcagcaaggtacaactattcttcagtatgcacagacctctgatggacagcagatacttgtgcccagcaatcaggtggtcgtacaaactgcatcaggagatatgcaaacatatcagatccgaactacaccttcagctacttctctgccacaaactgtggtgatgacatctcctgtgactctcacctctcagacaactaagacagatgacccccaattgaaaagagaaataaggttaatgaaaaacagagaagctgctcgagaatgtcgcagaaagaagaaagaatatgtgaaatgcctggaaaaccgagttgcagtcctggaaaatcaaaataaaactctaatagaagagttaaaaactttgaaggatctttattccaataaaagtgtttga

SEQ ID NO: 3575 - protein, 271 aa, Homo sapiens
MEDSHKSTTSETAPQPGSAVQGAHISHIAQQVSSLSESEESQDSSDSIGSSQKAHGILARRPSYRKILKDLSSEDTRGRKGDGENSGVSAAVTSMSVPTPIYQTSSGQYIAIAPNGALQLASPGTDGVQGLQTLTMTNSGSTQQGTTILQYAQTSDGQQILVPSNQVVVQTASGDMQTYQIRTTPSATSLPQTVVMTSPVTLTSQTTKTDDPQLKREIRLMKNREAARECRRKKKEYVKCLENRVAVLENQNKTLIEELKTLKDLYSNKSV

SEQ ID NO: 3576 - DNA, 1705 bp, Homo sapiens
gtttttttcccttctgagcaatggagcttaccatctttatcctgagactggccatttacatcctgacatttcccttgtacctgctgaactttctgggcttgtggagctggatatgcaaaaaatggttcccctacttcttggtgaggttcactgtgatatacaacgaacagatggcaagcaagaagcgggagctcttcagtaacctgcaggagtttgcgggcccctccgggaaactctccctgctggaagtgggctgtggcacgggggccaacttcaagttctacccacctgggtgcagggtgacctgtattgaccccaaccccaactttgagaagtttttgatcaagagcattgcagagaaccgacacctgcagtttgagcgctttgtggtagctgccggggagaacatgcaccaggtggctgatggctctgtggatgtggtggtctgcaccctggtgctgtgctctgtgaagaaccaggagcggattctccgcgaggtgtgcagagtgctgagaccgggaggggctttctatttcatggagcatgtggcagctgagtgttcgacttggaattacttctggcaacaagtcctggatcctgcctggcaccttctgtttgatgggtgcaacctgaccagagagagctggaaggccctggagcgggccagcttctctaagctgaagctgcagcacatccaggccccactgtcctgggagttggtgcgccctcatatctatggatatgctgtgaaatagtgtgagctggcagttaagagctgaatggctcaaagaatttaaagcttcagttttacatttaaaatgctaagtgggagaagagaaaccttttttttggggggcggtttttttggtttgttgttggttttttttttttttttggcaagactccgtctcaaaaaaaaaaaaaaaaaaaaaaagaagtagagacagggagacagggtctcactgtgttgcctaggccggtcttgaactcctgggctcaagtgattctcccaccttgacctcctaaattgttgggattacaggtgtgagacagtgcacctggccgaaatagctcaagtttctgaaaaacaaatctgaatctatttgttattcttagcgtcactggtctggctttcagaattaacatacaaggttgccacacctagttctgcccagctttatgtcttttattccagtattccaccaaagtttgttttcctgcattccagttctcaagtcttaagataaagattgtacttgacagtttagtatatccataaaactatttgaggtggttaaggttcttgggttcattttccttaatactttgctgaatattgtagattgtaggcaatgaaaaagtctactaaattaggaaaaccttgaataattaggtatcctaggtaagagcccctaaacatcaagcaatctgtgagtctgtaaagaaataaatattttttggattattcttatctaattccacccctgttggaagatgatttctttgttctttgcaactatggaagctgtgaaaatcatcacaagtgcctctgaaagcgagtgttaggttggttagagggtttaatattttctgcaatggtttgtaggaattttaataaatgtagtatattttctgagatgattttgtaaaagtactattttaaatatcaaatcaaccaataaattcacatttgtgttaggaacag

SEQ ID NO: 3577 - protein, 244 aa, Homo sapiens
MELTIFILRLAIYILTFPLYLLNFLGLWSWICKKWFPYFLVRFTVIYNEQMASKKRELFSNLQEFAGPSGKLSLLEVGCGTGANFKFYPPGCRVTCIDPNPNFEKFLIKSIAENRHLQFERFVVAAGENMHQVADGSVDVVVCTLVLCSVKNQERILREVCRVLRPGGAFYFMEHVAAECSTWNYFWQQVLDPAWHLLFDGCNLTRESWKALERASFSKLKLQHIQAPLSWELVRPHIYGYAVK

SEQ ID NO: 3578 - DNA, 706 bp, Homo sapiens
cagccctctcatctcctggaaccatggccagcacatccaccaccatcaggagccacagcagcagccgccggggtttcagtgccaactcagccaggctccctggggtcagccgctctggcttcagcagcatctccgtgtcccgctccaggggcagtggtggcctgggtggtgcatgtggaggagctggctttggcagccgcagtctgtatggcctggggggctccaagaggatctccattggagggggcagctgtgccatcagtggcggctatggcagcagagccggaggcagctatggctttggtggcgccgggagtggatttggtttcggtggtggagccggcattggctttggtctgggtggtggagccggccttgctggtggctttgggggccctggcttccctgtgtgcccccctggaggcatccaagaggtcaccgtcaaccagagtctcctgactcccctcaacctgcaaattgaccccgccatccagcgggtgcgggccgaggagcgtgagcagatcaagaccctcaacaacaagtttgcctccttcatcgacaaggtgcggttcctagagcagcagaacaaggttctggacaccaagtggaccctgctgcaggagcagggcaccaagactgtgaggcagaacctggagccgttgttcgagcagtacatcaacaacctcaggaggcagctggacaacat

SEQ ID NO: 3579 - DNA, 2298 bp, Homo sapiens
cctgcctctcgcctccagcctccaacgctcgccacagccctctcatctcctggaaccatggccagcacatccaccaccatcaggagccacagcagcagccgccggggtttcagtgccaactcagccaggctccctggggtcagccgctctggcttcagcagcatctccgtgtcccgctccaggggcagtggtggcctgggtggtgcatgtggaggagctggctttggcagccgcagtctgtatggcctggggggctccaagaggatctccattggagggggcagctgtgccatcagtggcggctatggcagcagagccggaggcagctatggctttggtggcgccgggagtggatttggtttcggtggtggagccggcattggctttggtctgggtggtggagccggccttgctggtggctttgggggccctggcttccctgtgtgcccccctggaggcatccaagaggtcaccgtcaaccagagtctcctgactcccctcaacctgcaaattgaccccgccatccagcgggtgcgggccgaggagcgtgagcagatcaagaccctcaacaacaagtttgcctccttcatcgacaaggtgcggttcctagagcagcagaacaaggttctggacaccaagtggaccctgctgcaggagcagggcaccaagactgtgaggcagaacctggagccgttgttcgagcagtacatcaacaacctcaggaggcagctggacagcatcgtcggggaacggggccgcctggactcggagctgagaaacatgcaggacctggtggaggacctcaagaacaaatatgaggatgaaatcaacaagcgcacagcagcagagaatgaatttgtgactctgaagaaggatgtggatgctgcctacatgaacaaggttgaactgcaagccaaggcagacactctcacagatgagatcaacttcctgagagccttgtatgatgcagagctgtcccagatgcagacccacatctcagacacatccgtggtgctatccatggacaacaaccgcaacctggacctggacagcatcatcgctgaggtcaaggcccaatacgaggagattgctcagaggagccgggctgaggctgagtcctggtaccagaccaagtacgaggagctgcaggtcacagcaggcagacatggggacgacctgcgcaacaccaagcaggagattgctgagatcaaccgcatgatccagaggctgagatctgagatcgaccatgtcaagaagcagtgtgccagcctgcaggctgccattgctgatgctgagcagcgtggggagatggcactcaaggatgctaagaacaagctggaagggctggaggatgccctgcagaaggccaagcaggacctggcccggctgctgaaggagtaccaggagctgatgaatgtcaagctggccctggatgtggagatcgccacctaccgcaagctgctggagggcgaggagtgcaggctgaatggcgaaggcgttggacaagtcaacgtctctgtagtacagtccaccatctccagtggctatggcggtgccagcggtgtcggcagtggcttaggcctgggtggaggaagcagctactcctatggcagtggtcttggcattggaggtggcttcagttccagcagtggcagagccattgggggtggcctcagctctgttggaggcggcagttccaccatcaagtacaccaccacctcctcctccagcaggaagagctacaagcactaaagtgctgcctccagctctcggtcccacagtcctcaggcccttctctggctgcagagccgtctcctcaggttgcctatcctctcctggcctctagtcttccctgctctccgaggtagagctgggtatggatgcttagtgccctcacttctctctgtctatacctgccccatctgagcacccattgctcaccatcagatcaacctttgattttacatcataatgtattcaccaatggagcttcactttgttactaaattattaatttcttgcctccaaaattgttctctctgaggctgagcattataagaaaatgatctctgttccttttcattactgaaaatcgcctggggcttatttcagaacaacttccacttattttccattggcccccaaactccctaagttaaaagtattgtgaacccccgccccgcagtatgcatggaagcacaagtgactagtcgtatgatgtacacagtctttctccctgtgatgatttctctgctctttgctctttgtaatttctaaataaagcaggttttagaataa

SEQ ID NO: 3580 - DNA, 2223 bp, Homo sapiens
catggccagcacatccaccaccatcaggagccacagcagcagccgccggggtttcagtgccaactcagccaggctccctggggtcagccgctctggcttcagcagcgtctccgtgtcccgctccaggggcagtggtggcctgggtggtgcatgtggaggagctggctttggcagccgcagtctgtatggcctggggggctccaagaggatctccattggagggggcagctgtgccatcagtggcggctatggcagcagagccggaggcagctatggctttggtggcgccgggagtggatttggtttcggtggtggagccggcattggctttggtctgggtggtggagccggccttgctggtggctttgggggccctggcttccctgtgtgcccccctggaggcatccaagaggtcaccgtcaaccagagtctcctgactcccctcaacctgcaaatcgatcccaccatccagcgggtgcgggctgaggagcgtgaacagatcaagaccctcaacaacaagtttgcctccttcatcgacaaggtgcggttcctggagcagcagaacaaggttctggaaacaaagtggaccctgctgcaggagcagggcaccaagactgtgaggcagaacctggagccgttgttcgagcagtacatcaacaacctcaggaggcagctggacagcattgtcggggaacggggccgcctggactcagagctcagaggcatgcaggacctggtggaggacttcaagaacaaatatgaggatgaaatcaacaagcgcacagcagcagagaatgaatttgtgactctgaagaaggatgtggatgctgcctacatgaacaaggttgaactgcaagccaaggcagacactctcacagacgagatcaacttcctgagagccttgtatgatgcagagctgtcccagatgcagacccacatctcagacacatctgtggtgctgtccatggacaacaaccgcaacctggacctggacagcatcatcgctgaggtcaaggcccaatatgaggagattgctcagagaagccgggctgaggctgagtcctggtaccagaccaagtacgaggagctgcaggtcacagcaggcagacatggggacgacctgcgcaacaccaagcaggagattgctgagatcaaccgcatgatccagaggctgagatctgagatcgaccacgtcaagaagcagtgcgccaacctgcaggccgccattgctgatgctgagcagcgtggggagatggccctcaaggatgccaagaacaagctggaagggctggaggatgccctgcagaaggccaagcaggacctggcccggctgctgaaggagtaccaggagctgatgaatgtcaagctggccctggacgtggagatcgccacctaccgcaagctgctggagggtgaggagtgcaggctgaatggcgaaggcgttggacaagtcaacatctctgtggtgcagtccaccgtctccagtggctatggcggtgccagtggtgtcggcagtggcttaggcctgggtggaggaagcagctactcctatggcagtggtcttggcgttggaggtggcttcagttccagcagtggcagagccattgggggtggcctcagctctgttggaggcggcagttccaccatcaagtacaccaccacctcctcctccagcaggaagagctataagcactaaagtgcgtctgctagctctcggtcccacagtcctcaggcccctctctggctgcagagccctctcctcaggttgcctttcctctcctggcctccagtctcccctgctgtcccaggtagagctgggtatggatgcttagtgccctcacttcttctctctctctctataccatctgagcacccattgctcaccatcagatcaacctctgattttacatcatgatgtaatcaccactggagcttcactgttactaaattattaatttcttgcctccagtgttctatctctgaggctgagcattataagaaaatgacctctgctccttttcattgcagaaaattgccaggggcttatttcagaacaacttccacttactttccactggctctcaaactctctaacttataagtgttgtgaacccccacccaggcagtatccatgaaagcacaagtgactagtcctatgatgtacaaagcctgtatctctgtgatgatttctgtgctcttcgctgtttgcaattgctaaataaa

SEQ ID NO: 3581 - DNA, 2301 bp, Homo sapiens
tcgacagctctctcgcccagcccagttctggaagggataaaaagggggcatcaccgttcctgggtaacagagccaccttctgcgtcctgctgagctctgttctctccagcacctcccaacccactagtgcctggttctcttgctccaccaggaacaagccaccatgtctcgccagtcaagtgtgtccttccggagcgggggcagtcgtagcttcagcaccgcctctgccatcaccccgtctgtctcccgcaccagcttcacctccgtgtcccggtccgggggtggcggtggtggtggcttcggcagggtcagccttgcgggtgcttgtggagtgggtggctatggcagccggagcctctacaacctggggggctccaagaggatatccatcagcactagtggtggcagcttcaggaaccggtttggtgctggtgctggaggcggctatggctttggaggtggtgccggtagtggatttggtttcggcggtggagctggtggtggctttgggctcggtggcggagctggctttggaggtggcttcggtggccctggctttcctgtctgccctcctggaggtatccaagaggtcactgtcaaccagagtctcctgactcccctcaacctgcaaatcgaccccagcatccagagggtgaggaccgaggagcgcgagcagatcaagaccctcaacaataagtttgcctccttcatcgacaaggtgcggttcctggagcagcagaacaaggttctggacaccaagtggaccctgctgcaggagcagggcaccaagactgtgaggcagaacctggagccgttgttcgagcagtacatcaacaacctcaggaggcagctggacagcatcgtgggggaacggggccgcctggactcagagctgagaaacatgcaggacctggtggaagacttcaagaacaagtatgaggatgaaatcaacaagcgtaccactgctgagaatgagtttgtgatgctgaagaaggatgtagatgctgcctacatgaacaaggtggagctggaggccaaggttgatgcactgatggatgagattaacttcatgaagatgttctttgatgcggagctgtcccagatgcagacgcatgtctctgacacctcagtggtcctctccatggacaacaaccgcaacctggacctggatagcatcatcgctgaggtcaaggcccagtatgaggagattgccaaccgcagccggacagaagccgagtcctggtatcagaccaagtatgaggagctgcagcagacagctggccggcatggcgatgacctccgcaacaccaagcatgagatctctgagatgaaccggatgatccagaggctgagagccgagattgacaatgtcaagaaacagtgcgccaatctgcagaacgccattgcggatgccgagcagcgtggggagctggccctcaaggatgccaggaacaagctggccgagctggaggaggccctgcagaaggccaagcaggacatggcccggctgctgcgtgagtaccaggagctcatgaacaccaagctggccctggacgtggagatcgccacttaccgcaagctgctggagggcgaggaatgcagactcagtggagaaggagttggaccagtcaacatctctgttgtcacaagcagtgtttcctctggatatggcagtggcagtggctatggcggtggcctcggtggaggtcttggcggcggcctcggtggaggtcttgccggaggtagcagtggaagctactactccagcagcagtgggggtgtcggcctaggtggtgggctcagtgtggggggctctggcttcagtgcaagcagtggccgagggctgggggtgggctttggcagtggcgggggtagcagctccagcgtcaaatttgtctccaccacctcctcctcccggaagagcttcaagagctaagaacctgctgcaagtcactgccttccaagtgcagcaacccagcccatggagattgcctcttctaggcagttgctcaagccatgttttatccttttctggagagtagtctagaccaagccaattgcagaaccacattctttggttcccaggagagccccattcccagcccctggtctcccgtgccgcagttctatattctgcttcaaatcagccttcaggtttcccacagcatggcccctgctgacacgagaacccaaagttttcccaaatctaaatcatcaaaacagaatccccaccccaatcccaaattttgttttggttctaactacctccagaatgtgttcaataaaatgcttttataatat

SEQ ID NO: 3582 - DNA, 426 bp, Homo sapiens
gtgggctcagtgtggggggctctggcttcagtgcaagcagtggccgaagcttcaagagctaagaacctgctgcaagtcactgccttccaagtgcagcaacccagcccatggagattgcctcttctaggcagttgctcaagccatgttttatccttttctggagagtagtctagaccaagccaattgcagaaccacattctttggttcccaggagagccccattcccagcccctggtctcccgtgccgcagttctatattctgcttcaaatcagccttcaggtttcccacagcatggcccctgctgacacgagaacccaaagttttcccaaatctaaatcatcaaaacagaatccccaccccaatcccaaattttgttttggttctaactacctccagaatgtgttcaataaaatgcttttataata

SEQ ID NO: 3583 - DNA, 508 bp, Homo sapiens
gtgcggttcctggagcagcagaacaaggttctggacaccaagtggaccctgctgcaggagcagggcaccaagactgtgaggcagaacctggagccgttgttcgagcagtacatcaacaacctcaggaggcagctggacagcatcgtgggggaacggggccgcctggactcagagctgagaaacatgcaggacctggtggaagacttctaggcagttgctcaagccatgttttatccttttctggagagtagtctagaccaagccaattgcagaaccacattctttggttcccaggagagccccattcccagcccctggtctcccgtgccgcagttctatattctgcttcaaatcagccttcaggtttcccacagcatggcccctgctgacacgagaacccaaagttttcccaaatctaaatcatcaaaacagaatccccaccccaatcccaaattttgttttggttctaactacctccagaatgtgttcaataaaatgcttttataat

SEQ ID NO: 3584 - DNA, 680 bp, Homo sapiens
gaaacatgcaggacctggtggaagacttcaagaacaagtatgaggatgaaatcaacaagcgtaccactgctgagaatgagtttgtgatgctgaagaaggatgtagatgctgcctacatgaacaaggtggagctggaggccaaggttgatgcactgatggatgagattaacttcatgaagatgttctttgatgcggagctgtcccagatgcagacgcatgtctctgacacctcagtggtcctctccatggacaacaaccgcaacctggacctggatagcatcatcgctgaggtcaaggcccagtatgaggagattgccaaccgcagccggacagaagccgagtcctggtatcagaccaagtccgcaacaccaagcatgagatctctgagatgaaccggatgatccagaggctgagagccgagattgacaatgtcaagaaacagtgcgccaatctgcagaacgccattgcggatgccgagcagcgtggggagctggccctcaaggatgccaggaacaagctggccgagctggaggaggccctgcagaaggccaagcaggacatggcccggctgctgcgtgagtaccaggagctcatgaacaccaagctggccctggacgtggagatcgccacttaccgcaagctgctggagggcgaggaatgcagactcagtggagaaggag

SEQ ID NO: 3585 - DNA, 1825 bp, Homo sapiens
ccgcgccttcagctgcatctcggcctgcgggccccggcccggccgctgctgcatcaccgccgccccctaccgcggcgtctcctgctaccgcggcctcaccggaggcttcggcagccacagcgtgtgcgggggcttccgcgccggctcctgcggacgcagcttcggctaccgctccgggggcgtgtgcggacccagccccccatgcatcgccaccgtgtcggtcaacgagagcctcctcacgcccctcaacctggagatcgaccccaacgcacagtgcgtgaagcaggaggagaaggagcagatcaagtccctcaacagcaggttcgcggccttcatggacaaggtgggtgtcctggagcagcagaacaagctgctggagacaaagctgcagttcttccagaaccgtgagtgctgcaagagcaacctggagcctctgtttgagggctacaactctgcgacgggaggccgagtgcatggaagccaacagtgggaggctggcctcagagctcaaccacgtgcaggaggtgctggagggttacaagaagaagtatgaggaggaggtttctctgagagcaacagctgagaacgagtttgtggctttgaagaaggatgtggactgcgcctacctccgcaagtcagacctggaggccaacgtggaggccctgatccaggagatcgacttcctgaggcggctgtatgaggaggagatcctcattctccagtcgcacatctcagacacctccgtggttgtcaagctggacaacagccgggacctgaacatggactgcatcattgccgagattaaggcacagtatgaccacattgtcacccgcagccgggccgaggccgagtcctggtaccgcagcaagtgtgaggagatgaaggccacggtgatcaggcacggggagaccctgcgccgcaccaaggaggagatcaatgagctgaaccgcatgatccaaaggctgacggccgaggtggagaatgccaagtgccagaactccaagctggaggccgcggtggcccagtctgagcagcagggtgaggcggccctcagtgatgcccgctgcaagctggccgagctggagggcgccctgcagaaggccaagcaggacatggcctgcctgatcagggagtaccaggaggtgatgaactccaagctgggcctggacatcgagatcgccacctacaggcgcctgctggagggcgaggagcagaggctatgtgaaggcattggggctgtgaatgtctgtgtcagcagctcccggggcggggtcgtgtgcggggacctctgcgtgtcaggctcccggccagtgactggcagtgtctgcagcgctccgctgcaacgggaacgtggcggtgagcaccggcctgtgtgcgccctgcggccaattgaacaccacctgcggagggggttcctgcggcgtgggctcctgtggtatcagctccctgggtgtggggtcttgcggcagcagctgccggaaatgttaggcaccccaactcaagtcccaggccccaggcgtctttcctgccctgccttgcttggcccatccagtccaggcgcctggagcaagtgctcagctacttctcctccactttgaaagacccctcccactcctggcctcacatttctctgtgtgatccccccacttctgggctctgccaccccacagtgggaaaggcaccctagaaagaagtccgtggcaccataggaaggggctcaggagcaggaagggccaggaccagaaccttgcccacggcaactgccttcctgcctctccccttcctcctctgctcttgatctgtgtttcaataaattaatgtagcc

SEQ ID NO: 3586 - DNA, 1463 bp, Homo sapiens
gcgagtgcgcgctcctcctcgcccgccgctaggtccatcccggcccagccaccatgtccatccacttcagctccccggtattcacctcgcgctcagccgccttctcgggccgcggcgcccaggtgcgcctgagctccgctcgccccggcggccttggcagcagcagcctctacggcctcggcgcctcacggccgcgcgtggccgtgcgctctgcctatgggggcccggtgggcgccggcatccgcgaggtcaccattaaccagagcctgctggccccgctgcggctggacgccgacccctccctccagcgggtgcgccaggaggagagcgagcagatcaagaccctcaacaacaagtttgcctccttcatcgacaaggtgcggtttctggagcagcagaacaagctgctggagaccaagtggacgctgctgcaggagcagaagtcggccaagagcagccgcctcccagacatctttgaggcccagattgctggccttcggggtcagcttgaggcactgcaggtggatgggggccgcctggaggcggagctgcggagcatgcaggatgtggtggaggacttcaagaataagtacgaagatgaaattaaccaccgcacagctgctgagaatgagtttgtggtgctgaagaaggatgtggatgctgcctacatgagcaaggtggagctggaggccaaggtggatgccctgaatgatgagatcaacttcctcaggaccctcaatgagacggagttgacagagctgcagtcccagatctccgacacatctgtggtgctgtccatggacaacagtcgctccctggacctggacggcatcatcgctgaggtcaaggcgcagtatgaggagatggccaaatgcagccgggctgaggctgaagcctggtaccagaccaagtttgagaccctccaggcccaggctgggaagcatggggacgacctccggaatacccggaatgagatttcagagatgaaccgggccatccagaggctgcaggctgagatcgacaacatcaagaaccagcgtgccaagttggaggccgccattgccgaggctgaggagcgtggggagctggcgctcaaggatgctcgtgccaagcaggaggagctggaagccgccctgcagcggggcaagcaggatatggcacggcagctgcgtgagtaccaggaactcatgagcgtgaagctggccctggacatcgagatcgccacctaccgcaagctgctggagggcgaggagagccggttggctggagatggagtgggagccgtgaatatctctgtgatgaattccactggtggcagtagcagtggcggtggcattgggctgaccctcgggggaaccatgggcagcaatgccctgagcttctccagcagtgcgggtcctgggctcctgaaggcttattccatccggaccgcatccgccagtcgcaggagtgcccgcgactga

SEQ ID NO: 3587 - protein, 469 aa, Homo sapiens
MSIHFSSPVFTSRSAAFSGRGAQVRLSSARPGGLGSSSLYGLGASRPRVAVRSAYGGPVGAGIREVTINQSLLAPLRLDADPSLQRVRQEESEQIKTLNNKFASFIDKVRFLEQQNKLLETKWTLLQEQKSAKSSRLPDIFEAQIAGLRGQLEALQVDGGRLEAELRSMQDVVEDFKNKYEDEINHRTAAENEFVVLKKDVDAAYMSKVELEAKVDALNDEINFLRTLNETELTELQSQISDTSVVLSMDNSRSLDLDGIIAEVKAQYEEMAKCSRAEAEAWYQTKFETLQAQAGKHGDDLRNTRNEISEMNRAIQRLQAEIDNIKNQRAKLEAAIAEAEERGELALKDARAKQEELEAALQRGKQDMARQLREYQELMSVKLALDIEIATYRKLLEGEESRLAGDGVGAVNISVMNSTGGSSSGGGIGLTLGGTMGSNALSFSSSAGPGLLKAYSIRTASASRRSARD

SEQ ID NO: 3588 - DNA, 1423 bp, Homo sapiens
ttccggtcccggctcagcctccgacccaggtggtctggagcctgccgggagagtggtggcatctgagaggctggtcgtggactgtggttgggggaggtgggagctgttttaaccgtgtgccccctctcctgtgccggcgtgggcatcccccggggcagtggaacgcgggcgctcctccagcttccgagtccagccagcctgggcgcggggcgccgcccccgagacacccgaggagtccgttcctccctggttacgtggactgtggagctggtctcttgtggctcagcgccgtgcggaggttgaagcgtacctgcggaggtcgcaccagggcgtgaggaggaggaggaagggcatgagccgagcttgaggaatccgtgctccaaactctacactcaagggtggcccttgggtagggtgaagatcccctgtctttatcctagttccacaccttggtgtgggttactgggtgcaggatgaactgtcgctcggaggtgctggaggtgtcggtggaggggcggcaggtggaggaggccatgctggctgtgctgcacacggtgcttctgcaccgcagcacaggcaagttccactacaagaaggagggcacctactccactggcaccgtgggcacccaggatgttgactgtgacttcatcgacttcacttatgtgcgtgtctcttctgaggaactggatcgtgccctgcgcaaggttgttggggagttcaaggatgcactgcgcaactctggtggcgatgggctggggcagatgtccttggagttctaccagaagaagaagtctcgctggccattctcagacgagtgcatcccatgggaagtgtggacggtcaaggtgcatgtggtagccctggccacggagcaggagcggcagatctgccgggagaaggtgggtgagaaactctgcgagaagatcatcaacatcgtggaggtgatgaatcggcatgagtacttgcccaagatgcccacacagtcggaggtggataacgtgtttgacacaggcttgcgggacgtgcagccctacctgtacaagatctccttccagatcactgatgccctgggcacctcagtcaccaccaccatgcgcaggctcatcaaagacacccttgccctctgagcgtcgctggatctctgggagctccttgatggctcccagaccttggcttttgggaattgcacttttgggcctttgggctctggaacctgctctgggtcattggtgagacttggaaggggcagcccccgctggcttcttggttttgtggttgccagcctcaggtcatccttttaatctttgctgacggttcagtcctgcctctactgtctctccatagccctggtggggtcccccttctttctccactgtacagaagagccaccactgggatggggaataaagttgagaacatg

SEQ ID NO: 3589 - protein, 218 aa, Homo sapiens
MNCRSEVLEVSVEGRQVEEAMLAVLHTVLLHRSTGKFHYKKEGTYSTGTVGTQDVDCDFIDFTYVRVSSEELDRALRKVVGEFKDALRNSGGDGLGQMSLEFYQKKKSRWPFSDECIPWEVWTVKVHVVALATEQERQICREKVGEKLCEKIINIVEVMNRHEYLPKMPTQSEVDNVFDTGLRDVQPYLYKISFQITDALGTSVTTTMRRLIKDTLAL

SEQ ID NO: 3590 - DNA, 2230 bp, Homo sapiens
atgagcagacaagccagcaagacatctggtggcgggagccagggtttctccggccgctctgctgtggtctccggcagcagcaggatgagctgtgtggcccactctgggggagctggcggaggggcctatggcttccggagcggagcaggtggctttggcagtcgcagcctctacaacctgggcggcaacaagagcatctccatcagcgtggcagctggcggctcccgggctggaggctttgggggagggcggagcagctgtgcctttgcaggtggctatggaggtggctttgggagcggctatggaggtggctttggtggtggctttggtggtggcagaggaatgggaggtggctttggtggagctggtggctttggaggggctggtggctttggaggggctggtggctttggtggtcctggtggctttggtgggtctggtggctttggtgggcctggcagcttgggcagtcctggtggctttggccctgggggctttcctgggggaattcaggaagtgactatcaaccagagtctcctgcagcccctcaatgtggagatcgaccgccagattgggcaagtaaaggcccaggagcggaaacagatcaagaccctcaacaacaagtttgcctccttcattgacaaggtgcggttcctggagcaacagaacaaagtcctggagaccaagtggaacctgctccagcagcagggcacaagttccatctcaggcacaaacaaccttgagcctctttttgagaatcacatcaactacctgcggagctacctggacaacatcctcggggagagagggcgcctggactctgagctgaagaacatggaggacctggtggaagacttcaagaagaaatatgaggatgaaatcaataaacgtacagctgctgagaatgaatttgtgactctgaagaaggatgtggacagtgcctatatgaacaaggtggagcttcaggccaaagtggatgccttgatagatgagatcgacttcttaaggaccctctacgacgctgagctatctcagatgcagagccacatcagtgacacatctgtggtgctgtccatggacaataatcgctccctggacctggacagcatcattgctgaagttcgtgcacagtatgaggatatcgctcagagaagcaaggccgaagctgaggccctgtaccagaccaagttgggggagctgcagaccacggctggcaggcatggggatgacctaagaaataccaagagcgagatcatagagctcaacagaatgatccagaggctgcgggcagagatcgagggtgtcaagaagcagaatgccaacctgcagacggccattgccgaggccgagcagcatggagagatggccctcaaggatgccaatgccaagctccaagagctgcaggctgctctacagcaggcgaaggatgacctggcgcggctgctacgtgactaccaggagctgatgaatgtcaagctggccctggacgtgagatccccccctaccgcagctgctggagggcgaggagtacagcaggatgtctggagagtgtccgagtgctgtcagcatctccgtggtcagcagcagcacgacttccgcctccgcaggtggctatggaggaggttacggcggaggcatgggcggtggtttaggaggtggcttcagtgcgggcggcggctcaggcagtggctttggccggggaggcggcggtggaatcggcggtggatttggcggcggcagcagcggtttcagcggtggcagcggctttggctccatctctggcgcccgctatggagtcagtggcgggggcttcagctcggccagcaaccggggcggcagcatcaagttctcccagtcctcccagtcctcccagcgctactccagataaagagcacgcatcagcatcgcagccactccagcgcctcccctccgctccccacgcccccatattggcaacacccccagcgccaccccatgctccccaagaacgcggctctgcgctggaaggcttgtggcctcttgctcctccttccagatccccggccaagcccagtcacgagaatttcaggctcttctctccggctccagcctgtgcctgtgattgtccaggtgtggcctaggccgccaccttctgctgccccggagtcccctccctgggtgggatgctcactacagctctgatgtatatagcacacagccccctccgcccctccggtctgtcgccaataaa

SEQ ID NO: 3591 - DNA, 1752 bp, Homo sapiens
ctgctccttctaggatctccgcctggttcggcccgcctgcctccactcctgcctccaccatgtccatcagggtgacccagaagtcctacaaggtgtccacctctggcccccgggccttcagcagccgctcctacacgagtgggcccggttcccgcatcagctcctcgagcttctcccgagtgggcagcagcaactttcgcggtggcctgggcggcggctatggtggggccagcggcatgggaggcatcaccgcagttacggtcaaccagagcctgctgagcccccttgtcctggaggtggaccccaacatccaggccgtgcgcacccaggagaaggagcagatcaagaccctcaacaacaagtttgcctccttcatagacaaggtacggttcctggagcagcagaacaagatgctggagaccaagtggagcctcctgcagcagcagaagacggctcgaagcaacatggacaacatgttcgagagctacatcaacaaccttaggcggcagctggagactctgggccaggagaagctgaagctggaggcggagcttggcaacatgcaggggctggtggaggacttcaagaacaagtatgaggatgagatcaataagcgtacagagatggagaacgaatttgtcctcatcaagaaggatgtggatgaagcttacatgaacaaggtagagctggagtctcgcctggaagggctgaccgacgagatcaacttcctcaggcagctatatgaagaggagatccgggagctgcagtcccagatctcggacacatctgtggtgctgtccatggacaacagccgctccctggacatggacagcatcattgctgaggtcaaggcacagtacgaggatattgccaaccgcagccgggctgaggctgagagcatgtaccagatcaagtatgaggagctgcagagcctggctgggaagcacggggatgacctgcggcgcacaaagactgagatctctgagatgaaccggaacatcagccggctccaggctgagattgagggcctcaaaggccagagggcttccctggaggccgccattgcagatgccgagcagcgtggagagctggccattaaggatgccaacgccaagttgtccgagctggaggccgccctgcagcgggccaagcaggacatggcgcggcagctgcgtgagtaccaggagctgatgaacgtcaagctggccctggacatcgagatcgccacctacaggaagctgctggagggcgaggagagccggctggagtctgggatgcagaacatgagtattcatacgaagaccaccagcggctatgcaggtggtctgagctcggcctatgggggcctcacaagccccggcctcagctacagcctgggctccagctttggctctggcgcgggctccagctccttcagccgcaccagctcctccagggccgtggttgtgaagaagatcgagacacgtgatgggaagctggtgtctgagtcctctgacgtcctgcccaagtgaacagctgcggcagcccctcccagcctacccctcctgcgctgccccagagcctgggaaggaggccgctatgcagggtagcactgggaacaggagacccacctgaggctcagccctagccctcagcccacctggggagtttactacctggggaccccccttgcccatgcctccagctacaaaacaattcaattgctttttttttttggtccaaaataaaacctcagctagctctgccaaaccc

SEQ ID NO: 3592 - protein, 483 aa, Homo sapiens
MSIRVTQKSYKVSTSGPRAFSSRSYTSGPGSRISSSSFSRVGSSNFRGGLGGGYGGASGMGGITAVTVNQSLLSPLVLEVDPNIQAVRTQEKEQIKTLNNKFASFIDKVRFLEQQNKMLETKWSLLQQQKTARSNMDNMFESYINNLRRQLETLGQEKLKLEAELGNMQGLVEDFKNKYEDEINKRTEMENEFVLIKKDVDEAYMNKVELESRLEGLTDEINFLRQLYEEEIRELQSQISDTSVVLSMDNSRSLDMDSIIAEVKAQYEDIANRSRAEAESMYQIKYEELQSLAGKHGDDLRRTKTEISEMNRNISRLQAEIEGLKGQRASLEAAIADAEQRGELAIKDANAKLSELEAALQRAKQDMARQLREYQELMNVKLALDIEIATYRKLLEGEESRLESGMQNMSIHTKTTSGYAGGLSSAYGGLTSPGLSYSLGSSFGSGAGSSSFSRTSSSRAVVVKKIETRDGKLVSESSDVLPK

SEQ ID NO: 3593 - DNA, 1412 bp, Homo sapiens
cggggtcgtccgcaaagcctgagtcctgtcctttctctctccccggacagcatgagcttcaccactcgctccaccttctccaccaactaccggtccctgggctctgtccaggcgcccagctacggcgcccggccggtcagcagcgcggccagcgtctatgcaggcgctgggggctctggttcccggatctccgtgtcccgctccaccagcttcaggggcggcatggggtccgggggcctggccaccgggatagccgggggtctggcaggaatgggaggcatccagaacgagaaggagaccatgcaaagcctgaacgaccgcctggcctcttacctggacagagtgaggagcctggagaccgagaaccggaggctggagagcaaaatccgggagcacttggagaagaagggaccccaggtcagagactggagccattacttcaagatcatcgaggacctgagggctcagatcttcgcaaatactgtggacaatgcccgcatcgttctgcagattgacaatgcccgtcttgctgctgatgactttagagtcaagtatgagacagagctggccatgcgccagtctgtggagaacgacatccatgggctccgcaaggtcattgatgacaccaatatcacacgactgcagctggagacagagatcgaggctctcaaggaggagctgctcttcatgaagaagaaccacgaagaggaagtaaaaggcctacaagcccagattgccagctctgggttgaccgtggaggtagatgcccccaaatctcaggacctcgccaagatcatggcagacatccgggcccaatatgacgagctggctcggaagaaccgagaggagctagacaagtactggtctcagcagattgaggagagcaccacagtggtcaccacacagtctgctgaggttggagctgctgagacgacgctcacagagctgagacgtacagtccagtccttggagatcgacctggactccatgagaaatctgaaggccagcttggagaacagcctgagggaggtggaggcccgctacgccctacagatggagcagctcaacgggatcctgctgcaccttgagtcagagctggcacagacccgggcagagggacagcgccaggcccaggagtatgaggccctgctgaacatcaaggtcaagctggaggctgagatcgccacctaccgccgcctgctggaagatggcgaggactttaatcttggtgatgccttggacagcagcaactccatgcaaaccatccaaaagaccaccacccgccggatagtggatggcaaagtggtgtctgagaccaatgacaccaaagttctgaggcattaagccagcagaagcagggtaccctttggggagcaggaggccaataaaaagttcagagttcattggatgtc

SEQ ID NO: 3594 - protein, 430 aa, Homo sapiens
MSFTTRSTFSTNYRSLGSVQAPSYGARPVSSAASVYAGAGGSGSRISVSRSTSFRGGMGSGGLATGIAGGLAGMGGIQNEKETMQSLNDRLASYLDRVRSLETENRRLESKIREHLEKKGPQVRDWSHYFKIIEDLRAQIFANTVDNARIVLQIDNARLAADDFRVKYETELAMRQSVENDIHGLRKVIDDTNITRLQLETEIEALKEELLFMKKNHEEEVKGLQAQIASSGLTVEVDAPKSQDLAKIMADIRAQYDELARKNREELDKYWSQQIEESTTVVTTQSAEVGAAETTLTELRRTVQSLEIDLDSMRNLKASLENSLREVEARYALQMEQLNGILLHLESELAQTRAEGQRQAQEYEALLNIKVKLEAEIATYRRLLEDGEDFNLGDALDSSNSMQTIQKTTTRRIVDGKVVSETNDTKVLRH

SEQ ID NO: 3595 - DNA, 2678 bp, Homo sapiens
agataagagctggacggaggctaaagcggcagccccagcttcgcgccccgcccagtccctttcccctgctggggatcccccctcttccccgcccaccccttacccgcatgcagcccagcgccctatgctagccctccccctccccccctgctggagcggggcgccgccgggggaggagggggaatcggctgcgggtccttggtgtttccagcacccagtttcccttcaagccgggtcgcgatgtacgactgtatggaaacgtttgccccgggtccgcgacggctgtacggggcggccgggcccggggccggcttgctgcgcagagccaccggcggctcctgtttcgccggacttgaatcttttgcctggccgcaacccgccagcctgcaatcggtggagacacagagcaccagctcagaggagatggtgcccagctcgccctcgccccctccgcctcctcgggtctacaagccatgcttcgtgtgcaatgacaagtcctctggctaccactatggggtcagctcttgtgaaggctgcaagggcttctttcgccgaagcatccagaagaacatggtgtacacgtgtcaccgcgacaaaaactgtatcatcaacaaggtgaccaggaatcgctgccagtactgccggctacagaagtgcttcgaagtgggcatgtccaaggaagctgtgcgaaatgaccggaacaagaagaagaaagaggtgaaggaagaagggtcacctgacagctatgagctgagccctcagttagaagagctcatcaccaaggtcagcaaagcccatcaggagactttcccctcgctctgccagctgggcaagtataccacgaactccagtgcagaccaccgcgtgcagctggatctggggctgtgggacaagttcagtgagctggctaccaagtgcatcatcaagatcgtggagtttgccaagcggttgcctggctttacagggctcagcattgctgaccagatcactctgctcaaagctgcctgcctagatatcctgatgctgcgtatctgcacaaggtacaccccagagcaggacaccatgaccttctccgacgggctgaccctgaaccggacccagatgcacaatgccggcttcgggcccctcacagaccttgtctttgcctttgctgggcagctcctgcccctggagatggatgacaccgagacagggctgctcagcgccatctgcctcatctgcggagaccgcatggacctggaggagcccgaaaaagtggacaagctgcaggagccactgctggaagccctgaggctgtacgcccggcgccggcggcccagccagccctacatgttcccaaggatgctaatgaaaatcaccgacctccggggcatcagcactaagggagctgaaagggccattactctgaagatggagattccaggcccgatgcctcccttaatccgagagatgctggagaaccctgaaatgtttgaggatgactcctcgcagcctggtccccaccccaatgcctctagcgaggatgaggttcctgggggccagggcaaagggggcctgaagtccccagcctgaccagggcccctgacctccccgctgtgggggttggggcttcaggcagcagactgaccatctcccagaccgccagtgactgggggaggacctgctctgccctctccccaccccttccaatgagctccttgtttttgccaaagtttctaggggtgcctctgtgttcatccccttcctgatctaaccggctccctcgccagtcccgggggcctgccctgctcccaccaggagagagggcaaagggatgagcctgggtttggactctaaaatctcagcactgccccatgggtcctagacttcccagggcaagaggaagaccctgccattccacagccccttcctctgccaggtgcttggctctctgagagcaaacaggaacactagagaccaaaaaggggacaaaggagaagggctgagcccaccttcttgctcctacccttggtgcctaatgctgtgtgatgcacctgcagggtgtgtgctagcctctgtgccccgtccttgtgccaggtcaaggtgggggcaggctgggccctgcatttctggggcaggaacagagggtgaaagggacagatagatgcaggtccattctgcacctcttggctcgggtgcagagttcaccctgtgccctccgttataagtccctcccccagccctgtcatgtgccttgggctcctcctgccctccatctcagccattggggcagggaccctcctacactacagaggggccaggggatccctctctccctagtgccttccaccctttactccccagagcagcttggcccagggaggggggatgctgcttagctgatcccgccctgacccagaggaagcctctatttatttattagcttttgtttacaccgtggaattgaccccttcctccaggggtcttgggtgggggagcccagggcccctgtgacccctcctttcttcctccaatccccagtttgtatttagctgccaaataagattcccattggctccctgtgttctcttggggggtcagggtgctgtcccctcccctctgtttacatctcccctctaccccgctgtatcgcatattgctgagttttctatttttgcaaaataaagtgatggaaactc

SEQ ID NO: 3596 - DNA, 1373 bp, Homo sapiens
agtttctaaggatcatgtctgcgagccaggattcctgatccagagacaacggccccaatgggatggagcccaaaggtgtcattgagagtaactggaatgagattgttgacagctttgatgacatgaacctctcagagtcccttctccgtggcatctacgcctatggtttagagaagccgtctgccatccagcagcgagccattctaccttgtatcaagggttatcacgtgattgctcaagcccaatctggggctgggaaaatggccacatttgccatattgattctgcagcagattgaattagatctaaaagccacccaggccttgctcctagcacccactcaagaattggctcagcagatacagaaggtggtcatggcactaggagactacatgggtgcctcctgtcatgcctgtatcaggggcaccaacatgcgtgctgaggtgcagaaactgcagacgaagctcctcacatcattgtgggtacccctggccatgtgtttgatatgcttaacgggagatacctgtctcccaaatacatcaagatgtttgtactggacgaagctgacgaaatgttaagccgtggattcaaggaccagatctatgacatattccaaaagctcaacagcaacacccaggtagttttgctgtcagctgcgatgccttctgatgtgcttgaggtgaccaagaagttcatgagggacctcattcggattcttgtcacgaaggaagtgttgaccttggagggtatccgccaattctacatcaatttggaacgagaggagtggaagctggacacactatgtgacttgtatgaaaccctgaccatcaccccaggcagtcatcttcatcaacacccggaggaaggtggactggctcaccgagaagatgcatgctcgagatttcactgtcttcaccattcgtggagatatggaccaaaacgaacaagacgtgatcttgagggagtttcgttatggctctagcagttttgattaccactgacctgctggccagaggcattgatgtgcaacaggtttctttagtcaccaactatgaccttcccaccaacagggaaaaccatatccatagaatcggtcgaggtggacggtttggccgtaaaggtgtggctattaacgtggtgacagaagaagacaagaggactcttcgagacatcgagatcttctacaactcctccattgaggaaatgcccctcaatgttgctgacctcatctgaggggctgtcctgccacccagccccagccagggctctatctcggggggctgaggagcagcaggagtggggagggaagggagccaagggatggacatcttgtcatttttttctttgaataaatgtcactttttgaggcaaaa

SEQ ID NO: 3597 - protein, 166 aa, Homo sapiens [sequence omitted]

SEQ ID NO: 3598 - DNA, 1336 bp, Homo sapiens
ggaggactgggtgcgcgtgcagggatcggaagccggttggagtgtgtgaggttttctcgctctagggagattcttcaagcaatcactatgtcaacagacacaggtgtttcccttccttcatatgaggaagatcagggatcaaaacttattggaaaagctaaagaggcaccatttgtacccgttggaatagcaggttttgcagcaattgttgcatatggattatacaaactgaagagcaggggaaatactaaaatgtccattcatctgatccacatgcgtgtggcagcccaaggctttgttgtaggagcaatgactgttggtatgggctacttcatgtatcgggaattctgggcaaaacctaagccttagaagaagagatgctgtcttggtcttgttggacgagcttgctttagttagacgtctcattattgaagttactattattgttggaaataaactaatttgtatgggtttagatggtaacatggcattttgaatattggcttcctttcttgcaggcttgatttgcctggtgaccaaattactagtgactagtttactaactaggtcattaaaggaagtcaagttaacttaaacacgtcaactaaacgcacttgatggtgttgaaatgtccaccttcttaaatttttaagatgaactgagttctaaagaagataacaggccaatcctgaaggtactcccagtttgctgcagaatctcacatattttggatgttgtataagagtcctatttgccccagttaattcaacttttgtctgcctgttctgtggactggctggctctgttagaactctgtccaaaaagtgcatggaatataacttgtaaagcttcccacaattgacaatatatgtgcatgtgtttaagccaaatccagaaagcttaaacaatagagctgcataatagtatttattaaagaatcacaactgtaaacatgagaataacttaaggattctagtttagttttttgtaattgcaaattatatttttgctgctgatatattagaataatttttaaatgtcatcttgaaatagaaatatgtattttaagcactcatgcaaaggtaaatgaacactttttaaatgtgtgttgcttattttttccataagaattgtaaacattgaactgaacaaattacctataatggatttgattaatgactaatgagcaagcgggtttggccagacagtatacccaaacttttatatagtatacagaaggctatcacacttgtgaaattctcttgtctaatccgaatttgcattccatggtgataacatggtatatgtattgttattaaagtaagtgacccatgtc

SEQ ID NO: 3599 - DNA, 594 bp, Homo sapiens
ggaggactgggtgcgcgtgcagggatcggaagccggttggagtgtgtgaggttttctcgctctagggagattcttcaagcaatcactatgtcaacagacacaggtgtttcccttccttcatatgaggaagatcagggatcaaaacttattggaaaagctaaagaggcaccatttgtacccgttggaatagcaggttttgcagcaattgttgcatatggattatacaaactgaagagcaggggaaatactaaaatgtccattcatctgatccacatgcgtgtggcagcccaaggctttgttgtaggagcaatgactgttggtatgggctacttcatgtatcgggaattctgggcctttagttagacgtctcattattgaagttactattattgttggaaataaactaatttgtatgggtttagatggtaacatggcattttgaatattggcttcctttcttgcaggcttgatttgcctggtgaccaaattactagtgactagtttactaactaggtcattaaaggaagtcaagttaacttaaacacgtcaactaaacgcacttgatggtgttgaaatgtccaccttcttaaattt

SEQ ID NO: 3600 - DNA, 952 bp, Homo sapiens
gcagctgcgctgcgactgctctggaaggagaggacggggcacaaaccctgaccatgaccccccacaggctgctgccaccgctgctgctgctgctagctctgctgctcgctgccagcccaggaggcgccttggcgcggtgcccaggctgcgggcaaggggtgcaggcgggttgtccagggggctgcgtggaggaggaggatggggggtcgccagccgagggctgcgcggaagctgagggctgtctcaggagggaggggcaggagtgcggggtctacacccctaactgcgccccaggactgcagtgccatccgcccaaggacgacgaggcgcctttgcgggcgctgctgctcggccgaggccgctgccttccggcccgcgcgcctgctgttgcagaggagaatcctaaggagagtaaaccccaagcaggcactgcccgcccacaggatgtgaaccgcagagaccaacagaggaatccaggcacctctaccacgccctcccagcccaattctgcgggtgtccaagacactgagatgggcccatgccgtagacatctggactcagtgctgcagcaactccagactgaggtctaccgaggggctcaaacactctacgtgcccaattgtgaccatcgaggcttctaccggaagcggcagtgccgctcctcccaggggcagcgccgaggtccctgctggtgtgtggatcggatgggcaagtccctgccagggtctccagatggcaatggaagctcctcctgccccactgggagtagcggctaaagctgggggatagaggggctgcagggccactggaaggaacatggagctgtcatcactcaacaaaaaaccgaggccctcaatccaccttcaggccccgccccatgggcccctcaccgctggttggaaagagtgttggtgttggctggggtgtcaataaagctgtgcttggggtcaaa

SEQ ID NO: 3601 - protein, 240 aa, Homo sapiens
MTPHRLLPPLLLLLALLLAASPGGALARCPGCGQGVQAGCPGGCVEEEDGGSPAEGCAEAEGCLRREGQECGVYTPNCAPGLQCHPPKDDEAPLRALLLGRGRCLPARAPAVAEENPKESKPQAGTARPQDVNRRDQQRNPGTSTTPSQPNSAGVQDTEMGPCRRHLDSVLQQLQTEVYRGAQTLYVPNCDHRGFYRKRQCRSSQGQRRGPCWCVDRMGKSLPGSPDGNGSSSCPTGSSG

SEQ ID NO: 3602 - DNA, 4682 bp, Homo sapiens
gctggccgtctgcgcaccctctctcccctcggctctttcctaggaaagctgagcctcatagcttccgggagaaggttttccggaagaaacctccagtctgtgcagtatgtaaggtgaccatcgatgggacaggcgtttcgtgcagagtctgcaaggtggcgacgcacagaaaatgtgaagcaaaggtgacttcagcctgtcaggccttgcctcccgtggagttgcggcgaaacacggccccagtcaggcgcatagagcacctgggatccaccaaatctctgaaccactcaaagcagcgcagcactctgcccaggagcttcagcctggacccgctcatggagcggcgctgggacttagacctcacctacgtgacggagcgcatcttggccgccgccttccccgcgcggcccgatgaacagcggcaccggggccacctgcgcgagctggcccatgtgctgcaatccaagcaccgggacaagtacctgctcttcaacctttcagagaaaaggcatgacctgacccgcttaaaccccaaggttcaagacttcggctggcctgagctgcatgctccacccctggacaagctgtgctccatctgcaaagccatggagacatggctcagtgctgacccacagcacgtggtcgtactatactgcaagggaaacaagggcaagcttggggtcatcgtttctgcctacatgcactacagcaagatctctgcaggggcggaccaggcactggccactcttaccatgcggaaattctgcgaggacaaggtggccacagaactgcagccctcccagcgtcgatatatcagctacttcagtgggctgctatctggctccatcagaatgaacagcagccctctcttcctgcactatgtgctcatccccatgctgccagcctttgaacctggcacaggcttccagcccttccttaaaatctaccagtccatgcagcttgtctacacatctggagtctatcacattgcaggccctggtccccagcagctttgcatcagcctggagccagccctcctcctcaaaggcgatgtcatggtaacatgttatcacaagggtggccggggcacagaccggaccctcgtgttccgagtccagttccacacctgcaccatccacggaccacagctcactttccccaaggaccagcttgacgaggcctggactgatgagaggttccccttccaagcctccgtggagtttgtcttctcctccagccccgagaagatcaaaggcagcactccacggaacgacccctcggtctctgtcgactacaacaccactgagccagccgtgcgctgggactcctatgagaacttcaaccagcaccacgaggacagtgtggatggctccttgacccacacccggggtcccctggatggcagtccttatgcccaggtgcagcggcctccccggcagacccccccggcaccctctccagagcctccaccaccccccatgctctctgtcagcagcgactcaggccattcctccacgctgaccacagagccggctgctgagtcccctggccggccgccccctacagctgctgaacggcaggagctggatcgcctcctaggaggctgcggagtggccagtgggggccggggagctgggcgcgagacggccatcctagatgacgaagagcagcccactgtgggcggaggcccccacctcggagtgtatccaggccataggcctggcctcagccgccactgctcctgccgccagggctaccgggagccctgcggggttcccaatgggggctactaccggccagagggaaccctggagaggaggcgactggcctacgggggctatgagggatccccccagggctacgccgaggcctcgatggagaagaggcgcctctgccgatcgctgtcagaggggctatacccctacccacctgagatggggaaaccagccactggggactttggctaccgcgccccaggctaccgggaggtggtcatcctggaggaccctgggctgcctgccctatacccatgcccagcctgcgaggagaagctggcgctgcctacagcagccttgtatggactgcggctggagagggaggctggagaagggtgggcaagtgaggctggcaagcctctcctgcacccagtgcggcctgggcacccgctgcctctgctcttgcctgcctgtgggcatcaccatgccccgatgcctgactacagctgcctgaagccacccaaggcaggcgaggaagggcacgagggctgctcctacaccatgtgccccgaaggcaggtatgggcatccagggtaccctgccctggtgacatacagctatggaggagcagttcccagttactgcccagcatatggccgtgtgcctcatagctgtggctctccaggagagggcagagggtatcccagccctggtgcccactccccacgggctggctccatttccccgggcagcccgccctatccacaatctaggaagctgagctacgagatccctacggaggagggaggggacaggtacccattgcctgggcacctggcctcagcaggacctttggcatctgcagagtcgctggagccggtgtcctggagggagggccccagtgggcacagcacactgcctcggtctccccgagatgccccatgcagtgcttcgtcagagttgtctggtccctccacgcccctgcacaccagcagtccagtccagggcaaggaaagcacccggcgacaggacaccaggtcccccacctcagcgcccactcagagactgagtcctggcgaggccttgccccctgtttcccaggcaggcaccggaaaggcccctgagctgccgtcgggaagtgggcctgagcctctggcccctagcccagtctctccgaccttccctcccagctcgcccagtgactggcctcaggaaaggagtccagggggccactcagatggcgccagtcctcggagccctgtgcccaccacacttcctggcctccgccacgccccctggcaaggccctcgaggcccccccgacagcccagatgggtctcccctcactcctgtgccttcccagatgccctggcttgtggccagcccagagccgcctcagagctcacctacacctgctttccccctggctgcctcctatgacaccaatggccttagccagcccccacttcctgagaaacgccacctgcccgggccggggcaacagccaggaccctggggcccagagcaggcatcatcgccagccagaggcatcagtcaccatgtcaccttcgcacctctgctctcagataatgtcccccaaaccccagagcctcctacacaagagagccaaagcaatgtcaagtttgtccaggatacatccaagttctggtacaagccacacctgtcccgtgaccaagccattgccctgctgaaggacaaggaccctggggccttcctgatcagggacagtcattcattccaaggagcttatgggctggccctcaaggtggccacaccgccacccagtgcccagccctggaaaggggaccccgtggaacagctggtccgccatttcctcatcgagactgggcccaaaggggtgaagatcaagggctgccccagtgagccctactttggcagcctgtccgccttggtctcccagcactccatctcccccatctccctgccctgctgcctgcgcattcccagcaaagatcctctggaagagaccccagaggctccagtgcccaccaacatgagcacagcggcagacctcctgcgtcagggtgctgcctgcagcgtgctctacttgacctcagtggagacagagtcactgacgggcccccaagctgtggcccgggccagctctgcagctctgagctgtagcccccgcccgacaccagctgttgtccacttcaaggtgtcagcccagggcattacactgacggacaaccaaaggaagctcttctttcgccgccattatccagtgaacagcatcaccttctccagcactgaccctcaagaccggagatggaccaacccagacgggaccacctccaagatctttggtttcgtggccaagaagccgggaagcccctgggagaatgtgtgtcacctctttgcagagcttgacccagatcagcctgctggcgccattgtcaccttcatcaccaaagttctactgggccagagaaaatgaaggaaggccacaagctcagagcccacatcaacactgcccccctcccagcaccccacagccctcacatcccctggcctggacccaggagacccaggagaaagcaccctcccttaggaatgaggagtgggcatcaggcctgggacactgctctccttccccgcccccagcctgctaagttaagtggacaggcccacaagatgaccttgcatgtgagcagatggcagagatgggtgtgtgaggggtgaggaggcatcagcagttgagccccgaaggagatcaggcagccccacctgcaggagaacgtcagccctccaggggatcagcccctgccagttccacccagctgcaggtgccagcacggcagggatgggagaggggtggggagcgagtcactgcctcctctgagcagagattcagagtaggatcacatgaataggggaaaaaagagagtctatttttgtctaataataaagaatttctataaacttt

SEQ ID NO: 3603 - protein, 1409 aa, Homo sapiens
MKSSGPVERLLRALGRRDSSRAASRPRKAEPHSFREKVFRKKPPVCAVCKVTIDGTGVSCRVCKVATHRKCEAKVTSACQALPPVELRRNTAPVRRIEHLGSTKSLNHSKQRSTLPRSFSLDPLMERRWDLDLTYVTERILAAAFPARPDEQRHRGHLRELAHVLQSKHRDKYLLFNLSEKRHDLTRLNPKVQDFGWPELHAPPLDKLCSICKAMETWLSADPQHVVVLYCKGNKGKLGVIVSAYMHYSKISAGADQALATLTMRKFCEDKVATELQPSQRRYISYFSGLLSGSIRMNSSPLFLHYVLIPMLPAFEPGTGFQPFLKIYQSMQLVYTSGVYHIAGPGPQQLCISLEPALLLKGDVMVTCYHKGGRGTDRTLVFRVQFHTCTIHGPQLTFPKDQLDEAWTDERFPFQASVEFVFSSSPEKIKGSTPRNDPSVSVDYNTTEPAVRWDSYENFNQHHEDSVDGSLTHTRGPLDGSPYAQVQRPPRQTPPAPSPEPPPPPMLSVSSDSGHSSTLTTEPAAESPGRPPPTAAERQELDRLLGGCGVASGGRGAGRETAILDDEEQPTVGGGPHLGVYPGHRPGLSRHCSCRQGYREPCGVPNGGYYRPEGTLERRRLAYGGYEGSPQGYAEASMEKRRLCRSLSEGLYPYPPEMGKPATGDFGYRAPGYREVVILEDPGLPALYPCPACEEKLALPTAALYGLRLEREAGEGWASEAGKPLLHPVRPGHPLPLLLPACGHHHAPMPDYSCLKPPKAGEEGHEGCSYTMCPEGRYGHPGYPALVTYSYGGAVPSYCPAYGRVPHSCGSPGEGRGYPSPGAHSPRAGSISPGSPPYPQSRKLSYEIPTEEGGDRYPLPGHLASAGPLASAESLEPVSWREGPSGHSTLPRSPRDAPCSASSELSGPSTPLHTSSPVQGKESTRRQDTRSPTSAPTQRLSPGEALPPVSQAGTGKAPELPSGSGPEPLAPSPVSPTFPPSSPSDWPQERSPGGHSDGASPRSPVPTTLPGLRHAPWQGPRGPPDSPDGSPLTPVPSQMPWLVASPEPPQSSPTPAFPLAASYDTNGLSQPPLPEKRHLPGPGQQPGPWGPEQASSPARGISHHVTFAPLLSDNVPQTPEPPTQESQSNVKFVQDTSKFWYKPHLSRDQAIALLKDKDPGAFLIRDSHSFQGAYGLALKVATPPPSAQPWKGDPVEQLVRHFLIETGPKGVKIKGCPSEPYFGSLSALVSQHSISPISLPCCLRIPSKDPLEETPEAPVPTNMSTAADLLRQGAACSVLYLTSVETESLTGPQAVARASSAALSCSPRPTPAVVHFKVSAQGITLTDNQRKLFFRRHYPVNSITFSSTDPQDRRWTNPDGTTSKIFGFVAKKPGSPWENVCHLFAELDPDQPAGAIVTFITKVLLGQRK

SEQ ID NO: 3604 - DNA, 1764 bp, Homo sapiens
aatctagcccgggaaccgagttgcgggagtgcggtctgtgccgttccggccaggagtttgccgactgcagacgtcctgcgaaccggcaagatgtgctctctggggttgttccctcctccaccgcctcggggtcaagtcaccctatatgagcacaataacgagctggtgacgggcagtagctatgagagcccgccccccgacttccggggccagtggatcaatcttcctgtcctacaactgacaaaggatcccctaaagacccctggaaggctggaccatggcacaagaactgccttcatccatcaccgggagcaagtgtggaagagatgcatcaacatttggcgtgatgtgggcctttttggggtgctaaatgaaattgcaaactcagaagaagaggtgtttgagtgggtgaagacggcatccggctgggccctggcactctgtcgatgggcctcttccctccatgggtccctgttcccccatctgtctctcaggagcgaagatctgatcgctgaatttgcccaagtcacaaattggtccagctgctgcttgcgtgtctttgcatggcacccccacaccaacaagtttgcagtggccctgctagatgactcagtccgtgtgtataatgccagcagcaccatagtcccctccctgaagcaccggctgcagcgaaatgtggcgtctctggcctggaagccccttagtgcctctgtcttggctgtggcctgccagagctgcattcttatctggaccctggaccctacctccttgtctacccgaccctcttctggctgtgcccaagtgctgtctcaccctgggcatacacctgttaccagcttggcctgggcccccagtggggggcggctgctctcagcttcacccgtggatgctgctatccgggtatgggatgtctcaacagagacctgtgtcccccttccctggttccgaggaggtggggtgaccaacctgctctggtccccagacggcagcaaaatcctggctaccactccttcagctgtctttcgagtctgggaggcccagatgtggacttgtgagaggtggcctactctatcagggcgctgtcagactggctgctggagcccagatggcagccgactgctgttcactgtattgggagagccactgatttactccctgtcttttccagaacgttgtggtgagggaaaggggtgcgttggaggtgcaaagtcagcaacgattgtggcagatctgtctgagacaacaatacagacaccagatggtgaggagaggcttgggggagaggctcactccatggtctgggaccccagtggggaacgtctggctgtgcttatgaaaggaaagccaagggtacaggatggtaaaccagtcatcctcctttttcgcactcgaaacagccctgtgtttgagctccttccctgtggcattatccagggggagccaggagcccagccccagctcatcactttccatccttccttcaacaaaggggccctgctcagtgtgggctggtccacaggccgaattgcccacatcccgctgtactttgtcaatgcccagtttccacgttttagcccagtgcttgggcgggcccaggaaccccctgctgggggtggaggctctattcatgacctgcccctctttactgagacatccccaacctctgccccttgggaccctctcccagggccaccacctgttctgccccactccccacattcccacctctaagaataaataagttttccttttgttttccactca

SEQ ID NO: 3605 - protein, 546 aa, Homo sapiens [sequence omitted]

SEQ ID NO: 3606 - DNA, 1570 bp, Homo sapiens
aacgggatggggagctggaccagcagattatgagcttacagaaagcctggcctacattttactctttttggatttcttcctcatcaagagactgctgcagtgcctgtcatgtgacagcggcatggacatatgccccaggctttcctgctggggtccatccatgagcctgcaggtgccctcatggagccccagccctgccctggaagcttggctgagagcttcctggaggaggagcttcggctcaatgctgagctgagccagctgcagttttcggagcctgtgggcatcatctacaatcccgtggagtatgcatgggagccacatcgcaactacgtgactcgctactgccagggccccaaggaagtactcttcctgggcatgaaccctggaccttttggcatggcccagactggggtgccctttggggaagtaagcatggtccgggactggttgggcattgtggggcctgtgctgacccctccccaagagcatcctaaacgaccagtgctgggactggagtgcccacagtcagaagtgagtggtgcccgattctggggctttttccggaacctctgtggacagcctgaggtcttcttccatcactgttttgtccacaatctatgccctctgcttttcctggctcccagcgggcgcaaccttactcctgctgagctgcctgccaagcagcgagaacagcttcttgggatctgtgatgcagccctctgccggcaggtgcagctgctgggggtgcggctggtggtgggagttgggcgactggcagagcagcgggcacgacgggctctggcaggcctgatgccagaggtccaggtggaagggctcctgcatccctctccccgtaacccacaggccaacaagggctgggaggcagtggccaaggaaagattgaatgagctggggctgctgccactgctgttgaaatgagtgcccttggggccttgcatgggacacattcaagacctcgaagtcattcttggccaagcagatgacaacacatctcctggactggagcaaaaggtccttctgtgcaccctggtcgctgggaaacgtattctttgatctgttgaactgtcttccaacctgccatggcagttttgacactactcctgtttgccctcctgattcctgctttctttaccttttaacattgcccctttcaggggaccccactttgtagggaatctgcagaaggtgtgcttttgcacttgcagactgctctacctcagtgtttccttgggagactttattcagctgagagtgccctagacagtaacttctaaggtcacgtttactatttcagaggaaatatcttgccaggatacctacccatccttatagaacagttacctttagctgacccctttcctcacagggaccaagacaaagcatgggacatgaaattaagagtgaacttcttatgggaggctgcagctggatcagaggaaaaatccagtgtgacagagtgcaagtcagaagacctggcttttcatcccagctttgaaacttggaactttttgattgacaaattaataaacctctctatgcctcaggc

SEQ ID NO: 3607 - protein, 270 aa, Homo sapiens
MPQAFLLGSIHEPAGALMEPQPCPGSLAESFLEEELRLNAELSQLQFSEPVGIIYNPVEYAWEPHRNYVTRYCQGPKEVLFLGMNPGPFGMAQTGVPFGEVSMVRDWLGIVGPVLTPPQEHPKRPVLGLECPQSEVSGARFWGFFRNLCGQPEVFFHHCFVHNLCPLLFLAPSGRNLTPAELPAKQREQLLGICDAALCRQVQLLGVRLVVGVGRLAEQRARRALAGLMPEVQVEGLLHPSPRNPQANKGWEAVAKERLNELGLLPLLLK

SEQ ID NO: 3608 - DNA, 3496 bp, Homo sapiens
tgaccctaacagtcgattcaaggccaagtggtcagtttgtcagccttttttaagggatttctttttatttttaggaattccaaacagagttaacctaaactgtcattgccaaaagatcagtcttaaactttcttagcacctgtacctgtttaatgtgatcagctatcagtgaggaaaaaaaaaaaaatctatttaggtcttggaatggttcctgtacctagagtatccatattgaaccttttttttttttttttttttttttttttgagatggaaacttgctcttttgcccaggctggagtgcagtggcgtgatcttggctcactgcaacctccgcctcccgggttcaagcagttctctgcctcagcctcctgagcagctgggattataggcgcctgccaccatgcccggctaatttttgtatttttagtagagacagggttcaccatcttggccgtgctggtcttgaactcctgaccttgtgatccgcctgcctcggccactcaaagtgctgggattgcaggcgtgagccagcacccggccacagtatctttattacagctcactgcagcctcaatctcctgggctcaaatgatcctcctgcctcagcctcccaagcagctgggactacaggcgcacaccacggtgtctggctaattttattatttaaaaaatgttttgtagagacagtctccctgtgttgcccaggctggtctccaactcgtgagctcaagtgatccacgtgcctcagcctcccaaagtgctgggattacaagcataagccaccgcacccggcccctagtgaacattttactgtatgtgttgataaatcatcttttgagtttctgttgtatgtggggacttcctacactggctgctgtgaagaggtatggaagaaaggagaggctttctgcctagaaattctttgagaacacctgaaaagacagtttaatcatgtcacaacactcttaaggctcaagtcagtgttctggtttccggtagctttaggattggattctaaacgagggctggtggtgagtttggtgtttgtctcgtgtcaccctcacccctcacctcctcagtttaggataagagacataatgatttctaccagaatccaaagtaaatccaaagggggagaaaagacataactgttttttcttctaccttttttttgttaaagagttacatctctcacaggaggaaagaattcaagagtctatatgattagttacagagaatattttcatcccctctccctgaatagaaaagcaggggtcaccatttgtatccttacccttgaggtgtttttgaagatgctgtaactcttgaagttgagctgaggcagaaaggttggaaaaatgcagccctctgggtattgtggggagggatgtgatgtagtaagagggtgttttgtggtgctaggattcccacgccaccaacttgcagctttataagagcgctaccaagaaccaccactggggaaaaggttcttattcattgtttctgttggaatgtgatcttgctttctggattttaggaattcaggttactcagtataaaactctgagaaatcagtgtgacttagtccttcacctcctaagataaagtgaatatttctttacaaaataattcatgtccttaatgttaaagatgtaattttattttcaaaacatctataacatgactttcagaagcagttcatttttccaagattcctcacattatactagataaataataggccctcagttaatacccttcagttattgaattaatctagtttgtggaatgaggtgtatcctgccaacttccctctgctcccaagtacactctgagaggtaaaatgctctgggaaatggaacaagaatcgagtggatgctgactctgtgtgcccacctcctcaactgattgataatggttgaccttgggcaagtcacttctttcaatgcctcagttccccatctgtcaaatggggttaataatactgacctacctcacaggggtgttgttgtgaggcattgtaaatcaaagttaatagaatacttcagggtcctctgtggaggatgtcttgagccagagtttaagcctgacacacaggctttggtcctcactgagctgtctccaagactggaactacttagtgactcggcaaattttctgccccccacccctcatcaaagctgctagttcagatgttgacagtgttttcatgaatgttggaatcttactagtccagacttacttaggatgttgttggggaaggcacttgggattttctgtgtcttgcattcacagagggaggccatttcagattcaagagcattggattagggaatcgtgaggcagggatgctactgcgtatttctctctgcaggttggggattaaagttcctttccccatgggtttgaagcagactcagactgtctcaggatcaaagcaaccctcaatggttttgatttatgtcattgcttaccactccccaaccaatcccaggacagctgggtcactgtacccctttgtggtatctgtacctgggcctctccttcctcatagggaccagctgattgaataaatgtgaccaccttatttccaccccccacccccaaaagctacattggaattatttttcctagaaatgtgtataacactcagaattgggcattgatccttaaagcttcatcccattcaccgtattcaacatctgtcatctcttagtgtctgcagtctgaacctaaccttgaccttttttccctctggtttgagaaaactttggacactatttctacttggccaggtgtgggctcaagagccttactctttccatctcagtttaggggcgcagccagctcctcttcccaatagggctctttctgctttccctctccttggccctagatttgtaatccatgaaaaagcacaaggtcctggctccttgcggtcacattctggttctctgtgttttgtggactctgctctcactgttcacccagcactagcagtaccagatggttctgtggagtcctggggaatggagagagcacagtctgactccctgccaagtagccaggagttgacttgcccatggtccgctggctttcccaccacttcctacaggatgggatctaagagactcaagagctgggtttctttcagcactctgtactgtcccaaatagcaaacaaatcactttgtagccagatttctgaatggaaatgagaaattgaattctccatggacttttaggtttatgggggagttttagctgtgtttcttggttttatttcagccaaacatgtctgcttttgattttttttttaaagtataagtggtctatatatatgttcaccttttaaatgtaaatgtttaaaaagtaagcatttatgtgtttccataactgacatctgatgcagacctcattctctccccctcttctaccctcctcttttcccccttttcatactcttgtattggttctaataaatggttgcttttc

SEQ ID NO: 3609 - protein, 90 aa, Homo sapiens [sequence omitted]

SEQ ID NO: 3610 - DNA, 1132 bp, Homo sapiens
ggaagagccgagactgcgaaggagaacgcagcaagcccaggcggcggtggaaaggctaaaggaggacacacctaaacatgtggaatcccaatgccgggcagccagggccaaatccatatccccccaatattgggtgccctggaggttccaatcctgcccacccaccacctattaatccaccctttcccccaggcccctgtcctcctcccccaggagctccccatggcaatccagctttccccccaggtgggccccctcatcctgtgccacagccagggtatccaggatgccaaccgttgggtccctaccctcctccatacccaccgcctgcccctggaatccctcctgtgaatcccttggctcctggcatggttggaccagcagtgatagtagacaagaagatgcagaagaaaatgaagaaagctcataaaaagatgcacaagcaccaaaagcaccacaagtaccacaagcatggcaagcattcctcctcttcctcctcctcttccagcagtgattctgactgaatacaggccctggacccttccctcaagtctcaccagttctgctctcccatcaagcttcagatgccatgttgtactgggggaatgtagcccttgtgctccccaccccctacctccacctgagcctcaccctgctgttgagccctgagtggctaggggaaatgggaagaggattgccatggcctggccatcttgttgctgcttggttagatcatatagctaatgaattaggcaggggagctattttttgaagatgatgaactaaatgttgaagacaagtttgagatctgtaaaatgtgattttttacttccacttataatacttgtgattggggaggtttgtggaaattcaattatgatgaaaaacctatcttttttgtaatgttggcatacttggggaatttagtggcaaatacattccccagcaggccttttgttggttgcactaactgcaaggttgctgggaagtagagtccatttggttgatgagctttgactgcggttttggaaccttacctctcctccttagcccaatatgctgtcttgggtcctattcaaataaagttatttctcctggtctcaaaaaaaaaaaaaaaaaaaaaaaaaaaaaa

SEQ ID NO: 3611 - protein, 148 aa, Homo sapiens
MWNPNAGQPGPNPYPPNIGCPGGSNPAHPPPINPPFPPGPCPPPPGAPHGNPAFPPGGPPHPVPQPGYPGCQPLGPYPPPYPPPAPGIPPVNPLAPGMVGPAVIVDKKMQKKMKKAHKKMHKHQKHHKYHKHGKHSSSSSSSSSSDSD

SEQ ID NO: 3612 - DNA, 1925 bp, Homo sapiens
gagagggcgaaggtaggctggcagatacgttcgtcagcttgctcctttctgcccgtggacgccgccgaagaagcatcgttaaagtctctcttcaccctgccgtcatgtctaagtcagagtctcctaaagagcccgaacagctgaggaagctcttcattggagggttgagctttgaaacaactgatgagagcctgaggagccattttgagcaatggggaacgctcacggactgtgtggtaatgagagatccaaacaccaagcgctctaggggctttgggtttgtcacatatgccactgtggaggaggtggatgcagctatgaatgcaaggccacacaaggtggatggaagagttgtggaaccaaagagagctgtctccagagaagattctcaaagaccaggtgcccacttaactgtgaaaaagatatttgttggtggcattaaagaagacactgaagaacatcacctaagagattattttgaacagtatggaaaaattgaagtgattgaaatcatgactgaccgaggcagtggcaagaaaaggggctttgcctttgtaacctttgacgaccatgactccgtggataagattgtcattcagaaataccatactgtgaatggccacaactgtgaagttagaaaagccctgtcaaagcaagagatggctagtgcttcatccagccaaagaggtcgaagtggttctggaaactttggtggtggtcgtggaggtggtttcggtgggaatgacaacttcggtcgtggaggaaacttcagtggtcgtggtggctttggtggcagccgtggtggtggtggatatggtggcagtggggatggctataatggatttggcaatgatggtggttatggaggaggcggccctggttactctggaggaagcagaggctatggaagtggtggacagggttatggaaaccagggcagtggctatggcgggagtggcagctatgacagctataacaacggaggcggaggcggctttggcggtggtagtggaagcaattttggaggtggtggaagctacaatgattttgggaattacaacaatcagtcttcaaattttggacccatgaagggaggaaattttggaggcagaagctctggcccctatggcggtggaggccaatactttgcaaaaccacgaaaccaaggtggctatggcggttccagcagcagcagtagctatggcagtggcagaagattttaattaggaaacaaagcttagcaggagaggagagccagagaagtgacagggaagctacaggttacaacagatttgtgaactcagccaagcacagtggtggcagggcctagctgctacaaagaagacatgttttagacaaatactcatgtgtatgggcaaaaaactcgaggactgtatttgtgactaattgtataacaggttattttagtttctgttctgtggaaagtgtaaagcattccaacaaagggttttaatgtagatttttttttttgcaccccatgctgttgattgctaaatgtaacagtctgatcgtgacgctgaataaatgtcttttttttaatgtgctgtgtaaagttagtctactcttaagccatcttggtaaatttccccaacagtgtgaagttagaattccttcagggtgatgccaggttctatttggaatttatatacaacctgcttgggtggagaagccattgtcttcggaaaccttggtgtagttgaactgatagttactgttgtgacctgaagttcaccattaaaagggattacccaagcaaaatcatggaatggttataaaagtgattgttggcacatcctatgcaatatatctaaattgaataatggtaccagataaaattatagatgggaatgaagcttgtgtatccattatcatgtgtaatcaataaacgatttaattctcttgaa

SEQ ID NO: 3613 - protein, 372 aa, Homo sapiens
MSKSESPKEPEQLRKLFIGGLSFETTDESLRSHFEQWGTLTDCVVMRDPNTKRSRGFGFVTYATVEEVDAAMNARPHKVDGRVVEPKRAVSREDSQRPGAHLTVKKIFVGGIKEDTEEHHLRDYFEQYGKIEVIEIMTDRGSGKKRGFAFVTFDDHDSVDKIVIQKYHTVNGHNCEVRKALSKQEMASASSSQRGRSGSGNFGGGRGGGFGGNDNFGRGGNFSGRGGFGGSRGGGGYGGSGDGYNGFGNDGGYGGGGPGYSGGSRGYGSGGQGYGNQGSGYGGSGSYDSYNNGGGGGFGGGSGSNFGGGGSYNDFGNYNNQSSNFGPMKGGNFGGRSSGPYGGGGQYFAKPRNQGGYGGSSSSSSYGSGRRF

SEQ ID NO: 3614 - DNA, 1375 bp, Homo sapiens
gctcttgggttctgtagttttctcgcgatccaaaaggctccgtgcccaaagcaaatgctggccgccaacccaggcaagaccccgatcagccttctgcaggagtatgggaccagaatagggaagacgcctgtgtacgaccttctcaaagccgagggccaagcccaccagcctaatttcaccttccgggtcaccgttggcgacaccagctgcactggtcagggccccagcaagaaggcagccaagcacaaggcagctgaggtggccctcaaacacctcaaaggggggagcatgctggagccggccctggaggacagcagttctttttctcccctagactcttcactgcctgaggacattccggtttttactgctgcagcagctgctaccccagttccatctgtagtcctaaccaggagcccccccatggaactgcagccccctgtctcccctcagcagtctgagtgcaaccccgttggtgctctgcaggagctggtggtgcagaaaggctggcggttgccggagtacacagtgacccaggagtctgggccagcccaccgcaaagaattcaccatgacctgtcgagtggagcgtttcattgagattgggagtggcacttccaaaaaattggcaaagcggaatgcggcggccaaaatgctgcttcgagtgcacacggtgcctctggatgcccgggatggcaatgaggtggagcctgatgatgaccacttctccattggtgtgggctcccgcctggatggtcttcgaaaccggggcccaggttgcacctgggattctctacgaaattcagtaggagagaagatcctgtccctccgcagttgctccctgggctccctgggtgccctgggccctgcctgctgccgtgtcctcagtgagctctctgaggagcaggcctttcacgtcagctacctggatattgaggagctgagcctgagtggactctgccagtgcctggtggaactgtccacccagccggccactgtgtgtcatggctctgcaaccaccagggaggcagcccgtggtgaggctgcccgccgtgccctgcagtacctcaagatcatggcaggcagcaagtgaagccccagctggactcatggatgtgcaccctttgctccctgctctttctgcctctgggctcatgtatctgcgcagctctggtaccctctgtgggtgccatctctacctctgacacagactgcctgccttgaagctgagaaggcacagggcaaggagccaaggaccacagagcctcagccagcccaggatccgtcctcattttattggtgatgatgaatgggaatgaaatcagggggctgtctactagagcctggaataaatatgctgctttgtggatttttaa

SEQ ID NO: 3615 - protein, 345 aa, Homo sapiens
MLAANPGKTPISLLQEYGTRIGKTPVYDLLKAEGQAHQPNFTFRVTVGDTSCTGQGPSKKAAKHKAAEVALKHLKGGSMLEPALEDSSSFSPLDSSLPEDIPVFTAAAAATPVPSVVLTRSPPMELQPPVSPQQSECNPVGALQELVVQKGWRLPEYTVTQESGPAHRKEFTMTCRVERFIEIGSGTSKKLAKRNAAAKMLLRVHTVPLDARDGNEVEPDDDHFSIGVGSRLDGLRNRGPGCTWDSLRNSVGEKILSLRSCSLGSLGALGPACCRVLSELSEEQAFHVSYLDIEELSLSGLCQCLVELSTQPATVCHGSATTREAARGEAARRALQYLKIMAGSK

SEQ ID NO: 3616 - DNA, 1888 bp, Homo sapiens
gcctctccagctgcgacacagatggcgcgcgggctcttgggttctgtagttttctcgcgatccaaaaggctccgtgcccaagtgagtccttaccgcctccctacccagcggcttcccctccgctagtacgcatgtccacagcttcacggaccgggagagagggggcgcggaaggaaggaggcgggacggtattacaaacaaaaaaatacggccttctcgagaagcgacggcggagggcccgctcctcccagaaggcggtgcagcctgcccgggcgagccacgcacgcagagggttgtggggcggatagctcccctccagatggaggctcacgaagtagggtgggcgggggactccatatcccagcgtgccccgcggcgggccctaccggccgcgactccgggcttggccccggccctagctcgtcggctgtgtattggggcgcgtggaggctgcagtcacggtggcgcccgcggggacggaggagggaatgagtgaagaggagcaaggctccggcactaccacgggctgcgggctgcctagtatagagcaaatgctggccgccaacccaggcaagaccccgatcagccttctgcaggagtatgggaccagaatagggaagacgcctgtgtacgaccttctcaaagccgagggccaagcccaccagcctaatttcaccttccgggtcaccgttggcgacaccagctgcactggtcagggccccagcaagaaggcagccaagcacaaggcagctgaggtggccctcaaacacctcaaaggggggagcatgctggagccggccctggaggacagcagttctttttctcccctagactcttcactgcctgaggacattccggtttttactgctgcagcagctgctaccccagttccatctgtagtcctaaccaggagcccccccatggaactgcagccccctgtctcccctcagcagtctgagtgcaaccccgttggtgctctgcaggagctggtggtgcagaaaggctggcggttgccggagtacacagtgacccaggagtctgggccagcccaccgcaaagaattcaccatgacctgtcgagtggagcgtttcattgagattgggagtggcacttccaaaaaattggcaaagcggaatgcggcggccaaaatgctgcttcgagtgcacacggtgcctctggatgcccgggatggcaatgaggtggagcctgatgatgaccacttctccattggtgtgggctcccgcctggatggtcttcgaaaccggggcccaggttgcacctgggattctctacgaaattcagtaggagagaagatcctgtccctccgcagttgctccctgggctccctgggtgccctgggccctgcctgctgccgtgtcctcagtgagctctctgaggagcaggcctttcacgtcagctacctggatattgaggagctgagcctgagtggactctgccagtgcctggtggaactgtccacccagccggccactgtgtgtcatggctctgcaaccaccagggaggcagcccgtggtgaggctgcccgccgtgccctgcagtacctcaagatcatggcaggcagcaagtgaagccccagctggactcatggatgtgcaccctttgctccctgctctttctgcctctgggctcatgtatctgcgcagctctggtaccctctgtgggtgccatctctacctctgacacagactgcctgccttgaagctgagaaggcacagggcaaggagccaaggaccacagagcctcagccagcccaggatccgtcctcattttattggtgatgatgaatgggaatgaaatcagggggctgtctactagagcctggaataaatatgctgctttgtggatttttaaaaaaaaaaaaaaaaaa

SEQ ID NO: 3617 - protein, 366 aa, Homo sapiens
MSEEEQGSGTTTGCGLPSIEQMLAANPGKTPISLLQEYGTRIGKTPVYDLLKAEGQAHQPNFTFRVTVGDTSCTGQGPSKKAAKHKAAEVALKHLKGGSMLEPALEDSSSFSPLDSSLPEDIPVFTAAAAATPVPSVVLTRSPPMELQPPVSPQQSECNPVGALQELVVQKGWRLPEYTVTQESGPAHRKEFTMTCRVERFIEIGSGTSKKLAKRNAAAKMLLRVHTVPLDARDGNEVEPDDDHFSIGVGSRLDGLRNRGPGCTWDSLRNSVGEKILSLRSCSLGSLGALGPACCRVLSELSEEQAFHVSYLDIEELSLSGLCQCLVELSTQPATVCHGSATTREAARGEAARRALQYLKIMAGSK

SEQ ID NO: 3618 - DNA, 1871 bp, Homo sapiens
gcctctccagctgcgacacagatggcgcgcgggctcttgggttctgtagttttctcgcgatccaaaaggctccgtgcccaagtgagtccttaccgcctccctacccagcggcttcccctccgctagtacgcatgtccacagcttcacggaccgggagagagggggcgcggaaggaaggaggcgggacggtattacaaacaaaaaaatacggccttctcgagaagcgacggcggagggcccgctcctcccagaaggcggtgcagcctgcccgggcgagccacgcacgcagagggttgtggggcggatagctcccctccagatggaggctcacgaagtagggtgggcgggggactccatatcccagcgtgccccgcggcgggccctaccggccgcgactccgggcttggccccggccctagctcgtcggctgtgtattggggcgcgtggaggctgcagtcacggtggcgcccgcggggacggaggagggaatgagtgaagaggagcaaggctccggcactaccacgggctgcgggctgcctagtatagagcaaatgctggccgccaacccaggcaagaccccgatcagccttctgcaggagtatgggaccagaatagggaagacgcctgtgtacgaccttctcaaagccgagggccaagcccaccagcctaatttcaccttccgggtcaccgttggcgacaccagctgcactggtcagggccccagcaagaaggcagccaagcacaaggcagctgaggtggccctcaaacacctcaaaggggggagcatgctggagccggccctggaggacagcagactcttcactgcctgaggacattccggtttttactgctgcagcagctgctaccccagttccatctgtagtcctaaccaggagcccccccatggaactgcagccccctgtctcccctcagcagtctgagtgcaaccccgttggtgctctgcaggagctggtggtgcagaaaggctggcggttgccggagtacacagtgacccaggagtctgggccagcccaccgcaaagaattcaccatgacctgtcgagtggagcgtttcattgagattgggagtggcacttccaaaaaattggcaaagcggaatgcggcggccaaaatgctgcttcgagtgcacacggtgcctctggatgcccgggatggcaatgaggtggagcctgatgatgaccacttctccattggtgtgggctcccgcctggatggtcttcgaaaccggggcccaggttgcacctgggattctctacgaaattcagtaggagagaagatcctgtccctccgcagttgctccctgggctccctgggtgccctgggccctgcctgctgccgtgtcctcagtgagctctctgaggagcaggcctttcacgtcagctacctggatattgaggagctgagcctgagtggactctgccagtgcctggtggaactgtccacccagccggccactgtgtgtcatggctctgcaaccaccagggaggcagcccgtggtgaggctgcccgccgtgccctgcagtacctcaagatcatggcaggcagcaagtgaagccccagctggactcatggatgtgcaccctttgctccctgctctttctgcctctgggctcatgtatctgcgcagctctggtaccctctgtgggtgccatctctacctctgacacagactgcctgccttgaagctgagaaggcacagggcaaggagccaaggaccacagagcctcagccagcccaggatccgtcctcattttattggtgatgatgaatgggaatgaaatcagggggctgtctactagagcctggaataaatatgctgctttgtggatttttaaaaaaaaaaaaaaaaaa

SEQ ID NO: 3619 - protein, 113 aa, Homo sapiens
MSEEEQGSGTTTGCGLPSIEQMLAANPGKTPISLLQEYGTRIGKTPVYDLLKAEGQAHQPNFTFRVTVGDTSCTGQGPSKKAAKHKAAEVALKHLKGGSMLEPALEDSRLFTA

SEQ ID NO: 3620 - DNA, 1362 bp, Homo sapiens
ctcgcgcctgcagtttttggctttcacccccaaccagtgaccaaagacttgaccactcaaagtccagctccccagaacactgctcgacatggacaccggtgtgattgaaggtggattaaatgtcactctcaccatccggctacttatgcatggaaaggaagttggcagtatcatcggaaagaaaggagaatcagttaagaagatgcgcgaggagagtggtgcacgtatcaacatctcagaagggaattgtcctgagagaattatcactttggctggacccactaatgccatcttcaaagcctttgctatgatcattgacaaactggaagaggacataagcagctctatgaccaatagcacagctgccagtagacccccggtcaccctgaggctggtggtccctgctagtcagtgtggctctctcattggaaaaggtggatgcaagatcaaggaaatacgagagagtacaggggctcaggtccaggtggcaggggatatgctacccaactcaactgagcgggccatcactattgctggcattccacaatccatcattgagtgtgtcaaacagatctgcgtggtcatgttggagactctctcccagtcccccccgaagggcgtgaccatcccgtaccggcccaagccgtccagctctccggtcatctttgcaggtggtcaggacaggtacagcacaggcagcgacagtgcgagctttccccacaccaccccgtccatgtgcctcaaccctgacctggagggaccacctctagaggcctataccattcaaggacagtatgccattccacagccagatttgaccaagctgcaccagttggcaatgcaacagtctcattttcccatgacgcatggcaacaccggattcagtggcattgaatccagctctccagaggtgaaaggctattgggcaggtttggatgcatctgctcagactacttctcatgaactcaccattccaaacgatttgattggctgcataatcgggcgtcaaggcgccaaaatcaatgagatccgtcagatgtctggggcgcagatcaaaattgcgaacccagtggaaggatctactgataggcaggttaccatcactggatctgctgccagcattagcctggctcaatatctaatcaatgtcaggctttcctcggagacgggtggcatggggagcagctagaacaatgcagattcatccataatccctttctgctgttcaccaccacccatgatccatctgtgtagtttctgaacagtcagcgattccaggttttaaatagtttgtaaattttcagtttctacacactttatcatccactcgtgattttttaattaaagcgttttaattccttt

SEQ ID NO: 3621 - protein, 366 aa, Homo sapiens
MDTGVIEGGLNVTLTIRLLMHGKEVGSIIGKKGESVKKMREESGARINISEGNCPERIITLAGPTNAIFKAFAMIIDKLEEDISSSMTNSTAASRPPVTLRLVVPASQCGSLIGKGGCKIKEIRESTGAQVQVAGDMLPNSTERAITIAGIPQSIIECVKQICVVMLETLSQSPPKGVTIPYRPKPSSSPVIFAGGQDRYSTGSDSASFPHTTPSMCLNPDLEGPPLEAYTIQGQYAIPQPDLTKLHQLAMQQSHFPMTHGNTGFSGIESSSPEVKGYWAGLDASAQTTSHELTIPNDLIGCIIGRQGAKINEIRQMSGAQIKIANPVEGSTDRQVTITGSAASISLAQYLINVRLSSETGGMGSS

SEQ ID NO: 3622 - DNA, 1350 bp, Homo sapiens
ctcgcgcctgcagtttttggctttcacccccaaccagtgaccaaagacttgaccactcaaagtccagctccccagaacactgctcgacatggacaccggtgtgattgaaggtggattaaatgtcactctcaccatccggctacttatgcatggaaaggaagttggcagtatcatcggaaagaaaggagaatcagttaagaagatgcgcgaggagagtggtgcacgtatcaacatctcagaagggaattgtcctgagagaattatcactttggctggacccactaatgccatcttcaaagcctttgctatgatcattgacaaactggaagaggacataagcagctctatgaccaatagcacagctgccagtagacccccggtcaccctgaggctggtggtccctgctagtcagtgtggctctctcattggaaaaggtggatgcaagatcaaggaaatacgagagagtacaggggctcaggtccaggtggcaggggatatgctacccaactcaactgagcgggccatcactattgctggcattccacaatccatcattgagtgtgtcaaacagatctgcgtggtcatgttggagtcccccccgaagggcgtgaccatcccgtaccggcccaagccgtccagctctccggtcatctttgcaggtggtcaggacaggtacagcacaggcagcgacagtgcgagctttccccacaccaccccgtccatgtgcctcaaccctgacctggagggaccacctctagaggcctataccattcaaggacagtatgccattccacagccagatttgaccaagctgcaccagttggcaatgcaacagtctcattttcccatgacgcatggcaacaccggattcagtggcattgaatccagctctccagaggtgaaaggctattgggcaggtttggatgcatctgctcagactacttctcatgaactcaccattccaaacgatttgattggctgcataatcgggcgtcaaggcgccaaaatcaatgagatccgtcagatgtctggggcgcagatcaaaattgcgaacccagtggaaggatctactgataggcaggttaccatcactggatctgctgccagcattagcctggctcaatatctaatcaatgtcaggctttcctcggagacgggtggcatggggagcagctagaacaatgcagattcatccataatccctttctgctgttcaccaccacccatgatccatctgtgtagtttctgaacagtcagcgattccaggttttaaatagtttgtaaattttcagtttctacacactttatcatccactcgtgattttttaattaaagcgttttaattccttt

SEQ ID NO: 3623 - protein, 362 aa, Homo sapiens
MDTGVIEGGLNVTLTIRLLMHGKEVGSIIGKKGESVKKMREESGARINISEGNCPERIITLAGPTNAIFKAFAMIIDKLEEDISSSMTNSTAASRPPVTLRLVVPASQCGSLIGKGGCKIKEIRESTGAQVQVAGDMLPNSTERAITIAGIPQSIIECVKQICVVMLESPPKGVTIPYRPKPSSSPVIFAGGQDRYSTGSDSASFPHTTPSMCLNPDLEGPPLEAYTIQGQYAIPQPDLTKLHQLAMQQSHFPMTHGNTGFSGIESSSPEVKGYWAGLDASAQTTSHELTIPNDLIGCIIGRQGAKINEIRQMSGAQIKIANPVEGSTDRQVTITGSAASISLAQYLINVRLSSETGGMGSS

SEQ ID NO: 3624 - DNA, 2318 bp, Homo sapiens
agagcgacgcggaaccccgggcgcctgggtccccagcatgatcctcggcagcctgagccgggcagggcccctgcctctgctacggcagcccccgatcatgcagcccccactggacctcaagcagatcctgcccttcccactcgagccagcccctacccttggcctcttcagcaactacagcaccatggaccctgtgcagaaggctgtgctctcccacacttttgggggacccttgctcaagaccaagcggcccgtcatttcctgtaatatctgtcaaatccgcttcaattctcagagccaggctgaggcgcactacaaaggtaatcgccacgcccgacgagtcaaaggcattgaggctgccaagaccagaggcagggagcctggcgtccgagaacctggagacccagctcccccaggcagcaccccaacaaatggggatggtgtagcaccccgtccagtttccatggagaatggactggggccagccccaggatccccagagaaacagcctggctccccatcccctcccagcattccggagactggtcagggtgtaaccaagggtgaaggggggactccagccccggcttccttgcctgggggtagcaaggaagaggaggagaaagccaagcggctgctctactgtgctctgtgcaaggtggctgtgaactccctgtcccagcttgaggcacataacaaaggtactaagcacaagacaattctggaggcccgaagtgggctcgggcccatcaaagcttaccctcggctggggcctcccaccccgggggaaccagaggctcctgcccaggaccgaactttccactgtgagatctgcaatgtcaaggtcaactcggaggtccaactgaaacagcacatctccagccggcggcaccgagacggcgtggccgggaagcccaacccactactgagccgtcacaagaagtctaggggcgccggggagctggcgggcacgctgactttctccaaggagctgcccaagtccctggcgggcggcctgctccccagccccctggcggtggctgcagtgatggcagcggcagcaggctcgccgctgtccctgcgcccggctccagccgcacctcttctccagggaccgccgatcactcaccctctgcttcacccggcccccggacccatccgaactgcgcacggacccatcctcttctccccgtactgacctcaaccctgaacccctcccattcaactccccacctccagccgggacccaggcgtccgggctcccagcccgcccctcctcccggcactccctaaatgatctctccttccccccccccaccccgagatacggggttccaggaaaggggaggggtagcgggggaggggggcttcagaagggggggaacaccccagatctcagggaaccccgccccctgcctttccctctcccctagaaaagggggggccgtctcacccccgagcccccttggagacaccccccctcccaaaagccatgtccatccagcccttccccccaaacctagcacaaaacggggttcacaagccatggtcggggtccgggggggacagaaatggattttcttggcaataagcggactctgggactccggctccctaccccaaactgaagcgcttccgtgaacacccccgtcctccgtagggggaggggagcaggcgggatcctgggtccctcataagcactttggttttaccgcctgcaacctcactgtgcccgccccgcaccatgccctagccccaggtctagccgggcccattgcagggggcagcacttgggggcatctccggcacttgggtgggaccaaggagatgccaccatagacctttccctcgccttcttcctccctagtccgggttccattcttttcaccagcacccatcgcccaaggggtaccgaggggggcaaggggtgtccagtccaagcccacccccgcctcgccttccgcaaaactgtgagcaaaaagcaatagaagcctcgcccccgcccttccccttcgcaggattcgccgagtctgtagcctccccgatccaagttcctagacctcatggctgtcccctcccaccagtcacctccactgcacaactcgggcgggggtgtgacacctctcccccacccccgactccgtggtttccgtatcgtcaacccttcagccgccgacccgggaggggtctggcctacactggtcttccccttcccatcaactctttctgcttgacaatgtagcaacccaggccccccacccacggtcctcccctttttcctctccctgacaataaagtctgaatttgttctgccctcc

SEQ ID NO: 3625 - protein, 366 aa, Homo sapiens
MQPPLDLKQILPFPLEPAPTLGLFSNYSTMDPVQKAVLSHTFGGPLLKTKRPVISCNICQIRFNSQSQAEAHYKGNRHARRVKGIEAAKTRGREPGVREPGDPAPPGSTPTNGDGVAPRPVSMENGLGPAPGSPEKQPGSPSPPSIPETGQGVTKGEGGTPAPASLPGGSKEEEEKAKRLLYCALCKVAVNSLSQLEAHNKGTKHKTILEARSGLGPIKAYPRLGPPTPGEPEAPAQDRTFHCEICNVKVNSEVQLKQHISSRRHRDGVAGKPNPLLSRHKKSRGAGELAGTLTFSKELPKSLAGGLLPSPLAVAAVMAAAAGSPLSLRPAPAAPLLQGPPITHPLLHPAPGPIRTAHGPILFSPY

SEQ ID NO: 3626 - DNA, 1184 bp, Homo sapiens
agttcacccaatggacctgcctactgcagcgtaggcctcgcctcaacggcaggagagcaggcggctgcggttgctgcagccttcagtctccacccggactacgccatgttggggtttgtgggtcgggtggccgctgctccggcctccggggccttgcggagactcaccccttcagcgtcgctgcccccagctcagctcttactgcgggccgctccgacggcggtccatcctgtcagggactatgcggcgcaaacatctccttcgccaaaagcaggcgccgccaccgggcgcatcgtggcggtcattggcgcagtggtggacgtccagtttgatgagggactaccaccaattctaaatgccctggaagtgcaaggcagggagaccagactggttttggaggtggcccagcatttgggtgagagcacagtaaggactattgctatggatggtacagaaggcttggttagaggccagaaagtactggattctggtgcaccaatcaaaattcctgttggtcctgagactttgggcagaatcatgaatgtcattggagaacctattgatgaaagaggtcccatcaaaaccaaacagtaaatttgctcccattcatgctgaggctccagagttcatggaaatgagtgttgagcaggaaattctggtgactggtatcaaggttgtcgatctgctagctccctatgccaagggtggcaaaattgggctttttggtggtgctggagttggcaagactgtactgatcatggagttaatcaacaatgtcgccaaagcccatggtggttactctgtgtttgctggtgttggtgagaggacccgtgaaggcaatgatttataccatgaaatgattgaatctggtgttatcaacttaaaagatgccacctctaaggtagcgctggtatatggtcaaatgaatgaaccacctggtgctcgtgcccgggtagctctgactgggctgactgtggctgaatacttcagagaccaagaaggtcaagatgtactgctatttattgataacatctttcgcttcacccaggctggttcagaggtgtctgcattattgggccgaatcccttctgctgtgggctatcagcctaccctggccactgacatgggtactatgcaggaaagaattaccactaccaagaagggatctatcacctctgtacagg

SEQ ID NO: 3627 - protein, 67 aa, Homo sapiens
MYCYLLITSFASPRLVQRCLHYWAESLLLWAISLPWPLTWVLCRKELPLPRRDLSPLYRLSMCLLMT

SEQ ID NO: 3628 - DNA, 797 bp, Homo sapiens
cttggttccgcgttccctgcacaaaatgcccggcgaagccacagaaaccgtccctgctacagagcaggagttgccgcagccccaggctgagacagggtctggaacagaatctgacagtgatgaatcagtaccagagcttgaagaacaggattccacccaggcaaccacacaacaagcccagctggcggcagcagctgaaattgatgaagaaccagtcagtaaagcaaaacagagtcggagtgaaaagaaggcacggaaggctatgtccaaactgggtcttcggcaggttacaggagttactagagtcactatccggaaatctaagaatatactctttgtcatcacaaaaccagatgtctacaagagccctgcttcagatacttacatagtttttggggaagccaagatcgaagatttatcccagcaagcacaactagcagctgctgagaaattcaaagttcaaggtgaagctgtctcaaacattcaagaaaacacacagactccaactgtacaagaggagagtgaagaggaagaggtcgatgaaacaggtgtagaagttaaggacattgaattggtcatgtcacaagcaaatgtgtcgagagcaaaggcagtccgagccctgaagaacaacagtaatgatattgtaaatgcgattatggaattaacaatgtaaccatatggaagcaactttttttggtgtctcaaaggagtaactgcagcttggtttgaaatttgtactgtttctatcataaataaagttatggcttcttgttggaaaaaaaaaaaaaaaaaaaaaa

SEQ ID NO: 3629 - protein, 215 aa, Homo sapiens
MPGEATETVPATEQELPQPQAETGSGTESDSDESVPELEEQDSTQATTQQAQLAAAAEIDEEPVSKAKQSRSEKKARKAMSKLGLRQVTGVTRVTIRKSKNILFVITKPDVYKSPASDTYIVFGEAKIEDLSQQAQLAAAEKFKVQGEAVSNIQENTQTPTVQEESEEEEVDETGVEVKDIELVMSQANVSRAKAVRALKNNSNDIVNAIMELTM

SEQ ID NO: 3630 - DNA, 450 bp, Homo sapiens
ctgaggggtgtacattttattggaaaccttaaatactgttcagaaagaatatatcttcaatcaaggctcttgtgcagcctacacagaaaaatgaagctttttgggttaggggcaaggagagagacagtacagaggacaaagacccctcacgatgaatgctcttcagccagcttatcagcttttgccacagcttcttcaatgggtcccaccatatagaaggcctgttctgggagatggtcatattcacctgccaaaatctgctggaatcctttgatggtctccttcaggggtaccagcttccccatatgacctgtgaagacctcagcaacctggaatggctgagacaagaaacgctgtatttccgtgcacgggacacggtcaacttgtcttcctcagaaagttcatccatacccaggatggcaatgatatctggaaggaatttgtagtcct

SEQ ID NO: 3631 - DNA, 1080 bp, Homo sapiens
cctattctacggctgacccctggtggtcacgtggatctgttcgccacgcaagtctgggtccttcggcgattgaccggggtccttgctgttcgggagcctctcctaagctgcctgttcgcgcgagagtttggaggggcgggtttggggtcggtgtctgattggggctcgcaccgcagcacgctggagtcccgcttaggtaccagttagcgtcaggggagctgggtcaggcggtcgccgggacaccccgtgtgtggcaggcggcgaagcgctctggagaatcccggacagccctgctccctgcagccaggtgtagtttcgggagccactggggccaaagtgagagtccagcggtcttccagcgcttgggccacggcggcggccctgggagcagaggtggagcgaccccattacgctaaagatgaaaggctggggttggctggccctgcttctgggggccctgctgggaaccgcctgggctcggaggagccaggatctccactgtggagcatgcagggctctggtggatgaactagaatgggaaattgcccaggtggaccccaagaagaccattcagatgggatctttccggatcaatccagatggcagccagtcagtggtggaggtgccttatgcccgctcagaggcccacctcacagagctgctggaggagatatgtgaccggatgaaggagtatggggaacagattgatccttccacccatcgcaagaactacgtacgtgtagtgggccggaatggagaatccagtgaactggacctacaaggcatccgaatcgactcagatattagcggcaccctcaagtttgcgtgtgagagcattgtggaggaatacgaggatgaactcattgaattcttttcccgagaggctgacaatgttaaagacaaactttgcagtaagcgaacagatctttgtgaccatgccctgcacatatcgcatgatgagctatgaaccactggagcagcccacactggcttgatggatcacccccaggaggggaaaatggtggcaatgccttttatatattatgtttttactgaaattaactgaaaaaatatgaaacc

SEQ ID NO: 3632 - protein, 182 aa, Homo sapiens
MKGWGWLALLLGALLGTAWARRSQDLHCGACRALVDELEWEIAQVDPKKTIQMGSFRINPDGSQSVVEVPYARSEAHLTELLEEICDRMKEYGEQIDPSTHRKNYVRVVGRNGESSELDLQGIRIDSDISGTLKFACESIVEEYEDELIEFFSREADNVKDKLCSKRTDLCDHALHISHDEL

SEQ ID NO: 3633 - DNA, 1641 bp, Homo sapiens
ggcctcatcatttctgtctcctgtttctccacttccttctctattggttggtccactgatgtatggacttgcacatgatgaactgtgaacttctagccacatgtagtgcccttgggtacttggagggagacacttaccataaggaaccagattgcttagagagcgtgaaggatctgatccgctatttgaggcatgaggatgagacacgagatgtgcggcagcagctgggggcagcccagatcctacagagcgaccttctgcccatcctcacccagcaccaccaggacaagcctctctttgatgctgttatccagactgatggtgaacttgacacaaccagccttgctctgttttggcaatctgcctaaggagcccagctttcggcaccattttttgcaggtgctaacttatttgcaggcctacaaagaggcctttgccagtgagaaggcttttggagtcctcagtgaaaccttgtatgagctgctgcagctgggctgggaggaacggcaggaggaagacaacttgctgattgaacggatcctactgctggtcagaaatattctccatgtcccagctgaccttgatcaggagaagaagattgatgatgacgccagtgcccatgaccagctcctctgggcgattcacctcagcggcctggatgacctgctcctctttctggccagctcgtctgctgaggagcaatggagcctacatgtgctagagattgtctcccttatgtttcgtgaccagaaccccgagcagctggcgggagtagggcagggacgcttagctcaggagcggagtgcagattttgcagaactggaggtattgcgccagcgagagatggcagaaaagaagactcgagccctccagcgaggcaacaggcattctcgatttgggggctcctatattgtccaggggttgaaatccattggggagagggacctcatctttcacaaaggccttcacaacctacgaaactacagttcagatttgggaaagcagccgaaaaaggtgcctaaacgtcgccaggccgcccgagagctgtccattcagcgccgttctgccctcaatgtgaggctcttcctcagagacttctgctctgagttcctggagaactgttacaaccggctcatgggatcagtaaaggatcacctgcttcgggagaaagctcagcagcatgatgagacctattatatgtgggccttggctttcttcatggccttcaaccgagctgcctccttccggccaggcctggtttctgagaccctcagtgtccgtaccttccacttcattgagcagaacctcaccaactactatgagatgatgctgactgaccgcaaggaagctgcctcctgggcacgccggatgcacttggctctgaaggcctatcaggagctgctggcaacagtgaatgagatggacttatctccagatgaggctgtgagggagagcagccgcatcatcaagaacaatattttctatgtgatggagtaccgagaactattcctggcactttttcgaaagtttgatgagagatgccagccccgctctttccttcgtgacctggtggagaccacccacctcttcctcaaaatgttggagcgattctgtcggagccgtgggaacctggtggtgcag

SEQ ID NO: 3634 - DNA, 435 bp, Homo sapiens
atggaggtgacatcatgtggacaacaggctaggatgccagagttagctgctcggtggagatcatttgagaatgcatcttgtcttgttcttgcagcccggcatgccagtgcttcctccacgaatttgaaagacatattggctgacctgatacctaaggagcaggccagaattaagactttcaggcagcaacatggcaagacggtggtgggccaaatcactgtggacatgaaaagtaaaactacacctgacgctgagactcaaagtgtgcaagagtcccaaggacaaagaggagggcctgaaggacccactcttgtgctcggcgtggtcaccgaaggcttaaataataggcttggagaaatggaaacaggcagttcgggaactgacaaggcccttcctacaaagcagaggacgaaattagccactgctccagagtga

SEQ ID NO: 3635 - DNA, 921 bp, Homo sapiens
gaggaccccgggctgggcgccgccgccgatcccggagatcgcccgccatggctttacttactgcggccgcccggctcttgggaaccaagaatgcatcttgtcttgttcttgcagcccggcatgccagtgcttcctccacgaatttgaaagacatattggctgacctgatacctaaggagcaggccagaattaagactttcaggcagcaacatggcaagacggtggtgggccaaatcactgtggacatgatgtatggtggcatgagaggcatgaagggattggtctatgaaacatcagttcttgatcctgatgagggcatccgtttccgaggctttagtatccctgaatgccagaaactgctacccaaggctaagggtggggaagaacccctgcctgagggcttattttggctgctggtaactggacatatcccaacagaggaacaggtaaagcagaaggatattattagctcttctcattccccttcttcattgcctttctctaatctcagacacttaatgctgatccggcatttatagagatgcgtagtgaagggaaggaatcagcagagttctgctgtataaatggattgggttgacctctcttgggttttctttactcagatgttgctgtccttttttatttttctccttccttgtccttgctggtgttctgagcactgtctctttttccacaggtatcttggctctcaaaagagtgggcaaagagggcagctctgccttcccatgtggtcaccatgctggacaactttcccaccaatctacaccccatgtctcagctcagtgcagctgttacagccctcaacagtgaaagtaactttgcccgagcatatgcacagggtatcagccgaaccaagtactgggaggtaggaaatttgggtggggtgatcggtgtgtgatg

SEQ ID NO: 3636 - DNA, 3342 bp, Homo sapiens
gctaatgaatgaatgtgatcatttaaaagaaagtctctttcagtatgagagagagaaaacagaagtagtagtggttgtgagacaacttcaacaagaagtggctgacagcgtaaaaaaattaacgacgttagagtctccactggaaggtatatcatgttgtcacattaatttggatgagacacaggcctcaaataagaaattatttcaagtgaaaagtcaaatataagaaactcctggaaatgacaataaatatgttaaatgtatttggaaatgaagactttgattgccatggagacttaaaaacagatcaactgaaaatggatattctgattaagaagctaaaacagaagtttgatgatcttacagcacagaaggaagctttatcttcaaaatgtgtcaatttggctaaagacaatcaagttcttcaacaggagtttttatctatgaaaaaagtacaacagcaatgtgaaaaacttgaggaggataaaaagatgttgaaagaagaaatattaaatcttaagacacatatggaaaacaatagggtagaaattagtaaactacaagaatataaattggagctagatgaaaaggcaatgcaggcagtagaaaaattagaagaaatccatttacaggaacaagcacaatatgaaaaacaattagagcagttaaacaaggataatatggcttcactaaataaaaaggaactcacacttaaagatgtggaatgtaaattctcagaaatgaaaactgcttatgaagaggttacaaccgaattagaagaatataaggaagcctttgcagcagcattgaaagctaacaattccatgtcaaaaaagttaacaaaatcaaataagaaaatagcagtgattagcatgaagctcctcatggagaaagagcagatgaaatattttctcagtgctcttcctacaaggcgagacccagagtcaccttgtgttgaaaatcttactagtataggactcaacagaaaatatattccccaaacacccataagaattcctatttcaagcccacagacttcaaataactgcaagaactcctagactgtgatggagctggactgtgtagaacaaataactagagaaacaaagagaattgttgctgtgttgaacacttgctcccgtctacttacttctctataatccactgccatggaatgagtgatttttcttagaagcagaggtggagccactgaggaagcacaggcgagccctccccagcacgtgctcactggtccccaacagaacaaccgctgccgcatccatgaggctcccattgtggtgggttgtgtcaccccacaatgtcactgttgctgagcccccatcgcctctgtgttgtggagcagttagagacacactgtggtgtctgagtggctctgtgtgaaggaccgttttctaggtgagaggcacatctcaacacagctgactgatcagactcaaccattttgcacaccctggtcagaatgaaacattccttgggaactcgggccgtgagaagcatccttcctgatcacctgactgtagaaacatccttatcgcaccctcccgggcaaaggcccaacagcctgactgcaggaacatccttgccatatcctgccgggcagcaagctctaccgcccacgcccctccttcccagtcccatgatcaccccagcctgtgagaggcagttggtgctggcagtaagctggtttcctcctctgcagggttttgctagtaataaaggtgttgctgttgaagccgtcaaaaaaaaaaaaaaaaaaggccagcatcgagtcggccttgttggattctggggcccgaggtcgagcccgccgctgccgccgtcgcctgagggaagcgagaagaggccgcgaccggagagaaaaagcggagtcgccaccggagagaagtcgactccctagcagcagccgccgccagagaggcccgcccaccagttcgcccgtccccctgccccgttcacaatgcagcctgcttctgcaaagtggtacgatcgaagggactatgtcttcattgaattttgtgttgaagacagtaaggatgttaatgtaaattttgaaaaatccaaacttacattcagttgtctcggaggaagtgataattttaagcatttaaatgaaattgatctttttcactgtattgatccaaatgattccaagcataaaagaacggacagatcaattttatgttgtttacgaaaaggagaatctggccagtcatggccaaggttaacaaaagaaagggcaaagcttaattggcttagtgtcgacttcaataattggaaagactgggaagatgattcagatgaagacatgtctaattttgatcgtttctctgagatgatgaacaacatgggtggtgatgaggatgtagatttaccagaagtagatggagcagatgatgattcacaagacagtgatgatgaaaaaatgccagatctggagtaaggaatattgtcatcacctggattttgagaaagaaaaataacttctctgcaagatttcataattgagagaattcctgagttgatagctctaaaggcagatatgctgtatttgcctactttaacccatttttcaacctgtttgttttttaaaaggcttcactaagggttgatatgtaccattgtatggggcaattttaagtcagctaaggcaataaccttatgcatgagcatttcccagactttcatgaagctgttgaggtcctaggcaattaatgcagcagttgcgataaataaaaacatctcacctaagtctccttttcttcataacatagatactgacatgataggaagctctcagcttagggaaagagaataaattttagattatagaacatggattcaaaagtgactggaacaaattggctgacaccttactggtaacctgctattcttctggtgttatccttcaggattgttccactaaaatttatttttcaaaaaatttacttcacattattctatgtaagtgatgacttgtcagtgttccaggtgtatcttagctaaaactagagaatgccctaacttagatggtttttgaagcctatacaattggtattgtttgacccttaagcttttacatctcttagcatggaggacgaagaaagctgtacattgttgcttgagagtctgtacatttagtccagatttgtatttgcactgtcagtatggcaaatgagtgaaaaatgtttaatacactattggattttttatttcctttttttgattcagcttatacccgggctgaaaacctcaatttatgttcatgacagtggggatttttttaaatgtctacattctttctaataaactgttggaagactt

SEQ ID NO: 3637 - protein, 273 aa, Homo sapiens
MTINMLNVFGNEDFDCHGDLKTDQLKMDILIKKLKQKFDDLTAQKEALSSKCVNLAKDNQVLQQEFLSMKKVQQQCEKLEEDKKMLKEEILNLKTHMENNRVEISKLQEYKLELDEKAMQAVEKLEEIHLQEQAQYEKQLEQLNKDNMASLNKKELTLKDVECKFSEMKTAYEEVTTELEEYKEAFAAALKANNSMSKKLTKSNKKIAVISMKLLMEKEQMKYFLSALPTRRDPESPCVENLTSIGLNRKYIPQTPIRIPISSPQTSNNCKNS

SEQ ID NO: 3638 - DNA, 2228 bp, Homo sapiens
gacgacctgtctcgctgcgtgcacgccctgccgccgccccgcagaaatgcttcggttacccacagtctttcgccagatgagactggtgtccagggtgctggctcctcatctcactggggcttatgccaaagatgtaaaattcggtgcagatgcccgagccttaatgcttcaaggtatagaccttttagccgatgctgtagcccttacaatggggccaaagggaagaagaacagtgattatcgagcagagctggggaagtcccaaagtaacaaaagatggtgtgactgttgcaaagtcaattgacttaaaggataaatataaaaacattggagctaaacttgttcaagatgttgccaataacacaaatgaagagactggggatggccctaccactgctactgtactggcacgctctatagccaaggaaggcatcgagaagattagcaaaggtgctaatccagtggaaatcaggagaggtgtgatgttagttgttgatgctgtaattgctgaacttaaaaagcagtctaaacctgtgaccacccctgaagaaattgcacaggttgctacaatttctgcaaacggagacaaagaaattggcaatatctctgatgcaatgaaaaaggttggaagaaagggtgtcatcacagtaaaggatggaaaaacactgaatgatgaattagaaattattgaaggcataaagtttgatcgaggctatatttctccatactttattaatacatcaaaaggtcagaaatgtgaattccaggatgcctatgttctgttgagcgaaaagaaaatttctagtgtccagtccgttgtacctgctcttgaaattgccaatgctcaccgtaagcctttggtcataatcgctgaagacgttgatggagaagctctaagtacactcgtcttgaataggctaaaggttggtcttcaggatgtggcaatcaaggctccagggtttggtgacaatagaaagaaccagcttaaagatatggcaattgctactggtggtgcagtgtttggagaagaggggctgaccctaaatcttgaagatgttcagcctcatgacttaggaaacgttggagaggtcattgtgaccaaagatgatgccacgctcttaaaagaaaaaggtgacaaggctcaaattgaaaaacgtattcaagaaatcattgagcagttagatgtcacaactagtgaatatgaaaaggaaaaactgaatgaacggctggcaaaactttcagatgtagtagctgtgctgaaggttggtgggacaagtgatgttgaagtgaatgaaaagaaagacagagttcggatgcccttaatgctacaagagctgctgttgaagaaggctttgtattgggagggggttgtgccctgcttcgatgcattctagccttggactcattgactccagctaatgaagatcaaaaaattggtacagaaattattaaagaacactcaaaattccagcaatgaccattgctaagaatgcaggtgttgaaggatcttcgatagttgagaaaattacgcaaatttcctcagaagctggttatgatgctatggttggagattttgtgaatatggtggaaaaatgaattattgacccaacaaaggttgtgagaactgctttattggatgccgctggtgtgacctctctgttaactacagcagaagttgtagtcacagaaattcctaaagaagagaaggaccctggaatgggtgcaatgggtagaatgggaggtggtatgggaagtggcatgttctaactcctagactagtgctttacctttattaatgaactgtgacaggaagcccaaggcagtgttcctcaccaataacttcagagaagtcagttggagaaaaatgaagaaaaaggctggctgaaaatcactataaccatcagttactggtttcagttgacaaaatatataatggtttactgctgtcattgtccatgcctatagataatttattttgtatttttgaataaaaaacatttgtacattcctgatactgggtaaaagagccatgtaccaatgtatggctttcaacttaaatcactgaggcatttttactactattctgttaaaatcaggatttttagtgcttgccaccaccagatgagaagttaagcagcctttctgtggagagtgagaataattgtgtacaaagtagagaaatatccaattatgtgacaacttttgtgtaataaaaatttgtttaaagtt

SEQ ID NO: 3639 - protein, 448 aa, Homo sapiens
MLRLPTVFRQMRLVSRVLAPHLTGAYAKDVKFGADARALMLQGIDLLADAVALTMGPKGRRTVIIEQSWGSPKVTKDGVTVAKSIDLKDKYKNIGAKLVQDVANNTNEETGDGPTTATVLARSIAKEGIEKISKGANPVEIRRGVMLVVDAVIAELKKQSKPVTTPEEIAQVATISANGDKEIGNISDAMKKVGRKGVITVKDGKTLNDELEIIEGIKFDRGYISPYFINTSKGQKCEFQDAYVLLSEKKISSVQSVVPALEIANAHRKPLVIIAEDVDGEALSTLVLNRLKVGLQDVAIKAPGFGDNRKNQLKDMAIATGGAVFGEEGLTLNLEDVQPHDLGNVGEVIVTKDDATLLKEKGDKAQIEKRIQEIIEQLDVTTSEYEKEKLNERLAKLSDVVAVLKVGGTSDVEVNEKKDRVRMPLMLQELLLKKALYWEGVVPCFDAF

SEQ ID NO: 3640 - DNA, 2186 bp, Homo sapiens
gtgcggtggtcaggaacgaggagactccactaagttccttgtgttgccttcattttcattcccccaacccccaatgaattttagccaaatggagcggagtccctgaaagatttttgccaggaagatctggaagaagaggaaaacctgcctgaggaagacagcgaagaggaagaagaagggggctcagaagcagaacaagtccagggtagcttagtcctttcaaatgaaaaccttggtcaaagcctgcatcaggaaggcttttctatcccgctcctatggctccagaactgcctgatccgagcagctgatgatcgggaagaggatggctgctcccaggccgttccattggtgccactcacagaggaaaatgaggaagccatggaaaacgaacagtttcagcagctgttgcgcaagctaggggttcggccccctgcctctgggcaggaaaccttctggcgaattccagccaagctgagtcctacccagctccggagggcagcagcttctttgagtcaaccagaggaggaacagaagctgcagccagagctgcagcctaaagtccctggagagcaaggctctgatgaggagcactgtaaagagcaccgagcacaagccctgagggccctcttgctagcccacaagaagaaagcgggcctggcatccccagaggaggaagacgctgttggtaaagagccgctgaaggcagcacccaagaaacgacaattgctggacagcgacgaggaacaggaagaagatgagggcaggaacagagcaccagagttgggagctccaggaatccaaaagaagaaacgataccagattgaggatgatgaggatgactgaagagctaagaagcctaggggtagagatagacacgtttttagatggtgcattcaagtcagagttggaagggtcatacaggacccagaagctcctcttactggacagagcagtagaatcccaggctctttcacggatttaggctgagaaacttcagcagcagtattggacttctctgctgtcagtctttgtttctcccagtttttatcggtatgccccagcagctctctggagatttagttctcttcttctaggaaccatttcttttggttattggagctccttagcaaataagaggagtgagtgaaatagagaaagcaccccggaccccttttattggtctgttcctttggctttctcttggaggtgggtcgcagcaccagatggggagctttatgacatgacaggcgggagttttgtaccacttttagaagataccagatgcctctgtcctcattttgtttcctatgatcatcctctagataccagatagaggcccattcctgcatttgagatagggttggaatatagtactctagatgatgaatgtgtttgctttgtgtttggtattaaacatgtaagattagaagttctcatctcagtctgacttggcgatatgtctaagttccccagcccttcccctgctgtgctcttgaaagaagaacttaacaattttagggtaaaaagagaccaacagaccggcacagtggctcaaacctgttgtcctagcactttgggaggctgaggcgggcggatcacctgaggtcaggagtttgagaccggcctggacaatatggcgaaatcccatctccactaaaaatacaaaaattagccggccatggtggcatgcgcctgtaatcccagccactcgggtggctgaggcaggagaattgcctgaacccaggaggcagaggttgcagtgagctaaggtcacgccagtgcatatgcctgggcgacagagcaagactctgtctcaaaaaaaaagaaaaaaaaaaaagaccaacaaccttcccttttcttccgctttccctacagaagacacagaaaagcatttttgcctctagatccttttgtctagggtaaattcttagggtgacaagagtatgcggcaggaagaaggaggagccataaaggaagagaagccagcttgttggcatggggcatagaaaaggacaaaatctaggcatgaaaaggatggataaatactgcaaatattatgttcttacccattcttggaaacgtcagctttcttgcttcctgtgcttccagccgaggtagggcaaaggtgagattgagaaaatagccattcagctcaggaaggcttctaagtaaaggatggatttgga

SEQ ID NO: 3641 - DNA, 815 bp, Homo sapiens
agttgatttatgaagactctatggatctaatcgcaaagctaccttgtgttgcagcaaagatctaccgaaatctctacagagaaggcagcggtattggggccattgactctaacctggactggtctcacaatttcaccaacatgttaggctatactgatcatcagttcactgagctcacgcgcctgtacctcaccatccacagtgaccatgagggtggcaatgtaagtgcccataccagccatttggtgggcagtgccctttccgacccttacctgtcctttgcagcagccatgaacgggctggcagggcctctccatggactggcaaatcaggaagtgcttgtctggctaacacagctgcagaaggaagttggcaaagatgtgtcagatgagaagttacgagactacatctggaacacactcaactcaggacgggttgttccaggctatggccatgcagtactaaggaagactgatccgcgatatacctgtcagcgagagtttgctctgaaacacctgcctaatgaccccatgtttaagttggttgctcagctgtacaagattgtgcccaatgtcctcttagagcagggtaaagccaagaatccttggcccaatgtagatgctcacagtggggtgctgctccagtattatggcatgacggagatgaattactacacggtcctgtttggggtgtcacgagcattgggtgtactggcacagctcatctggagccgagccttaggcttccctctagaaaggcccaagtccatgagcacagagggtctgatgaagtttgtggactctaagtcagggtaa

SEQ ID NO: 3642 - DNA, 1369 bp, Homo sapiens
aaagcttgtttggacgaccttcgtctgggatgcactcttcttctccttcacctacaaatgatagaggattacgaagaactatacggttggctcctctttcctttggccttaggtttctgacctcctgcagcctcctcttgcctcgggctgcccagatcttggcggctgaggctggcttaccttcgagccgttccttcatgggatttgctgctcccttcaccaacaagcgaaaggcttactcggagcgtagaatcatggggtactcaatgcaggagatgtatgaggtggtgtccaacgtccaggagtatcgtgagtttgtgccctggtgtaagaagtctctggtggtatccagccgtaagggtcatttgaaagcccagctggaggttggctttccacctgtcatggaacgttacacctctgcagtttccatggtcaaacctcacatggtcaaggctgtttgtactgatggcaagctcttcaaccacttagagactatttggcgattcagccctggtattcctgcctatcctcgaacctgcactgtggacttttcgatttcctttgaatttcgttctctgctgcactcccagctggccaccatgttttttgatgaggttgtcaaacagaatgttgctgcctttgagcgtcgggcagccaccaagtttggtccagaaacagccatcccccgtgaactgatgttccatgaggtgcaccagacttgaggcaagggattgctccctgacctcccttctaccccacttccctacacaattctcttatttatttggtttggctcctgttccaatttgaaaggagtctgtgttcataatactgtttctcctctcaatttcccagaaattgggttctatgctggctggaaatgttgggggaaagagaaggcaaaggatgtggaaatgagatgtgcttaggaaagggtcaggcccatcgtaggagcaccatatgcctgcagccttttcactacgaattagaataaggactatgtggttgtctctggaccttatcaagacaccttagtgtctgaccaggggacgatagtaacttttctaaggattgaataaattgagcttttcttctggcacagaggtactgagtggtaagtaacttttaccctgcctgagattcctcaggagaaaaggcaacctgcctccagcctgaaatacataaagcctcattttaagactgtaagtccatgctgcctggctactagagagcaaggggctttcttaccaccagtgctgaggagaaaagtactgaacggaaacggagttgtctttgtactcttgagttgtaccttattcttccacttggcctgagtttttataaaatttcaataaattgtgacagtgtg

SEQ ID NO: 3643 - DNA, 1341 bp, Homo sapiens
ggcacgaggaggggttgaggctgcctgaccccagcctaatggggtaggtaggccttgggaagtggagcatgggggcaaaggatccaagcattgagccttcatcctctattccccatccagtggggtgccgaggctcaggcagcatgacgacggagacctttgtgaaggatatcaagcctgggctcaagaatctgaaccttatcttcattgtgctggagacaggccgagtgaccaagacaaaggacgggcatgaggttcggacctgcaaagtggcggacaaaacaggcagcatcaatatctctgtctgggacgatgttggcaatctgatccagcctggggacattatccggctcaccaaagggtacgcttcagttttcaaaggttgtctgacactatatactggccgtgggggtgatctgcagaagattggagaattctgtatggtttattctgaggttcctaacttcagtgagccaaacccagagtacagcacccagcaggcacccaacaaggcggtgcagaacgacagcaacccttcagcttcccagcctaccactggaccctctgctgcctctccagcctctgagaaccagaatgggaatggactgagtgccccaccaggtcccggtggtggcccacatccccctcatactccctcccacccacccagcacccgaatcactcgaagccagcccaaccacacacctgcaggcccgcctggcccttccagcaaccctgttagtaacggcaaagaaacccggaggagcagcaagagatagcatgacattctttcttcctgccaccaaccacatcccaagtgtcccctggagagcaagatagccttccactgattggctggtgtagcagtattttagccactgaacttcagtggagggtggtgagcagtgtccttatccaccctaatctcatactccctcattgtccagctgaactacctgtcccctgggagtcaggaccctctgcctgctctctttcctctttagaaatggcagttactggctgggcgcagtggctcacgcttgtaatcccagcactttgggaagccgaggtgggcggatcacctgaggtcgggagttcaagaccagcctgaccaacatggagaaaccccgtgtctactaaaaatacagaattagccaggcatggtggcgtatgcctgtaatcccagctacttaggaggctgaggcaggagaatctcttgaaaccgggaggcggaggttgaggtgagccgaaattgcaccattgcactccagcctgggcaataagagcgaaactccatctcaaaaaaaaaaaaaaaaaaaaaaaaaaaaaaaaaaaaaaaaa

SEQ ID NO: 3644 - protein, 211 aa, Homo sapiens
MTTETFVKDIKPGLKNLNLIFIVLETGRVTKTKDGHEVRTCKVADKTGSINISVWDDVGNLIQPGDIIRLTKGYASVFKGCLTLYTGRGGDLQKIGEFCMVYSEVPNFSEPNPEYSTQQAPNKAVQNDSNPSASQPTTGPSAASPASENQNGNGLSAPPGPGGGPHPPHTPSHPPSTRITRSQPNHTPAGPPGPSSNPVSNGKETRRSSKR

SEQ ID NO: 3645 - DNA, 4816 bp, Homo sapiens
ggcgggcggcggcggggcccgagccggagaagatggcggtgcggaagaaggacggcggccccaacgtgaagtactacgaggccgcggacaccgtgacccagttcgacaacgtgcggctgtggctcggcaagaactacaagaagtatatacaagctgaaccacccaccaacaagtccctgtctagcctggttgtacagttgctacaatttcaggaagaagtttttggcaaacatgtcagcaatgcaccgctcactaaactgccgatcaaatgtttcctagatttcaaagcgggaggctccttgtgccacattcttgcagctgcctacaaattcaagagtgaccagggatggcggcgttacgatttccagaatccatcacgcatggaccgcaatgtggaaatgtttatgaccattgagaagtccttggtgcagaataattgcctgtctcgacctaacatttttctgtgcccagaaattgagcccaaactactagggaaattaaaggacattatcaagagacaccagggaacagtcactgaggataagaacaatgcctcccatgttgtgtatcctgtcccggggaatctagaagaagaggaatgggtacgaccagtcatgaagagggataagcaggttcttctgcactggggctactatcctgacagttacgacacgtggatcccagcgagtgaaattgaggcatctgtggaagatgctccaactcctgagaaacctaggaaggttcatgcaaagtggatcctggacaccgacaccttcaatgaatggatgaatgaggaagactatgaagtaaatgatgacaaaaaccctgtctcccgccgaaagaagatttcagccaagacactgacagatgaggtgaacagcccagattcagatcgacgggacaagaaggggggaaactataagaagaggaagcgctccccctctccttcaccaaccccagaagcaaagaagaaaaatgctaagaaaggtccctcaacaccttacactaagtcaaagcgtggccacagagaagaggagcaagaagacctgacaaaggacatggacgagccctcaccagtccccaatgtagaagaggtgacacttcccaaaacagtcaacacaaagaaagactcagagtcggccccagtcaaaggcggcaccatgaccgacctggatgaacaggaagatgaaagcatggagacgacgggcaaggatgaggatgagaacagtacggggaacaagggagagcagaccaagaatccagacctgcatgaggacaatgtgactgaacagacccaccacatcatcattcccagctacgctgcctggtttgactacaatagtgttcatgccattgagcggagggctctccccgagttcttcaacggcaagaacaagtccaagactccagagatctacctggcctatcgaaactttatgattgacacttaccgactgaacccccaagagtatcttacctctaccgcctgccgccgaaacctagcgggtgatgtctgtgccatcatgagggtccatgccttcctagaacagtggggtcttattaactaccaggtggatgctgagagtcgaccaaccccaatggggcctccgcctacctctcacttccatgtcttggctgacacaccatcagggctggtgcctctgcagcccaagacacctcagggccgccaggttgatgctgataccaaggctgggcgaaagggcaaagagctggatgacctggtgccagagacggctaagggcaagccagagctgcagacctctgcttcccaacaaatgctcaactttcctgacaaaggcaaagagaaaccaacagacatgcaaaactttgggctgcgcacagacatgtacacaaaaaagaatgttccctccaagagcaaggctgcagccagtgccactcgtgagtggacagaacaggaaaccctgcttctcctggaggcactggaaatgtacaaagatgactggaacaaagtgtccgagcatgtgggaagccgcacacaggacgagtgcatcttgcattttcttcgtcttcccattgaagacccatacctggaggactcagaggcctccctaggccccctggcctaccaacccatccccttcagtcagtcgggcaaccctgttatgagcactgttgccttcctggcctctgtcgtcgatccccgagtcgcctctgctgctgcaaagtcagccctagaggagttctccaaaatgaaggaagaggtacccacggccttggtggaggcccatgttcgaaaagtggaagaagcagccaaagtaacaggcaaggcggaccctgccttcggtctggaaagcagtggcattgcaggaaccacctctgatgagcctgagcggattgaggagagcgggaatgacgaggctcgggtggaaggccaggccacagatgagaagaaggagcccaaggaaccccgagaaggagggggtgctatagaggaggaagcaaaagagaaaaccagcgaggctcccaagaaggatgaggagaaagggaaagaaggcgacagtgagaaggagtccgagaagagtgatggagacccaatagtcgatcctgagaaggagaaggagccaaaggaagggcaggaggaagtgctgaaggaagtggtggagtctgagggggaaaggaagacaaaggtggagcgggacattggcgagggcaacctctccaccgctgctgccgccgccctggccgccgccgcagtgaaagctaagcacttggctgctgttgaggaaaggaagatcaaatctttggtggccctgctggtggagacccagatgaaaaagttggagatcaaacttcggcactttgaggagctggagactatcatggaccgggagcgagaagcactggagtatcagaggcagcagctcctggccgacagacaagccttccacatggagcagctgaagtatgcggagatgagggctcggcagcagcacttccaacagatgcaccaacagcagcagcagccaccaccagccctgcccccaggctcccagcctatccccccaacaggggctgctgggccacccgcagtccatggcttggctgtggctccagcctctgtagtccctgctcctgctggcagtggggcccctccaggaagtttgggcccttctgaacagattgggcaggcagggtcaactgcagggccacagcagcagcaaccagctggagccccccagcctggggcagtcccaccaggggttcccccccctggaccccatggcccctcaccgttccccaaccaacaaactcctccctcaatgatgccaggggcagtgccaggcagcgggcacccaggcgtggcggacccaggcacccccctgcctccagaccccacagccccgagcccaggcacggtcacccctgtgccacctccacagtgaggagccagccagacatctctccccctcaccccctgtggacatcacggttccaggaacagcccttcccccaccactgggaccctccccagcctggagagttcatcactacgtaaggaaagctccttccgcccctccaaagccctcaccatgcctaacagaggcatgcatttttatatcagattattcaaggacttctgtttaaaagatgtttataatgtctgggagagaggataggatgggaatgctgccctaaaggaagggctggtgaaaggtgtttatacaaggttctattaaccacttctaagggtacacctccctccaaactactgcattttctatggattaaaaaaaaaaaaaaaaagtagattttaaaaagccacattggagctcccttctacccactaaaaaataaccaatttttacattttttgagggggagtgagttttaggaaaggggaattaagattccagggagagctctggggatagaacagggcgcagattccatctctccccaagcccctttttagtgactaagtcaaggccccaactcccctcccccaccctacgctgagcttattcgagttcattcgtactaataatccctcctgcggcttcctcattgttgctgttttaggccaccccagctcagccaatgattcctttccctctgaatgtcagttttgtttttaaaagtcacttgcttagttgatgtcagcgtatgtgtatttggtggggaaaacctaatttcggggatttctgtggtaggtaataggagaagaaagggcactgggggctgttctccttccttccctgggctgtatccatggactcctggaaggcacagagaagggagctataagaggatgtgaagttttaaaacctgaaattgttttttaaagcacttaagcacctccatattatgacttggtgggtcaccccttagcttcctccctctcccaccaagactatgagaacttcagctgatagctgggggctccccagatgaggatgcagggatttgggagcagtggaagagggtgcccaaccttgggttggaccaacccttggctcgcagctcaactctgcttcccgcattcctgctccacgtgtcccagcttctcccctgtgacgggaaggcaggtgtgactccaggctctgcactggttcttcttggttcctcccaccaggccctttgttcctcatgtccccatgtttctctccctctgcgtcttagcacctttcttctgttcaaagttttctgtaaattttctctttttttctttctttcttttttttttttttataaattaatttgctttcagttccatcttgtgggtgcattctgtgttcttacctgtggctgtcaggcagggggattgtgatgggag

SEQ ID NO: 3646 - DNA, 704 bp, Homo sapiens
attactgcaggaaaaggtcccggagagctgagcagtcaagatgtgtgacttcaccgaagaccagaccgcagagttcaaggaggccttccagctgtttgaccgaacaggtgatggcaagatcctgtacagccagtgtggggatgtgatgagggccctgggccagaaccctaccaacgccgaggtgctcaaggtcctggggaaccccaagagtgatgagatgaatgtgaaggtgctggactttgagcactttctgcccatgctgcagacagtggccaagaacaaggaccagggcacctatgaggattatgtcgaaggacttcgggtgtttgacaaggaaggaaatggcaccgtcatgggtgctgaaatccggcatgttcttgtcacactgggtgagaagatgacagaggaagaagtagagatgctggtggcagggcatgaggacagcaatggttgtatcaactatgaagcgtttgtgaggcatatcctgtcggggtgacgggcccatggggcggagctcgtccgcatggtgctgaatggctgaggaccttcccagtctccccagagtccgtgcctttccctgtgtgaattttgtatctagcctaaagtttccctaggctttcttgtctcagcaactttcccatcttgtctctcttggatgatgtttgccgtcagcattcaccaaataaacttgctctctgggcctc

SEQ ID NO: 3647 - protein, 151 aa, Homo sapiens
MCDFTEDQTAEFKEAFQLFDRTGDGKILYSQCGDVMRALGQNPTNAEVLKVLGNPKSDEMNVKVLDFEHFLPMLQTVAKNKDQGTYEDYVEGLRVFDKEGNGTVMGAEIRHVLVTLGEKMTEEEVEMLVAGHEDSNGCINYEAFVRHILSG

SEQ ID NO: 3648 - DNA, 651 bp, Homo sapiens
ggaaaaggtcccggagagctgagcagtcaagatgtgtgacttcaccgaagaccagaccgcagagttcaaggaggccttccagctgtttgaccgaacaggtgatggcaagatcctgtacagccagtgtggggatgtgatgagggccctgggccagaaccctaccaacgccgaggtgctcaaggtcctggggaaccccaagagtgatgagatgaatgtgaaggtgctggactttgagcactttctgcccatgctgcagacagtggccaagaacaaggaccagggcacctatgaggattatgtcgaaggacttcgggtgtttgacaaggaaggaaatggcaccgtcatgggtgctgaaatccggcatgttcttgtcacactgggtgagaagatgacagaggaagaagtagagatgctggtggcagggcatgaggacagcaatggttgtatcaactatgaagagctcgtccgcatggtgctgaatggctgaggaccttcccagtctccccagagtccgtgcctttccctgtgtgaattttgtatctagcctaaagtttccctaggctttcttgtctcagcaactttcccatcttgtctctcttggatgatgtttgccgtcagcattcaccaaataaacttgctctctgggaaaaa

SEQ ID NO: 3649 - protein, 116 aa, Homo sapiens
MRALGQNPTNAEVLKVLGNPKSDEMNVKVLDFEHFLPMLQTVAKNKDQGTYEDYVEGLRVFDKEGNGTVMGAEIRHVLVTLGEKMTEEEVEMLVAGHEDSNGCINYEELVRMVLNG

SEQ ID NO: 3650 - DNA, 717 bp, Homo sapiens
attactgcaggaaaaggtcccggagagctgagcagtcaagatgtgtgacttcaccgaagaccagaccgcagatctgatcccaagcactgagttcaaggaggccttccagctgtttgaccgaacaggtgatggcaagatcctgtacagccagtgtggggatgtgatgagggccctgggccagaaccctaccaacgccgaggtgctcaaggtcctggggaaccccaagagtgatgagatgaatgtgaaggtgctggactttgagcactttctgcccatgctgcagacagtggccaagaacaaggaccagggcacctatgaggattatgtcgaaggacttcgggtgtttgacaaggaaggaaatggcaccgtcatgggtgctgaaatccggcatgttcttgtcacactgggtgagaagatgacagaggaagaagtagagatgctggtggcagggcatgaggacagcaatggttgtatcaactatgaagcgtttgtgaggcatatcctgtcggggtgacgggcccatggggcgagctcgtccgcatggtgctgaatggctgaggaccttcccagtctccccagagtccgtgcctttccctgtgtgaattttgtatctagcctaaagtttccctaggctttcttgtctcagcaactttcccatcttgtctctcttggatgatgtttgccgtcagcattcaccaaataaacttgctctctggg

SEQ ID NO: 3651 - protein, 157 aa, Homo sapiens
MCDFTEDQTADLIPSTEFKEAFQLFDRTGDGKILYSQCGDVMRALGQNPTNAEVLKVLGNPKSDEMNVKVLDFEHFLPMLQTVAKNKDQGTYEDYVEGLRVFDKEGNGTVMGAEIRHVLVTLGEKMTEEEVEMLVAGHEDSNGCINYEAFVRHILSG

SEQ ID NO: 3652 - DNA, 1515 bp, Homo sapiens
ccctcgagagcggctagagtctggcggccgagaggactagttgtcccagcgtgccctgcgcctcagcccgcgcgctcgcagcttctcgctctcgcctgcctgcccgctcccttgcttgctcgcgctttcgctcgccctctcctcgaggatcgaggggactctgaccacagcctgtggctgggaagggagacagaggcggcggcggctcaggggaaacgaggctgcagtggtggtagtaggaagatgtcgggcgaggacgagcaacaggagcaaactatcgctgaggacctggtcgtgaccaagtataagatggggggcgacatcgccaacagggtacttcggtccttggtggaagcatctagctcaggtgtgtcggtactgagcctgtgtgagaaaggtgatgccatgattatggaagaaacagggaaaatcttcaagaaagaaaaggaaatgaagaaaggtattgcttttcccaccagcatttcggtaaataactgtgtatgtcacttctcccctttgaagagcgaccaggattatattctcaaggaaggtgacttggtaaaaattgaccttggggtccatgtggatggcttcatcgctaatgtagctcacacttttgtggttgatgtagctcaggggacccaagtaacagggaggaaagcagatgttattaaggcagctcacctttgtgctgaagctgccctacgcctggtcaaacctggaaatcagaacacacaagtgacagaagcctggaacaaagttgcccactcatttaactgcacgccaatagaaggtatgctgtcacaccagttgaagcagcatgtcatcgatggagaaaaaaccattatccagaatcccacagaccagcagaagtaggtgccaaccctacttattaccttctaccacacaagactagtcatcaggtttttttctatactcccaactgaatcttgtccgccctctactccatgttttcaggagtgacctgttgctcttaatattccctttctctaggccgggcgcggtggctcacgcctgtaatcccagcactttgggaggctgaggcgggtggatcacctgaggtcacgagttcagaaccagcctaaccaacatggcgaaaccctgtctctactaaaaactacaaaaatgagccaggcctggtggtttgtgcctatagtcccagctacttgggaggctgaggcaggagagttgcttggacccgggaggtggaggttgcagtgagctgagattgtgccactgcactccagcctgggtgacagaatgagactctgtgtcgaaggaccatgaaaaagctgaatttgaggtacatgaagtatatgctgtggatgttctcgtcagctcaggagagggcaaggtgaggagagtaccagagttggcaaagaggggtgactgagagtgttcaccagaccaaatgttacttaaattactctttcaggccaaggatgcaggacagagaaccactatttacaaacgagacccctctaaacagtatgg

SEQ ID NO: 3653 - protein, 210 aa, Homo sapiens
MSGEDEQQEQTIAEDLVVTKYKMGGDIANRVLRSLVEASSSGVSVLSLCEKGDAMIMEETGKIFKKEKEMKKGIAFPTSISVNNCVCHFSPLKSDQDYILKEGDLVKIDLGVHVDGFIANVAHTFVVDVAQGTQVTGRKADVIKAAHLCAEAALRLVKPGNQNTQVTEAWNKVAHSFNCTPIEGMLSHQLKQHVIDGEKTIIQNPTDQQK

SEQ ID NO: 3654 - DNA, 478 bp, Rattus norvegicus
acccggcgctccattaaatagccgtagacggaacttcgcctttctctcggccttagcgccatttttttggaaacctctgcgccatgagagccaagtggaggaagaagcgaatgcgcaggctgaagcgcaaaagaagaaagatgaggcagaggtccaagtaaaccgctagcttgttgcaccgtggaggccacaggagcagaaacatggaatgccagacgctggggatgctggtacaagttgtgggactgcatgctactgtctagagcttgtctcaatggatctagaacttcatcgccctctgatcgccgatcacctctgagacccaccttgctcataaacaaaatgcccatgttggtcctctgccctggacctgtgacattctggactatttctgtgtttatttgtggccgagtgtaacaaccatataataaatcacctcttccgctgttttagctgaagaattaaatcaaaaaaaaaa

SEQ ID NO: 3655 - protein, 25 aa, Rattus norvegicus [sequence omitted]

SEQ ID NO: 3656 - DNA, 459 bp, Rattus norvegicus
cctgtctccggtccgtgcctccaagatgacaaagaaaagaaggaacaatggtcgtgccaaaaagggccgcggccacgtgcagcctattcgctgcactaactgtgcccgatgcgtgcccaaggacaaggccattaagaaattcgtcattcgaaacatagtggaggccgcagcagtcagggacatttctgaagcgagcgtcttcgatgcctatgtgcttcccaagctgtatgtgaagctacattactgtgtgagttgtgcaattcacagcaaagtagtcaggaatcgatctcgtgaagcccgcaaggaccgaacacccccaccccgatttagacctgcgggtgctgccccacgtcccccaccaaagcccatgtaaggagctgagttcttaaagactgaagacaggctattctctggagaaaaataaaatggaaattgtacttaaaaaaaaaaaaaaaaaaa

SEQ ID NO: 3657 - protein, 115 aa, Rattus norvegicus [sequence omitted]

SEQ ID NO: 3658 - DNA, 1105 bp, Homo sapiens
ccccatcccttccccggctcccccggtgtccgccatggccaaagcctacgaccacctcttcaagttgctgctgatcggggactcgggggtgggcaagacttgtctgatcattcgctttgcagaggacaacttcaacaacacttacatctccaccatcggaattgatttcaagatccgcactgtggatatagaggggaagaagatcaaactacaagtctgggacacagctggccaagagcggttcaagacaataactactgcctactaccgtggagccatgggcattatcctagcatacgacatcacggatgagaaatctttcgagaatattcagaactggatgaaaagcatcatggagaatgcctcagctggggtggagcacctcttgctagggaacaaatgtgacatggaggccaagaggaaggtgcagaaggagcaggccgataagttggctcgagagcatggaatccgatttttcgaaactagtgctaaatccagtatgaatgtggatgaggcttttagttccctggcccgggacatcttgctcaagtcaggaggccggagatcaggaaacggcaacaagcctcccagtactgacctgaaaacttgtgacataaagaacaccaacaagtgctccctgagctgaggaccctttcttgcctccccaccccggaagctgaacctgagggagacaacagcagagggagtgagcaggggagaaatagcagaggggcttggagggacacataggtagatggtaaagagaatgaggagaaaaaggagaaaagggaaaagcagaaaggaaaagaaggaaaagagaggaagggagaagggagaggaatgaattgaggaagtgaacgaaggcaaggaggtaggaagagagggaggaggaaaggaaggagagatgcctcaggcttcagaccttacctgggttttcagggcaaacataaatgtaaatacactgatttattctgttactagatcaggttttagggtcctgcaaagggctagctcggcactacactagggaatttgctcctgttctgtcacttgtcatggtctttcttggtattaaaggccaccatttgcacaaaaaataaataaa

SEQ ID NO: 3659 - DNA, 2290 bp, Homo sapiens
ggaagcaggggcggggcctctggtggcggtcgggaactcggtgggaggcggcaacattgtttcaagttggccaaattgacaagagcgagaggtatactgcgttccatcccgacccggggccacggtactgggccctgtttccccctcctcggcccccgagagccagggtccgccttctgcagggttcccaggcccccgctccagggccgggctgacccgactcgctggcgcttcatggagaacttccaaaaggtggaaaagatcggagagggcacgtacggagttgtgtacaaagccagaaacaagttgacgggagaggtggtggcgcttaagaaaatccgcctggacacgtgaactgagggtgtgcccagtactgccatccgagagatctctctgcttaaggagcttaaccatcctaatattgtcaagctgctggatgtcattcacacagaaaataaactctacctggtttttgaatttctgcaccaagatctcaagaaattcatggatgcctctgctctcactggcattcctcttcccctcatcaagagctatctgttccagctgctccagggcctagctttctgccattctcatcgggtcctccaccgagaccttaaacctcagaatctgcttattaacacagagggggccatcaagctagcagactttggactagccagagcttttggagtccctgttcgtacttacacccatgaggtggtgaccctgtggtaccgagctcctgaaatcctcctgggctgcaaatattattccacagctgtggacatctggagcctgggctgcatctttgctgagatggtgactcgccgggccctattccctggagattctgagattgaccagctcttccggatctttcggactctggggaccccagatgaggtggtgtggccaggagttacttctatgcctgattacaagccaagtttccccaagtgggcccggcaagattttagtaaagttgtacctcccctggatgaagatggacggagcttgttatcgcaaatgctgcactacgaccctaacaagcggatttcggccaaggcagccctggctcaccctttcttccaggatgtgaccaagccagtaccccatcttcgactctgatagccttcttgaagcccccagccctaatctcaccctctcctccagtgtgggcttgaccaggcttggccttgggctatttggactcaggtgggccctctgaacttgccttaaacactcaccttctagtcttggccagccaactctgggaatacaggggtgaaaggggggaaccagtgaaaatgaaaggaagtttcagtattagatgcacttaagttagcctccaccaccctttcccccttctcttagttattgctgaagagggttggtataaaaataattttaaaaaagccttcctacacgttagatttgccgtaccaatctctgaatgccccataattattatttccagtgtttgggatgaccaggatcccaagcctcctgctgccacaatgtttataaaggccaaatgatagcgggggctaagttggtgcttttgagaaccaagtaaaacaaaaccactgggaggagtctattttaaagaattcggttgaaaaaatagatccaatcagtttataccctagttagtgttttgcctcacctaataggctgggagactgaagactcagcccgggtggggctgcagaaaaatgattggccccagtccccttgtttgtcccttctacaggcatgaggaatctgggaggccctgagacagggattgtgcttcattccaatctattgcttcaccatggccttatgaggcaggtgagagatgtttgaatttttctcttccttttagtattcttagttgttcagttgccaaggatccctgatcccattttcctctgacgtccacctcctaccccataggagttagaagttagggtttaggcatcattttgagaatgctgacactttttcagggctgtgattgagtgagggcatgggtaaaaatatttctttaaaagaaggatgaacaattatatttatatttcaggttatatccaatagtagagttggctttttttttttttttttggtcatagtgggtggatttgttgccatgtgcaccttggggttttgtaatgacagtgctaaaaaaaaaaagcattttttttttatgatttgtctctgtcacccttgtccttgagtgctcttgctattaacgttatttgtaatttagtttgtagctcattaaaaaaatgtgcctagttttata

SEQ ID NO: 3660 - DNA, 1986 bp, Homo sapiens
atggatctggtgctaaaaagatgccttcttcatttggctgtgataggtgctttgctggctgtgggggctacaaaagtacccagaaaccaggactggcttggtgtctcaaggcaactcagaaccaaagcctggaacaggcagctgtatccagagtggacagaagcccagagacttgactgctggagaggtggtcaagtgtccctcaaggtcagtaatgatgggcctacactgattggtgcaaatgcctccttctctattgccttgaacttccctggaagccaaaaggtattgccagatgggcaggttatctgggtcaacaataccatcatcaatgggagccaggtgtggggaggacagccagtgtatccccaggaaactgacgatgcctgcatcttccctgatggtggaccttgcccatctggctcttggtctcagaagagaagctttgtttatgtctggaagacctggggccaatactggcaagttctagggggcccagtgtctgggctgagcattgggacaggcagggcaatgctgggcacacacaccatggaagtgactgtctaccatcgccggggatcccggagctatgtgcctcttgctcattccagctcagccttcaccattactgaccaggtgcctttctccgtgagcgtgtcccagttgcgggccttggatggagggaacaagcacttcctgagaaatcagcctctgacctttgccctccagctccatgaccccagtggctatctggctgaagctgacctctcctacacctgggactttggagacagtagtggaaccctgatctctcgggcacttgtggtcactcatacttacctggagcctggcccagtcactgcccaggtggtcctgcaggctgccattcctctcacctcctgtggctcctccccagttccaggcaccacagatgggcacaggccaactgcagaggcccctaacaccacagctggccaagtgcctactacagaagttgtgggtactacacctggtcaggcgccaactgcagagccctctggaaccacatctgtgcaggtgccaaccactgaagtcataagcactgcacctgtgcagatgccaactgcagagagcacaggtatgacacctgagaaggtgccagtttcagaggtcatgggtaccacactggcagagatgtcaactccagaggctacaggtatgacacctgcagaggtatcaattgtggtgctttctggaaccacagctgcacaggtaacaactacagagtgggtggagaccacagctagagagctacctatccctgagcctgaaggtccagatgccagctcaatcatgtctacggaaagtattacaggttccctgggccccctgctggatggtacagccaccttaaggctggtgaagagacaagtccccctggattgtgttctgtatcgatatggttccttttccgtcaccctggacattgtccagggtattgaaagtgccgagatcctgcaggctgtgccgtccggtgagggggatgcatttgagctgactgtgtcctgccaaggcgggctgcccaaggaagcctgcatggagatctcatcgccagggtgccagccccctgcccagcggctgtgccagcctgtgctacccagcccagcctgccagctggttctgcaccagatactgaagggtggctcggggacatactgcctcaatgtgtctctggctgataccaacagcctggcagtggtcagcacccagcttatcatgcctggtcaagaagcaggccttgggcaggttccgctgatcgtgggcatcttgctggtgttgatggctgtggtccttgcatctctgatatataggcgcagacttatgaagcaagacttctccgtaccccagttgccacatagcagcagtcactggctgcgtctaccccgcatcttctgctcttgtcccattggtgagaatagccccctcctcagtgggcagcaggtctga

SEQ ID NO: 3661 - protein, 661 aa, Homo sapiens
MDLVLKRCLLHLAVIGALLAVGATKVPRNQDWLGVSRQLRTKAWNRQLYPEWTEAQRLDCWRGGQVSLKVSNDGPTLIGANASFSIALNFPGSQKVLPDGQVIWVNNTIINGSQVWGGQPVYPQETDDACIFPDGGPCPSGSWSQKRSFVYVWKTWGQYWQVLGGPVSGLSIGTGRAMLGTHTMEVTVYHRRGSRSYVPLAHSSSAFTITDQVPFSVSVSQLRALDGGNKHFLRNQPLTFALQLHDPSGYLAEADLSYTWDFGDSSGTLISRALVVTHTYLEPGPVTAQVVLQAAIPLTSCGSSPVPGTTDGHRPTAEAPNTTAGQVPTTEVVGTTPGQAPTAEPSGTTSVQVPTTEVISTAPVQMPTAESTGMTPEKVPVSEVMGTTLAEMSTPEATGMTPAEVSIVVLSGTTAAQVTTTEWVETTARELPIPEPEGPDASSIMSTESITGSLGPLLDGTATLRLVKRQVPLDCVLYRYGSFSVTLDIVQGIESAEILQAVPSGEGDAFELTVSCQGGLPKEACMEISSPGCQPPAQRLCQPVLPSPACQLVLHQILKGGSGTYCLNVSLADTNSLAVVSTQLIMPGQEAGLGQVPLIVGILLVLMAVVLASLIYRRRLMKQDFSVPQLPHSSSHWLRLPRIFCSCPIGENSPLLSGQQV

SEQ ID NO: 3662 - DNA, 620 bp, Homo sapiens
ggcagcagagaagaaagtggtgaaaattacatctgaaataccacagactgagagaatgcagaagagggctgaacgattcaatgtacctgtgagcttggagagtaagaaagctgctcgggcagctaggtttgggatttcttcagttccaacaaaaggtctgtcatctgataacaaacctatggttaacttggataagctgaaggaaagagctcaaagatttggtttgaatgtctcttcaatctccagaaagtctgaagatgatgagaaactgaaaaagaggaaggagcgatttgggattgtcacaagttcagctggaactggaaccacagaggatacagaggcaaagaagaggaaaagagcagagcgctttgggattgcctgatgaaaagttcctgatactttctgttctccagtgttttccatttctctccttcttcttggtcacatatatgcctaaatgcacagtcatgtgcctacgtcctgcctcgcaatgagggagcatgtaccccaggtacatccatgaactgcggcagcagtttgacttattgctgtttcagctttaaggttgttgtgtttttgtttttgattatgttgcttgttaataaaaaaaaatagaaaag

SEQ ID NO: 3663 - DNA, 925 bp, Homo sapiens
ggcacgaggggccggggggcgcagctagagagccccggagccgcggcgggagaggaacgcgcagccagccttgggaagcccaggcccggcagccatggcggtggaaggaggaatgaaatgtgtgaagttcttgctctacgtcctcctgctggccttttgcgcctgtgcagtgggactgattgccgtgggtgtcggggcacagcttgtcctgagtcagaccataatccagggggctacccctggctctctgttgccagtggtcatcatcgcagtgggtgtcttcctcttcctggtggcttttgtgggctgctgcggggcctgcaaggagaactattgtcttatgatcacgtttgccatctttctgtctcttatcatgttggtggaggtggccgcagccattgctggctatgtgtttagagataaggtgatgtcagagtttaataacaacttccggcagcagatggagaattacccgaaaaacaaccacactgcttcgatcctggacaggatgcaggcagattttaagtgctgtggggctgctaactacacagattgggagaaaatcccttccatgtcgaagaaccgagtccccgactcctgctgcattaatgttactgtgggctgtgggattaatttcaacgagaaggcgatccataaggagggctgtgtggagaagattgggggctggctgaggaaaaatgtgctggtggtagctgcagcagcccttggaattgcttttgtcgaggttttgggaattgtctttgcctgctgcctcgtgaagagtatcagaagtggctacgaggtgatgtaggggtctggtctcctcagcctcctcatctgggggagtggaatagtatcctccaggtttttcaattaaacggattattttttcagaccgaaaagaaaaaaaaaaaaaaaaaaaaaa

SEQ ID NO: 3664 - protein, 238 aa, Homo sapiens
MAVEGGMKCVKFLLYVLLLAFCACAVGLIAVGVGAQLVLSQTIIQGATPGSLLPVVIIAVGVFLFLVAFVGCCGACKENYCLMITFAIFLSLIMLVEVAAAIAGYVFRDKVMSEFNNNFRQQMENYPKNNHTASILDRMQADFKCCGAANYTDWEKIPSMSKNRVPDSCCINVTVGCGINFNEKAIHKEGCVEKIGGWLRKNVLVVAAAALGIAFVEVLGIVFACCLVKSIRSGYEVM

SEQ ID NO: 3665 - DNA, 2454 bp, Homo sapiens
ggcacgaggagctgtgagggtcaagcacagctatccatcagatgatctactttcagccttcctgagtcccagacaatagaagacaggtggctgtacccttggccaagggtaggtgtggcagtggtgtctgctgtcactgtgccctcattggcccccagcaatcagactcaacagacggagcaactgccatccgaggctcctgaaccagggccattcaccaggagcatgcggctccctgatgtccagctctggctggtgctgctgtgggcactggtgcgagcacaggggacagggtctgtgtgtccctcctgtgggggctccaaactggcaccccaagcagaacgagctctggtgctggagctagccaagcagcaaatcctggatgggttgcacctgaccagtcgtcccagaataactcatcctccaccccaggcagcgctgaccagagccctccggagactacagccagggagtgtggctccagggaatggggaggaggtcatcagctttgctactgtcacagactccacttcagcctacagctccctgctcacttttcacctgtccactcctcggtcccaccacctgtaccatgcccgcctgtggctgcacgtgctccccacccttcctggcactctttgcttgaggatcttccgatggggaccaaggaggaggcgccaagggtcccgcactctcctggctgagcaccacatcaccaacctgggctggcataccttaactctgccctctagtggcttgaggggtgagaagtctggtgtcctgaaactgcaactagactgcagacccctagaaggcaacagcacagttactggacaaccgaggcggctcttggacacagcaggacaccagcagcccttcctagagcttaagatccgagccaatgagcctggagcaggccgggccaggaggaggacccccacctgtgagcctgcgacccccttatgttgcaggcgagaccattacgtagacttccaggaactgggatggcgggactggatactgcagcccgaggggtaccagctgaattactgcagtgggcagtgccctccccacctggctggcagcccaggcattgctgcctctttccattctgccgtcttcagcctcctcaaagccaacaatccttggcctgccagtacctcctgttgtgtccctactgcccgaaggcccctctctctcctctacctggatcataatggcaatgtggtcaagacggatgtgccagatatggtggtggaggcctgtggctgcagctagcaagaggacctggggctttggagtgaagagaccaagatgaagtttcccaggcacagggcatctgtgactggaggcatcagattcctgatccacaccccaacccaacaaccacctggcaatatgactcacttgacccctatgggacccaaatgggcactttcttgtctgagactctggcttattccaggttggctgatgtgttgggagatgggtaaagcgtttcttctaaaggggtctacccagaaagcatgatttcctgccctaagtcctgtgagaagatgtcagggactagggagggagggagggaaggcagagaaaaattacttagcctctcccaagatgagaaagtcctcaagtgaggggaggaggaagcagatagatggtccagcaggcttgaagcagggtaagcaggctggcccagggtaagggctgttgaggtaccttaagggaaggtcaagagggagatgggcaaggcgctgagggaggatgcttaggggacccccagaaacaggagtcaggaaaatgaggcactaagcctaagaagttccctggtttttcccaggggacaggacccactgggagacaagcatttatactttctttcttcttttttatttttttgagatcgagtctcgctctgtcaccaggctggagtgcagtgacacgatcttggctcactgcaacctccgtctcctgggttcaagtgattcttctgcctcagcctcccgagcagctgggattacaggcgcccactaatttttgtattcttagtagaaacgaggtttcaacatgttggccaggatggtctcaatctcttgacctcttgatccacccgacttggcctcccgaagtgatgagattataggcgtgagccaccgcgcctggcttatactttcttaataaaaaggagaaagaaaatcaacaaatgtgagtcataaagaagggttagggtgatggtccagagcaacagttcttcaagtgtactctgtaggcttctgggaggtcccttttcaggggtgtccacaaagtcaaagctattttcataataatactaacatgttatttgccttttgaattctcattatcttaaaattgtattgtggagttttccagaggccgtgtgacatgtgattacatcatctttctgacatcattgttaaaaaaaaaaaaaaaaaa

SEQ ID NO: 3666 - protein, 350 aa, Homo sapiens
MRLPDVQLWLVLLWALVRAQGTGSVCPSCGGSKLAPQAERALVLELAKQQILDGLHLTSRPRITHPPPQAALTRALRRLQPGSVAPGNGEEVISFATVTDSTSAYSSLLTFHLSTPRSHHLYHARLWLHVLPTLPGTLCLRIFRWGPRRRRQGSRTLLAEHHITNLGWHTLTLPSSGLRGEKSGVLKLQLDCRPLEGNSTVTGQPRRLLDTAGHQQPFLELKIRANEPGAGRARRRTPTCEPATPLCCRRDHYVDFQELGWRDWILQPEGYQLNYCSGQCPPHLAGSPGIAASFHSAVFSLLKANNPWPASTSCCVPTARRPLSLLYLDHNGNVVKTDVPDMVVEACGCS

SEQ ID NO: 3667 - DNA, 3600 bp, Homo sapiens
cccagactccagccctggaccgcgcatcccgagcccagcgcccagacagagtgtccccacaccctcctctgagacgccatgttcaactcgatgaccccaccaccaatcagtagctatggcgagccctgctgtctccggcccctccccagtcagggggcccccagtgtggggacagaaggactgtctggcccgcccttctgccaccaagctaacctcatgtccggcccccacagttatgggccagccagagagaccaacagctgcaccgagggcccactcttttcttctccccggagtgcagtcaagttgaccaagaagcgggcactgtccatctcacctctgtcggatgccagcctggacctgcagacggttatccgcacctcacccagctccctcgtagctttcatcaactcgcgatgcacatctccaggaggctcctacggtcatctctccattggcaccatgagcccatctctgggattcccagcccagatgaatcaccaaaaagggccctcgccttcctttggggtccagccttgtggtccccatgactctgcccggggtgggatgatcccacatcctcagtcccggggacccttcccaacttgccagctgaagtctgagctggacatgctggttggcaagtgccgggaggaacccttggaaggtgatatgtccagccccaactccacaggcatacaggatcccctgttggggatgctggatgggcgggaggacctcgagagagaggagaagcgtgagcctgaatctgtgtatgaaactgactgccgttgggatggctgcagccaggaatttgactcccaagagcagctggtgcaccacatcaacagcgagcacatccacggggagcggaaggagttcgtgtgccactgggggggctgctccagggagctgaggcccttcaaagcccagtacatgctggtggttcacatgcgcagacacactggcgagaagccacacaagtgcacgtttgaagggtgccggaagtcatactcacgcctcgaaaacctgaagacgcacctgcggtcacacacgggtgagaagccatacatgtgtgagcacgagggctgcagtaaagccttcagcaatgccagtgaccgagccaagcaccagaatcggacccattccaatgagaagccgtatgtatgtaagctccctggctgcaccaaacgctatacagatcctagctcgctgcgaaaacatgtcaagacagtgcatggtcctgacgcccatgtgaccaaacggcaccgtggggatggccccctgcctcgggcaccatccatttctacagtggagcccaagagggagcgggaaggaggtcccatcagggaggaaagcagactgactgtgccagagggtgccatgaagccacagccaagccctggggcccagtcatcctgcagcagtgaccactccccggcagggagtgcagccaatacagacagtggtgtggaaatgactggcaatgcagggggcagcactgaagacctctccagcttggacgagggaccttgcattgctggcactggtctgtccactcttcgccgccttgagaacctcaggctggaccagctacatcaactccggccaatagggacccggggtctcaaactgcccagcttgtcccacaccggtaccactgtgtcccgccgcgtgggccccccagtctctcttgaacgccgcagcagcagctccagcagcatcagctctgcctatactgtcagccgccgctcctccctggcctctcctttcccccctggctccccaccagagaatggagcatcctccctgcctggccttatgcctgcccagcactacctgcttcgggcaagatatgcttcagccagagggggtggtacttcgcccactgcagcatccagcctggatcggataggtggtcttcccatgcctccttggagaagccgagccgagtatccaggatacaaccccaatgcaggggtcacccggagggccagtgacccagcccaggctgctgaccgtcctgctccagctagagtccagaggttcaagagcctgggctgtgtccataccccacccactgtggcagggggaggacagaactttgatccttacctcccaacctctgtctactcaccacagccccccagcatcactgagaatgctgccatggatgctagagggctacaggaagagccagaagttgggacctccatggtgggcagtggtctgaacccctatatggacttcccacctactgatactctgggatatgggggacctgaaggggcagcagctgagccttatggagcgaggggtccaggctctctgcctcttgggcctggtccacccaccaactatggccccaacccctgtccccagcaggcctcatatcctgaccccacccaagaaacatggggtgagttcccttcccactctgggctgtacccaggccccaaggctctaggtggaacctacagccagtgtcctcgacttgaacattatggacaagtgcaagtcaagccagaacaggggtgcccagtggggtctgactccacaggactggcaccctgcctcaatgcccaccccagtgaggggcccccacatccacagcctctcttttcccattacccccagccctctcctccccaatatctccagtcaggcccctatacccagccaccccctgattatcttccttcagaacccaggccttgcctggactttgattcccccacccattccacagggcagctcaaggctcagcttgtgtgtaattatgttcaatctcaacaggagctactgtgggagggtgggggcagggaagatgcccccgcccaggaaccttcctaccagagtcccaagtttctggggggttcccaggttagcccaagccgtgctaaagctccagtgaacacatatggacctggctttggacccaacttgcccaatcacaagtcaggttcctatcccaccccttcaccatgccatgaaaattttgtagtgggggcaaatagggcttcacatagggcagcagcaccacctcgacttctgcccccattgcccacttgctatgggcctctcaaagtgggaggcacaaaccccagctgtggtcatcctgaggtgggcaggctaggagggggtcctgccttgtaccctcctcccgaaggacaggtatgtaaccccctggactctcttgatcttgacaacactcagctggactttgtggctattctggatgagccccaggggctgagtcctcctccttcccatgatcagcggggcagctctggacataccccacctccctctgggccccccaacatggctgtgggcaacatgagtgtcttactgagatccctacctggggaaacagaattcctcaactctagtgcctaaagagtagggaatctcatccatcacagatcgcatttcctaaggggtttctatccttccagaaaaattgggggagctgcagtcccctgcacaagatgccccagggatgggaggtatgggctgggggctatgtatagtctgtatacgttttgaggagaaatttgataatgacactgtttcctgataataaaggaactgcatcag

SEQ ID NO: 3668 - protein, 1106 aa, Homo sapiens
MFNSMTPPPISSYGEPCCLRPLPSQGAPSVGTEGLSGPPFCHQANLMSGPHSYGPARETNSCTEGPLFSSPRSAVKLTKKRALSISPLSDASLDLQTVIRTSPSSLVAFINSRCTSPGGSYGHLSIGTMSPSLGFPAQMNHQKGPSPSFGVQPCGPHDSARGGMIPHPQSRGPFPTCQLKSELDMLVGKCREEPLEGDMSSPNSTGIQDPLLGMLDGREDLEREEKREPESVYETDCRWDGCSQEFDSQEQLVHHINSEHIHGERKEFVCHWGGCSRELRPFKAQYMLVVHMRRHTGEKPHKCTFEGCRKSYSRLENLKTHLRSHTGEKPYMCEHEGCSKAFSNASDRAKHQNRTHSNEKPYVCKLPGCTKRYTDPSSLRKHVKTVHGPDAHVTKRHRGDGPLPRAPSISTVEPKREREGGPIREESRLTVPEGAMKPQPSPGAQSSCSSDHSPAGSAANTDSGVEMTGNAGGSTEDLSSLDEGPCIAGTGLSTLRRLENLRLDQLHQLRPIGTRGLKLPSLSHTGTTVSRRVGPPVSLERRSSSSSSISSAYTVSRRSSLASPFPPGSPPENGASSLPGLMPAQHYLLRARYASARGGGTSPTAASSLDRIGGLPMPPWRSRAEYPGYNPNAGVTRRASDPAQAADRPAPARVQRFKSLGCVHTPPTVAGGGQNFDPYLPTSVYSPQPPSITENAAMDARGLQEEPEVGTSMVGSGLNPYMDFPPTDTLGYGGPEGAAAEPYGARGPGSLPLGPGPPTNYGPNPCPQQASYPDPTQETWGEFPSHSGLYPGPKALGGTYSQCPRLEHYGQVQVKPEQGCPVGSDSTGLAPCLNAHPSEGPPHPQPLFSHYPQPSPPQYLQSGPYTQPPPDYLPSEPRPCLDFDSPTHSTGQLKAQLVCNYVQSQQELLWEGGGREDAPAQEPSYQSPKFLGGSQVSPSRAKAPVNTYGPGFGPNLPNHKSGSYPTPSPCHENFVVGANRASHRAAAPPRLLPPLPTCYGPLKVGGTNPSCGHPEVGRLGGGPALYPPPEGQVCNPLDSLDLDNTQLDFVAILDEPQGLSPPPSHDQRGSSGHTPPPSGPPNMAVGNMSVLLRSLPGETEFLNSSA

SEQ ID NO: 3669 - DNA, 2795 bp, Homo sapiens
atcagcgagggattcacggcgaaatgagactgttcgtgagtgatggcgtcccgggttgcttgccggtgctggccgccgccgggagagcccggggcagagcagaggtgctcatcagcactgtaggcccggaagattgtgtggtcccgttcctgacccggcctaaggtccctgtcttgcagctggatagcggcaactacctcttctccactagtgcaatctgccgatatttttttttgttatctggctgggagcaagatgacctcactaaccagtggctggaatgggaagcgacagagctgcagccagctttgtctgctgccctgtactatttagtggtccaaggcaagaagggggaagatgttcttggttcagtgcggagagccctgactcacattgaccacagcttgagtcgtcagaactgtcctttcctggctggggagacagaatctctagccgacattgttttgtggggagccctatacccattactgcaagatcccgcctacctccctgaggagctgagtgccctgcacagctggttccagacactgagtacccaggaaccatgtcagcgagctgcagagactgtactgaaacagcaaggtgtcctggctctccggccttacctccaaaagcagccccagcccagccccgctgagggaagggctgtcaccaatgagcctgaggaggaggagctggctaccctatctgaggaggagattgctatggctgttactgcttgggagaagggcctagaaagtttgcccccgctgcggccccagcagaatccagtgttgcctgtggctggagaaaggaatgtgctcatcaccagtgccctcccttacgtcaacaatgtcccccaccttgggaacatcattggttgtgtgctcagtgccgatgtctttgccaggtactctcgcctccgccagtggaacaccctctatctgtgtgggacagatgagtatggtacagcaacagagaccaaggctctggaggagggactaaccccccaggagatctgcgacaagtaccacatcatccatgctgacatctaccgctggtttaacatttcgtttgatatttttggtcgcaccaccactccacagcagaccaaaatcacccaggacattttccagcagttgctgaaacgaggttttgtgctgcaagatactgtggagcaactgcgatgtgagcactgtgctcgcttcctggctgaccgcttcgtggagggcgtgtgtcccttctgtggctatgaggaggctcggggtgaccagtgtgacaagtgtggcaagctcatcaatgctgtcgagcttaagaagcctcagtgtaaagtctgccgatcatgccctgtggtgcagtcgagccagcacctgtttctggacctgcctaagctggagaagcgactggaggagtggttggggaggacattgcctggcagtgactggacacccaatgcccagtttatcacccgttcttggcttcgggatggcctcaagccacgctgcataacccgagacctcaaatggggaacccctgtacccttagaaggttttgaagacaaggtattctatgtctggtttgatgccactattggctatctgtccatcacagccaactacacagaccagtgggagagatggtggaagaacccagagcaagtggacctgtatcagttcatggccaaagacaatgttcctttccatagcttagtctttccttgctcagccctaggagctgaggataactataccttggtcagccacctcattgctacagagtacctgaactatgaggatgggaaattctctaagagccgcggtgtgggagtgtttggggacatggcccaggacacggggatccctgctgacatctggcgcttctatctgctgtacattcggcctgagggccaggacagtgctttctcctggacggacctgctgctgaagaataattctgagctgcttaacaacctgggcaacttcatcaacagagctgggatgtttgtgtctaagttctttgggggctatgtgcctgagatggtgctcacccctgatgatcagcgcctgctggcccatgtcaccctggagctccagcactatcaccagctacttgagaaggttcggatccgggatgccttgcgcagtatcctcaccatatctcgacatggcaaccaatatattcaggtgaatgagccctggaagcggattaaaggcagtgaggctgacaggcaacgggcaggaacagtgactggcttggcagtgaatatagctgccttgctctctgtcatgcttcagccttacatgcccacggttagtgccacaatccaggcccagctgcagctcccacctccagcctgcagtatcctgctgacaaacttcctgtgtaccttaccagcaggacaccagattggcacagtcagtcccttgttccaaaaattggaaaatgaccagattgaaagtttaaggcagcgctttggagggggccaggcaaaaacgtccccgaagccagcagttgtagagactgttacaacagccaagccacagcagatacaagcgctgatggatgaagtgacaaaacaaggaaacattgtccgagaactgaaagcacaaaaggcagacaagaacgaggttgctgcggaggtggcgaaactcttggatctaaagaaacagttggctgtagctgaggggaaaccccctgaagcccctaaaggcaagaagaaaaagtaaaagaccttggctcatagaaagtcactttaatagatagggacagtaataaataaatgtacaatctctata

SEQ ID NO: 3670 - protein, 900 aa, Homo sapiens
MRLFVSDGVPGCLPVLAAAGRARGRAEVLISTVGPEDCVVPFLTRPKVPVLQLDSGNYLFSTSAICRYFFLLSGWEQDDLTNQWLEWEATELQPALSAALYYLVVQGKKGEDVLGSVRRALTHIDHSLSRQNCPFLAGETESLADIVLWGALYPLLQDPAYLPEELSALHSWFQTLSTQEPCQRAAETVLKQQGVLALRPYLQKQPQPSPAEGRAVTNEPEEEELATLSEEEIAMAVTAWEKGLESLPPLRPQQNPVLPVAGERNVLITSALPYVNNVPHLGNIIGCVLSADVFARYSRLRQWNTLYLCGTDEYGTATETKALEEGLTPQEICDKYHIIHADIYRWFNISFDIFGRTTTPQQTKITQDIFQQLLKRGFVLQDTVEQLRCEHCARFLADRFVEGVCPFCGYEEARGDQCDKCGKLINAVELKKPQCKVCRSCPVVQSSQHLFLDLPKLEKRLEEWLGRTLPGSDWTPNAQFITRSWLRDGLKPRCITRDLKWGTPVPLEGFEDKVFYVWFDATIGYLSITANYTDQWERWWKNPEQVDLYQFMAKDNVPFHSLVFPCSALGAEDNYTLVSHLIATEYLNYEDGKFSKSRGVGVFGDMAQDTGIPADIWRFYLLYIRPEGQDSAFSWTDLLLKNNSELLNNLGNFINRAGMFVSKFFGGYVPEMVLTPDDQRLLAHVTLELQHYHQLLEKVRIRDALRSILTISRHGNQYIQVNEPWKRIKGSEADRQRAGTVTGLAVNIAALLSVMLQPYMPTVSATIQAQLQLPPPACSILLTNFLCTLPAGHQIGTVSPLFQKLENDQIESLRQRFGGGQAKTSPKPAVVETVTTAKPQQIQALMDEVTKQGNIVRELKAQKADKNEVAAEVAKLLDLKKQLAVAEGKPPEAPKGKKKK

SEQ ID NO: 3671 - DNA, 981 bp, Homo sapiens
agagacttaagtctaaggcactgagcgtatcatgttaaagatgagcgggtggcagcgacagagccaaaatcagagctggaacctgaggagagagtgttcaagaaggaagtgtatcttcatacatcaccacacctgaaagcaggcatcagaccagcttgccaacttgtggcatagactgtttgctacatggagcttgttccagccactccccattatcctgcagatgtgcttttccagactgatccaactgcagagatggcagctgagtcattgcctttctccttcgggacactgtccagctgggagctggaagcctggtatgaggacctgcaagaggtcctgtcttcagatgaaaatgggggtacctatgtttcacctcctggaaatgaagaggaagaatcaaaaatcttcaccactcttgaccctgcttctctggcttggctgactgaggaggagccagaaccagcagaggtcacaagcacctcccagagccctcactctccagattccagtcagagctccctggctcaggaggaagaggaggaagaccaagggagaaccaggaaacggaaacagagtggtcattccccagcccgggctggaaagcagcgcatgaaggagaaagaacaggagaatgaaaggaaagtggcacagctagctgaagagaatgaacggctcaagcaggaaatcgagcgcctgaccagggaagtagaggcgactcgccgagctctgattgaccgaatggtgaatctgcaccaagcatgaacaattgggagcatcagtcccccacttgggccacactacccacctttcccagaagtggctactgactaccctctcactagtgccaatgatgtgaccctcaatcccacatacgcagggggaaggcttggagtagacaaaaggaaaggtctcagcttgtatatagagattgtacatttatttattactgtccctatctattaaagtgactttctatga

SEQ ID NO: 3672 - DNA, 3592 bp, Homo sapiens
atgcgcgggaggccgctcggtgatccgcggcggcggcagcggcgcttcctgctaggaccggccggggccgtaccggaggctcgggctccaccgaccctcctcccaccccctcccactcaccctctgggccgcgactgcgcagggcggggccggccgaaccatgggccgcggtgtgggctaagctggtggccccggctttagactggaccccacaatgtttgcagagatgttcaggcacgcgggagctgattacacacaatgaatgggggcaatgagagcagtggagcagacagagctgggggccctgtggccacatctgtccccatcggctggcagcgctgtgtgcgagagggtgctgtgctctacatcagtccaagtggcacagagctgtcttccttggagcaaacccggagctacctcctcagcgatgggacctgcaagtgcggtctggagtgtccacttaatgtccccaaggttttcaactttgaccctttggccccggtgaccccgggtggggctggggtggggccagcatcagaggaggacatgaccaagctgtgcaaccaccggcggaaagctgttgctatggcaactctgtaccgcagcatggagaccacctgctcacactcttctcctggagagggagcgagcccccaaatgttccacactgtgtccccagggcccccctctgcccgccctccctgtcgagttcctcctacaactccacttaatgggggtcctggctcccttcccccagaaccaccctcagtttcccaggcctttcccactctagcaggccctggggggcttttccccccaaggcttgctgacccagtcccttctgggggcagtagcagcccccgtttcctcccaaggggcaatgccccctctccagccccacctcctccacctgctatcagcctcaatgctccctcatacaactggggagctgccctcagatccagcctggtgccctctgacctgggctctcctccggcccctcatgcctcctcctcaccaccttcagaccctcctctcttccactgtagtgatgccttaacaccccctcccctgcccccgagcaataatctccccgcccaccctggtcctgcctctcagccaccagtgtcttcagccactatgcacctgcccctggtcctggggcccctgggaggggcccccacggtggaggggcctggggcaccccccttccttgctagcagcctactctctgcagcggccaaggcacagcatcccccactaccccctcccagcactttacagggccgaaggccccgtgcccaggcaccctcagcttcccactcctcatcacttcgtccctctcagcgtcgtccccgcagaccccctactgtatttcgattgctagaagggagaggccctcaaacccctagacggagccgtcctcgggcccctgctcctgtcccccaacccttttctctcccggagccatcccaaccaattctcccttctgtgctgtccctgctgggactccccacccctggcccttcccactctgatggaagctttaaccttttggggtcagatgcacaccttcctcctcccccaaccctctcctcagggagccctccccagcccaggcaccccatccagccctccctgcctgggaccaccagtggcagcctcagcagtgtgccaggtgcccctgccccaccagctgcctccaaagccccagtagtccccagccctgtgcttcaaagcccatccgaaggactggggatgggggcaggcccggcctgccctctgcctcccctggctggtggagaggctttccctttccccagccctgagcagggcctggcactgagtggagctggcttccctgggatgcttggggccttgcctctccctctgagtctggggcagcctccaccttctccattgctcaaccacagtttatttggtgtgctgactgggggaggaggacaacctccccctgagcccctgctacccccaccaggaggacctggtcctcccctagccccaggagagcctgaagggccttcgcttttggtggcttccttgcttcctccaccaccctcagaccttcttccacctccttcagcacctcccagcaacctccttgcctctttcctgcccctgttggctctgggccccacagctggggatggggagggatctgcagagggagccgggggtccaagtggggagccattttcaggcttgggagacctgtcccccctacttttccccccactttcagccccccctaccctcatagctttaaattctgcgctgctggctgccaccctggatcccccctcggggacacccccccagccctgtgtcctgagtgccccccaacctggaccacctacctccagtgtcaccacggcaactactgacccgggggcctcctctctgggcaaggccccctccaactcagggagacccccccaactccttagccctctgctgggtgccagcctgctgggtgacctgtcttcactgaccagcagccctggagccctccccagcctgttgcagcctcctggccctcttctctctggccagttggggctgcagctcctccctggggggggagctcctccacccctctcagaggcttctagtcccctagcctgcctgctacagagtctccagatccctccagagcagccagaagccccctgtctaccccccgagagccctgcctcagccctcgaaccagagcctgccaggcctcccctcagtgccttagccccaccccatggttctcccgaccccccagtccctgagctgctcactgggagggggtcagggaaacggggccggaggggaggagggggacttaggggcattaatggtgaggccaggccagcccggggccgaaagcctggcagccggcgggagcctggccgactggccctcaaatgggggacacgtggtggcttcaatggacaaatggaaaggtccccaagaagaacccaccattggcagcataatggggagctggctgaagggggtgctgagcccaaggatccaccccctcccgggccccattctgaggaccttaaggtgcccccgggagtagtcagaaagtctcgtcgtggccgtaggagaaaatacaaccctacccggaacagcaatagctcccgccaggacattaccttggaacccagccctacagcccgagcagctgtccctctgcctccccgggcccgccctggccgtcctgccaaaaacaagaggaggaaactggccccatagcagccatacctggagctggatctgaccctgattggggagagctgagtgctgagccttgggagcccctgccagccacctgcacctgctgccctccttcccagtgaaagagacgttgtgatgatgcgactgaggattatgcaacgtggtccaaccggagcggccagcatgaccagctgtccaggggctgcctcctgccttttcttttgtaaagacaagacccttgggagttttaattctgttttgtacttgccctgtggggcctccactgcttttctatgggagacactcttaatttaacagatgagaatattttgaaactctg

SEQ ID NO: 3673 - protein, 577 aa, Homo sapiens [sequence omitted]

SEQ ID NO: 3674 - DNA, 1716 bp, Homo sapiens
gagacttcctgctcatctgccgctccctttgccgccgccttagcccgggacccgaacccagcctctcccctacccgaacaccggccccggctccaccgaggcccgggtcccccagcccgtctcgccgccgccatggcggaccctaaatacgccgaccttcccggcattgccaggaatgagccagatgtttatgaaactagcgacctacctgaggatgatcaagcggagttcgatgcggaggagctgacaagcacaagtgtggaacacatcattgtcaatcctaatgctgcctatgacaagttcaaggacaagagagtggggacaaagggacttgatttctcagatcgtattggaaaaaccaagaggacaggatatgaatctggagaatatgagatgcttggagagggtctgggagtgaaggagacaccccagcaaaagtaccagcgcctactgcatgaggtccaagagctgacaactgaagttgaaaaaatcaagacgacagtgaaggagtcagccacagaggagaagctgacccctgtgttgctggctaaacagctggcagccctgaagcagcagctggttgcttcccacctggagaagctgctgggaccagatgctgcaatcaaccttaccgaccccgatggcgccctggctaagcgcctactactgcagctggaagcaacaaagaacagcaaagggggatcagggggaaaaaccactgggacccccccagatagcagccttgtcacttatgaactacattctcggcctgagcaggacaagttctctcaagctgccaaagtcgcagaacttgaaaagcgcctgacagagctggagacagctgtacgttgtgatcaggatgctcagaatcccctttctgcaggtctacagggagcctgtctcatggagactgtagagctgttgcaagcaaaggtgagcgccctagaccttgcagttttggatcaagtggaggctcggctacagagtgtcctgggaaaggtgaacgagattgccaagcataaagcctctgtagaagatgcagatacacaaagcaaggtgcaccagctatatgaaactatacagcgctggagccccattgcctccaccctccctgagctggtgcagagacttgtcaccatcaagcagctgcacgagcaagccatgcagtttggtcagctcctgacacacttggataccacccagcagatgattgctaattccttgaaggacaataccaccctcttgacccaggtgcagacaaccatgcgtgaaaacctggccacagttgaggggaactttgccagcattgatgaacggatgaagaagctgggaaagtgagcacatttgggagctggagaacaggggttatccctacccctgtgaactctgttaacagcttacatagggtttcccctttactataactctagcatccccatcccatttgacactgggggcaagggttcttcttgcatgtggggtttatacccctcccctgatgaatacagagtggtagctaggggttggttatcatcagaaggtggtctcccctcaggcctgggggataaggacgtgggcccagccacatgccaactcatgtccaatactgctttgcctggtgtggggaaggattgggtcttgtcccccaacacagcttctgtggctgactgtaatactgtacaactgtttctgaccattaaatgctgttgtactctg

SEQ ID NO: 3675 - protein, 314 aa, Homo sapiens
MLGEGLGVKETPQQKYQRLLHEVQELTTEVEKIKTTVKESATEEKLTPVLLAKQLAALKQQLVASHLEKLLGPDAAINLTDPDGALAKRLLLQLEATKNSKGGSGGKTTGTPPDSSLVTYELHSRPEQDKFSQAAKVAELEKRLTELETAVRCDQDAQNPLSAGLQGACLMETVELLQAKVSALDLAVLDQVEARLQSVLGKVNEIAKHKASVEDADTQSKVHQLYETIQRWSPIASTLPELVQRLVTIKQLHEQAMQFGQLLTHLDTTQQMIANSLKDNTTLLTQVQTTMRENLATVEGNFASIDERMKKLGK

SEQ ID NO: 3676 - DNA, 2166 bp, Homo sapiens
gggggtcgctgtgcctgtccccgtgtgatccgaaaagtgctggcaaaatgcggctgctgcttcgcccgggggggtaagggggtgccctggtgaaattttctatcctggccaactcaaatgaggatggcaagagagtgagcccttggagagagaggctgagcatcatgaagagaagaccctgggagttccctggggaccctgagtctggagctggggcaaggccccccagggcccgtcagtggcctgaggagatggttggatcattccaaacattgtctcagtgtggaaactgaggcagacagtggtcaggcaggaccatatgagaactggatgttggagccagctctagccacaggagaggagctgccggaactgaccttgctgaccacactgttggagggccctggagataagacgcagccacctgaagaggagactttgtcccaagcccctgagagtgaggaggaacagaagaagaaggctctggaaaggagtatgtatgtcctgagtgaactggtagaaacagagaaaatgtacgtggacgacttggggcagattgtggagggttatatggccaccatggctgctcagggggtccccgagagtcttcgaggccgtgacaggattgtgtttgggaatatccagcaaatctatgagtggcaccgagactatttcttgcaagagctacaacggtgtctgaaagatcctgattggctggctcagctattcatcaaacacgagcgccggctgcatatgtatgtggtgtactgtcagaataagcccaagtcagagcatgtggtgtcagagtttggggacagctactttgaggagctccggcagcagctggggcaccgcctgcagctgaacgacctcctcatcaaacctgtgcagcggatcatgaaataccagctgctgctcaaggattttctcaagtattacaatagagctgggatggatactgcagacctagagcaagctgtggaggtcatgtgctttgtgcccaagcgctgcaacgatatgatgacgctggggagattgcggggatttgagggcaaactgactgctcaggggaagctcttgggccaggacactttctgggtcaccgagcctgaggctggagggctgctatcttcccgaggtcgagagaggcgcgtcttcctctttgagcaaatcatcatcttcagtgaagccctgggaggaggagtgagaggtggaacacagcctggatatgtatacaagaacagcattaaggtgagctgcctgggactggaggggaacctccaaggtgacccttgccgctttgcactgacctccagagggccagagggtgggatccagcgctatgtcctgcaggctgcagaccctgctatcagtcaggcctggatcaagcatgtggctcagatcttggagagccaacgggacttcctcaacgcattgcagtcacccattgagtaccagagacgggagagccagaccaacagcctggggcggccaagagggcctggagtggggagccctggaagaattcggcttggagatcaggcccagggcagcacacacacacccatcaatggctctctcccctctctgctgctgtcacccaaaggggaggtggccagagccctcttgccactggataaacaggcccttggtgacatcccccaggctccccatgactctcctccagtctctccaactccaaaaacccctccctgccaagccagacttgccaagctggatgaagatgagctgtaactggtgaaaaccatgggggtggtgctgactcagccgcctattccccaaggagcttcagggcagtccttctggcactgctccagaattcctccttcttggtgtgtctggagggtgggcaaggctgggagggatatcaacttggaggagaacacctagacccaaggacttttttctgcccaaggaacacagtttccttcagctcccatccctatgcatgcatcatggtccccccaaaaggaggatatgtgggtgggtgggagggctggggcaggggccagatagaaattattggttttgttttttaattttgtttttcctgttttctgagaataaaggttttgttatatcaaaaaaaaaaaaaaaaaaaaaaaaaaaaaaaaaaaaaaaaaaaaaaaaaaaaaaaaaaaaaaa

SEQ ID NO: 3677 - protein, 474 aa, Homo sapiens
MLEPALATGEELPELTLLTTLLEGPGDKTQPPEEETLSQAPESEEEQKKKALERSMYVLSELVETEKMYVDDLGQIVEGYMATMAAQGVPESLRGRDRIVFGNIQQIYEWHRDYFLQELQRCLKDPDWLAQLFIKHERRLHMYVVYCQNKPKSEHVVSEFGDSYFEELRQQLGHRLQLNDLLIKPVQRIMKYQLLLKDFLKYYNRAGMDTADLEQAVEVMCFVPKRCNDMMTLGRLRGFEGKLTAQGKLLGQDTFWVTEPEAGGLLSSRGRERRVFLFEQIIIFSEALGGGVRGGTQPGYVYKNSIKVSCLGLEGNLQGDPCRFALTSRGPEGGIQRYVLQAADPAISQAWIKHVAQILESQRDFLNALQSPIEYQRRESQTNSLGRPRGPGVGSPGRIRLGDQAQGSTHTPINGSLPSLLLSPKGEVARALLPLDKQALGDIPQAPHDSPPVSPTPKTPPCQARLAKLDEDEL

SEQ ID NO: 3678 - DNA, 2736 bp, Homo sapiens
ttgcactctcccacacccttttcttttcgtccgctcttcgcttatttctcccgccgtctcctctgcataagaaggggaacgaaagatggcggcggaaacgctgctgtccagtttgttaggactgctgcttctgggactcctgttacccgcaagtctgaccggcggtgtcgggagcctgaacctggaggagctgagtgagatgcgttatgggatcgagatcctgccgttgcctgtcatgggagggcagagccaatcttcggacgtggtgattgtctcctctaagtacaaacagcgctatgagtgtcgcctgccagctggagctattcacttccagcgtgaaagggaggaggaaacacctgcttaccaagggcctgggatccctgagttgttgagcccaatgagagatgctccctgcttgctgaagacaaaggactggtggacatatgaattctgttatggacgccacatccagcaataccacatggaagattcagagatcaaaggtgaagtcctctatctcggctactaccaatcagccttcgactgggatgatgaaacagccaaggcctccaagcagcatcgtcttaaacgctaccacagccagacctatggcaatgggtccaagtgcgaccttaatgggaggccccgggaggccgaggttcggttcctctgtgacgagggtgcaggtatctctggggactacatcgatcgcgtggacgagcccttgtcctgctcttatgtgctgaccattcgcactcctcggctctgcccccaccctctcctccggcccccacccagtgctgcaccacaggccatcctctgtcacccttccctacagcctgaggagtacatggcctacgttcagaggcaagccgactcaaagcagtatggagataaaatcatagaggagctgcaagatctaggcccccaagtgtggagtgagaccaagtctggggtggcaccccaaaagatggcaggtgcgagcccgaccaaggatgacagtaaggactcagatttctggaagatgcttaatgagccagaggaccaggccccaggaggggaggaggtgccggctgaggagcaggacccaagccctgaggcagcagattcagcttctggtgctcccaatgattttcagaacaacgtgcaggtcaaagtcattcgaagccctgcggatttgattcgattcatagaggagctgaaaggtggaacaaaaaaggggaagccaaatataggccaagagcagcctgtggatgatgctgcagaagtccctcagagggaaccagagaaggaaaggggtgatccagaacggcagagagagatggaagaagaggaggatgaggatgaggatgaggatgaagatgaggatgaacggcagttactgggagaatttgagaaggaactggaagggatcctgcttccgtcagaccgagaccggctccgttcggaggtgaaggctggcatggagcgggaactggagaacatcatccaggagacagagaaagagctggacccagatgggctgaagaaggagtcagagcgggatcgggcaatgctggctctcacatccactctcaacaaactcatcaaaagactggaggaaaaacagagtccagagctggtgaagaagcacaagaaaaagagggttgtccccaaaaagcctcccccatcaccccaacctacagaggaggatcctgagcacagagtccgggtccgggtcaccaagctccgtctcggaggccctaatcaggatctgactgtcctcgagatgaaacgggaaaacccacagctgaaacaaatcgaggggctggtgaaggagctgctggagagggagggactcacagctgcagggaaaattgagatcaaaattgtccgcccatgggctgaagggactgaagagggtgcacgttggctgactgatgaggacacgagaaacctcaaggagatcttcttcaatatcttggtgccgggagctgaagaggcccagaaggaacgccagcggcagaaagagctggagagcaattaccgccgggtgtggggctctccaggtggggagggcacaggggacctggacgaatttgacttctgagaccaacactacacttgacccttcacggaatccagactcttcctggactggcttgcctcctccccacctccccaccctggaacccctgagggccaaacagcagagtggagctgagctgtggacctctcgggcaactctgtgggtgtgggggccctgggtgaatgctgctgcccctgctggcagccaccttgagacctcaccgggcctgtgatatttgctctcctgaactctcactcaatcctcttcctctcctctgtggcttttcctgttattgtcccctaatgataggatattccctgctgcctacctggagattcagtaggatcttttgagtggaggtgggtagagagagcaaggagggcaggacacttagcaggcactgagcaagcaggcccccacctgcccttagtgatgtttggagtcgttttaccctcttctattgaattgccttgggatttccttctccctttccctgcccaccctgtcccctacaatttgtgcttctgagttgaggagccttcacctctgttgctgaggaaatggtagaatgctgcctatcacctccagcacaatcccagcgaaaaaggtgtgaagcacccaccatgttcttgaacaatcaggtttctaaataaacaactggaccatca

SEQ ID NO: 3679 - protein, 667 aa, Homo sapiens
MAAETLLSSLLGLLLLGLLLPASLTGGVGSLNLEELSEMRYGIEILPLPVMGGQSQSSDVVIVSSKYKQRYECRLPAGAIHFQREREEETPAYQGPGIPELLSPMRDAPCLLKTKDWWTYEFCYGRHIQQYHMEDSEIKGEVLYLGYYQSAFDWDDETAKASKQHRLKRYHSQTYGNGSKCDLNGRPREAEVRFLCDEGAGISGDYIDRVDEPLSCSYVLTIRTPRLCPHPLLRPPPSAAPQAILCHPSLQPEEYMAYVQRQADSKQYGDKIIEELQDLGPQVWSETKSGVAPQKMAGASPTKDDSKDSDFWKMLNEPEDQAPGGEEVPAEEQDPSPEAADSASGAPNDFQNNVQVKVIRSPADLIRFIEELKGGTKKGKPNIGQEQPVDDAAEVPQREPEKERGDPERQREMEEEEDEDEDEDEDEDERQLLGEFEKELEGILLPSDRDRLRSEVKAGMERELENIIQETEKELDPDGLKKESERDRAMLALTSTLNKLIKRLEEKQSPELVKKHKKKRVVPKKPPPSPQPTEEDPEHRVRVRVTKLRLGGPNQDLTVLEMKRENPQLKQIEGLVKELLEREGLTAAGKIEIKIVRPWAEGTEEGARWLTDEDTRNLKEIFFNILVPGAEEAQKERQRQKELESNYRRVWGSPGGEGTGDLDEFDF

SEQ ID NO: 3680 - DNA, 379 bp, Homo sapiens
gatgaacggcagttactgggagaatttgagaaggaactggaagggatcctgcttccgtcagaccgagacctgctgcctacctggagattcagtaggatcttttgagtggaggtgggtagagagagcaaggagggcaggacacttagcaggcactgagcaagcaggcccccacctgcccttagtgatgtttggagtcgttttaccctcttctattgaattgccttgggatttccttctccctttccctgcccaccctgtcccctacaatttgtgcttctgagttgaggagccttcacctctgttgctgaggaaatggtagaatgctgcctatcacctccagcacaatcccagtgaaaaaggtgtgaagcacccaccatgt

SEQ ID NO: 3681 - DNA, 1809 bp, Homo sapiens
aatccagaggcaggggagggacggtgcaggcgcagagtattgggtttggctggcctcgatttaaagagacagaagctgtcggggtcctggaagacggtccccaataccctccccccaagtccttgggaccacttgggtccccagagctggggagatggtttgtggcggctttgcctgctccaagaatgcgctttgcgctctcaacgtggtctacatgctggtgagcttgttgctcattggagtggctgcttggggcaagggcctgggtctggtgtccagcatccacatcatcggcggagtcattgctgtgggagtcttccttctccttattgcagtggctggactggtgggtgctgtcaaccaccaccaagtcctgctgttcttttacatgatcatccttggtttggtcttcatcttccaatttgtaatctcttgctcatgtctggctattaaccgaagcaaacagacagatgtcatcaatgcttcttggtgggtcatgagcaacaagactcgggatgaactggaaagaagttttgattgttgtggcttattcaacctcacaaccctgtatcaacaagattatgatttctgcactgcaatctgcaagagccagagccccacatgccagatgtgtggagaaaagtttcttaagcattcagacgaagccctgaaaatcctagggggtgttggactcttctttagctttacagagatccttggtgtttggctagcaatgagatttcggaatcagaaggatcctagagccaaccccagtgcctttctatgagactttggatccttctgacttttcttctgctctctctaagctttctcttcctcccttagggaatatctagggtctgtaaccgttttggtttgagaaaaaggaaaggccccttgtcacatcctctaaaattgatggaatagcaagactttatgccttgacatattttagtgggagccagactataaggaataaaaggaaaaactttcttcctctctctccaagaggatatgggaagcttctgtgagtgcataggatgggggctggagtcattcttagctgtttcccttcctctgtccatatactggatcacctcaacataccctggtgtggctctaagggtaaatcagggatagggccaaggagaaaacaaccaagaactctttcctgtaataagcaggatccagtttgagaaagtttagcgaatataaaagtaaaagccatttaaaaatctatattctttttttttttgacacagagtcttgctctgttgcccaggctggagtgcaatggcatgatctcggctcaccgcaacctctgcctcccgggttcaagcgatcctcctgcctcagtctcccaagtagctgggattacaggtgtgcaccaccacgcctgactaattttgtatttttagtagagacagggtttcaccatgttagtcaggctggtctcgaactcctgacctcaggtgatccacccgcgttggcctcccaacgtgctgggattataggcgtgagccaccacgccccgcctaaaatccatattcaaagaagcaatttcagttcctttctaagctttgtcagtcaaggggctccactgacttcctaggccctgtaatttaaccagtctttaaggttttgcaggaaagtcccttcttccaagtggtttttccaaatcgcacaatggcaaagccaaacagaggaagaaacattaaaaaaaaaaaaaagaccattaaaaaaaaaaaaaaaaaaaaaaaaaaaaaaaaaaaaaaaaaaaaaaaaaaaaaaaaaaaaaaaaaaaaaaaa

SEQ ID NO: 3682 - protein, 210 aa, Homo sapiens
MVCGGFACSKNALCALNVVYMLVSLLLIGVAAWGKGLGLVSSIHIIGGVIAVGVFLLLIAVAGLVGAVNHHQVLLFFYMIILGLVFIFQFVISCSCLAINRSKQTDVINASWWVMSNKTRDELERSFDCCGLFNLTTLYQQDYDFCTAICKSQSPTCQMCGEKFLKHSDEALKILGGVGLFFSFTEILGVWLAMRFRNQKDPRANPSAFL

SEQ ID NO: 3683 - DNA, 1474 bp, Homo sapiens
agccctcccagtttccgcgcgcctctttggcagctggtcacatggtgagggtgggggtgagggggcctctctagcttgcggcctgtgtctatggtcgggccctctgcgtccagctgctccggaccgagctcgggtgtatggggccgtaggaaccggctccggggccccgataacgggccgcccccacagcaccccgggctggcgtgagggtctcccttgatctgagaatggctacctctcgatatgagccagtggctgaaattggtgtcggtgcctatgggacagtgtacaaggcccgtgatccccacagtggccactttgtggccctcaagagtgtgagagtccccaatggaggaggaggtggaggaggccttcccatcagcacagttcgtgaggtggctttactgaggcgactggaggcttttgagcatcccaatgttgtccggctgatggacgtctgtgccacatcccgaactgaccgggagatcaaggtaaccctggtgtttgagcatgtagaccaggacctaaggacatatctggacaaggcacccccaccaggcttgccagccgaaacgatcaaggatctgatgcgccagtttctaagaggcctagatttccttcatgccaattgcatcgttcaccgagatctgaagccagagaacattctggtgacaagtggtggaacagtcaagctggctgactttggcctggccagaatctacagctaccagatggcacttacacccgtggttgttacactctggtaccgagctcccgaagttcttctgcagtccacatatgcaacacctgtggacatgtggagtgttggctgtatctttgcagagatgtttcgtcgaaagcctctcttctgtggaaactctgaagccgaccagttgggcaaaatctttgacctgattgggctgcctccagaggatgactggcctcgagatgtatccctgccccgtggagcctttccccccagagggccccgcccagtgcagtcggtggtacctgagatggaggagtcgggagcacagctgctgctggaaatgctgacttttaacccacacaagcgaatctctgcctttcgagctctgcagcactcttatctacataaggatgaaggtaatccggagtgagcaatggagtggctgccatggaaggaagaaaagctgccatttcccttctggacactgagagggcaatctttgcctttatctctgaggctatggagggtcctcctccatctttctacagagattactttgctgccttaatgacattcccctcccacctctccttttgaggcttctccttctccttcccatttctctacactaaggggtatgttccctcttgtccctttccctacctttatatttggggtccttttttatacaggaaaaacaaaacaaagaaataatggtcttttttttttttttaaaaaaaaaaaaaaaaaaaaaaaaaaaaaaaa

SEQ ID NO: 3684 - protein, 303 aa, Homo sapiens
MATSRYEPVAEIGVGAYGTVYKARDPHSGHFVALKSVRVPNGGGGGGGLPISTVREVALLRRLEAFEHPNVVRLMDVCATSRTDREIKVTLVFEHVDQDLRTYLDKAPPPGLPAETIKDLMRQFLRGLDFLHANCIVHRDLKPENILVTSGGTVKLADFGLARIYSYQMALTPVVVTLWYRAPEVLLQSTYATPVDMWSVGCIFAEMFRRKPLFCGNSEADQLGKIFDLIGLPPEDDWPRDVSLPRGAFPPRGPRPVQSVVPEMEESGAQLLLEMLTFNPHKRISAFRALQHSYLHKDEGNPE

SEQ ID NO: 3685 - DNA, 1122 bp, Homo sapiens
agccctcccagtttccgcgcgcctctttggcagctggtcacatggtgagggtgggggtgagggggcctctctagcttgcggcctgtgtctatggtcgggccctctgcgtccagctgctccggaccgagctcgggtgtatggggccgtaggaaccggctccggggccccgataacgggccgcccccacagcaccccgggctggcgtgagggtctcccttgatctgagaatggctacctctcgatatgagccagtggctgaaattggtgtcggtgcctatgggacagtgtacaaggcccgtgatccccacagtggccactttgtggccctcaagagtgtgagagtccccaatggaggaggaggtggaggaggccttcccatcagcacagttcgtgaggtggctttactgaggcgactggaggcttttgagcatcccaatgttgtccggctgatggacgtctgtgccacatcccgaactgaccgggagatcaagagatgtttcgtcgaaagcctctcttctgtggaaactctgaagccgaccagttgggcaaaatctttgacctgattgggctgcctccagaggatgactggcctcgagatgtatccctgccccgtggagcctttccccccagagggccccgcccagtgcagtcggtggtacctgagatggaggagtcgggagcacagctgctgctggaaatgctgacttttaacccacacaagcgaatctctgcctttcgagctctgcagcactcttatctacataaggatgaaggtaatccggagtgagcaatggagtggctgccatggaaggaagaaaagctgccatttcccttctggacactgagagggcaatctttgcctttatctctgaggctatggagggtcctcctccatctttctacagagattactttgctgccttaatgacattcccctcccacctctccttttgaggcttctccttctccttcccatttctctacactaaggggtatgttccctcttgtccctttccctacctttatatttggggtccttttttatacaggaaaaacaaaacaaagaaataatggtcttttttttttttttaaaaaaaaaaaaaaaaaaaaaaaaaaaaaaaa

SEQ ID NO: 3686 - protein, 111 aa, Homo sapiens
MATSRYEPVAEIGVGAYGTVYKARDPHSGHFVALKSVRVPNGGGGGGGLPISTVREVALLRRLEAFEHPNVVRLMDVCATSRTDREIKRCFVESLSSVETLKPTSWAKSLT

SEQ ID NO: 3687 - DNA, 2393 bp, Homo sapiens
ggggttgagatatgatgctcaggagaagcgctttctttcgcgagcaccctgaaccagaccatgacccagaccctcaagtacgcctccagagtgttccatcgcgtccgctgggcgcccgagttgggcgcctccctaggctaccgagagtaccactcagcacgccggagcttggcagacatcccaggcccctctacgcccagctttctggccgaacttttctgcaagggggggctgtcgaggctacacgagctgcaggtgcagggcgccgcgcacttcgggccggtgtggctagccagctttgggacagtgcgcaccgtgtacgtggctgcccctgcactcgtcgaggagctgctgcgacaggagggaccccggcccgagcgctgcagcttctcgccctggacggagcaccgccgctgccgccagcgggcttgcggactgctcactgcggaaggcgaagaatggcaaaggctccgcagtctcctggccccgctcctcctccggcctcaagcggccgcccgctacgccggaaccctgaacaacgtagtctgcgaccttgtgcggcgtctgaggcgccagcggggacgtggcacggggccgcccgccctggttcgggacgtggcgggggaattttacaagttcggactggaaggcatcgccgcggttctgctcggctcgcgcttgggctgcctggaggctcaagtgccacccgacacggagaccttcatccgcgctgtgggctcggtgtttgtgtccacgctgttgaccatggcgatgccccactggctgcgccaccttgtgcctgggccctggggccgcctctgccgagactgggaccagatgtttgcatttgctcagaggcacgtggagcggcgagaggcagaggcagccatgaggaacggaggacagcccgagaaggacctggagtctggggcgcacctgacccacttcctgttccgggaagagttgcctgcccagtccatcctgggaaatgtgacagagttgctattggcgggagtggacacggtgtccaacacgctctcttgggctctgtatgagctctcccggcaccccgaagtccagacagcactccactcagagatcacagctgccctgagccctggctccagtgcctacccctcagccactgttctgtcccagctgcccctgctgaaggcggtggtcaaggaagtgctaagactgtaccctgtggtacctggaaattctcgtgtcccagacaaagacattcatgtgggtgactatattatccccaaaaatacgctggtcactctgtgtcactatgccacttcaagggaccctgcccagttcccagagccaaattcttttcgtccagctcgctggctgggggagggtcccaccccccacccatttgcatctcttccctttggctttggcaagcgcagctgtatggggagacgcctggcagagcttgaattgcaaatggctttggcccagatcctaacacattttgaggtgcagcctgagccaggtgcggccccagttagacccaagacccggactgtcctggtacctgaaaggagcatcaacctacagtttttggacagatagtcccatggaaagagactgtcatcatcaccctttcattcatcatagggataagattttttgtaggcacaagaccaaggtatacatcttcccctaatgcctatctgaccaaactggatagaaccaccatagtgaagtgtgaggcggccctgaccaatgtgtgaagtatgcacttggcctgactcaggaagccaggtgagaaaaccatggtctctctgcttgcttggcccttctgatcatgtatgcatcccccaaggatgaaatcagattttaactaataatgctggatggcctgaggaaagattcaactgcctctctttttgggctttcatagtgttcattgatgctgctggctaagcatttatcaaagcataagctcagtaactgtgcatctggtctgtacctggttggtccttcgtctttgcatgtaagctctttgagaggaagggtgaagccttatttgttttttatgtcccctgccagggcctgtctctgactaggtgtcaccatacacattcttagattgaatctgaaccatgtggcagaagggataagcagcttacttagtaggctctgtctacccccttccttctttgtcttgcccctaggaaggtgaatctgccctagcctggtttacggtttcttataactctcctttgctctctggccactattaagtgggtttgccccatcacttagttctcaggcagagacatctttgggcctgtccctgcccaggcctctggctttttatattgaaaatttttaaatattcacaaattttagaataaatcaaatattccattctt

SEQ ID NO: 3688 - protein, 508 aa, Homo sapiens
MTQTLKYASRVFHRVRWAPELGASLGYREYHSARRSLADIPGPSTPSFLAELFCKGGLSRLHELQVQGAAHFGPVWLASFGTVRTVYVAAPALVEELLRQEGPRPERCSFSPWTEHRRCRQRACGLLTAEGEEWQRLRSLLAPLLLRPQAAARYAGTLNNVVCDLVRRLRRQRGRGTGPPALVRDVAGEFYKFGLEGIAAVLLGSRLGCLEAQVPPDTETFIRAVGSVFVSTLLTMAMPHWLRHLVPGPWGRLCRDWDQMFAFAQRHVERREAEAAMRNGGQPEKDLESGAHLTHFLFREELPAQSILGNVTELLLAGVDTVSNTLSWALYELSRHPEVQTALHSEITAALSPGSSAYPSATVLSQLPLLKAVVKEVLRLYPVVPGNSRVPDKDIHVGDYIIPKNTLVTLCHYATSRDPAQFPEPNSFRPARWLGEGPTPHPFASLPFGFGKRSCMGRRLAELELQMALAQILTHFEVQPEPGAAPVRPKTRTVLVPERSINLQFLDR

SEQ ID NO: 3689 - DNA, 1468 bp, Homo sapiens
ggcctgcgcctccacgtggatttggtagagaaaccccggactgggatcatggcagccgagactcggaacgtggccggagcagaggccccaccgccccagaagcgctactaccggcaacgtgctcactccaaccccatggcggaccacacgctgcgctaccctgtgaagccagaggagatggactggtctgagctatacccagagttcttcgctccactcactcaaaatcagagccacgatgacccaaaggataagaaagaaaagagagctcaggcccaagtggagtttgcagacataggctgtggctatggtggcctgttagtggaactgtcaccgctgttcccagacacacttattctgggtctggagatccgggtgaaggtctcagactatgtacaagaccggattcgggccctacgcgcagctcctgcaggtggcttccagaacatcgcctgtctccgtagcaatgccatgaagcaccttcctaacttcttctacaagggccagctgacaaagatgttcttcctcttccccgacccacatttcaagcggacaaagcacaagtggcgaatcatcagtcccaccctgctagcagaatatgcctacgtgctaagagttggggggctggtgtataccataaccgatgtgctggagctacacgactggatgtgcactcatttcgaagagcacccactgtttgagcgtgtgcctctggaggacctgagtgaagaccccgttgtgggacatctaggcacctcaactgaggaggggaagaaagttctacgtaatggagggaagaatttcccagccatcttccgaagaatacaagatcccgtcctccaggcagtgacctcccaaaccagcctgcctggtcactgactgcttactctaccttagctggacctcgtctcccagggattagagaaaagagcaggagtcctgggtcttcccagttgagactgctggagctgagacacagtactctcttaaagaaggtggggagctgcccagggcagaacccactggtgttcatgactacccctggctcctctcaccttgtccctccactgccaacagaaaacaaagcagctgactgagatggtcaaaggactttggaccataggggatctttggaaggctgtggggtcttgctcttccttagcactcctttctccttgtgagatctctcctcagctggaatgaggaatgtagtccatctaaactgcttgctaggctcaattaccacttctgtttgctttgtggatcctgggataacatgtatatgtgtacacatgcctattctgccatttctcaggaaagggtggagtatgtatcatatgccttctaccatcctcctgtcctctccctgcgtaagacttgacctggggaatctgtgttccctaaaaaaaaaaaaaaaaaaaaaaaaaaaaaaaaaaaaaaaaaaaaaaaaaaaaaaaaaaaaaaaaaa

SEQ ID NO: 3690 - protein, 276 aa, Homo sapiens
MAAETRNVAGAEAPPPQKRYYRQRAHSNPMADHTLRYPVKPEEMDWSELYPEFFAPLTQNQSHDDPKDKKEKRAQAQVEFADIGCGYGGLLVELSPLFPDTLILGLEIRVKVSDYVQDRIRALRAAPAGGFQNIACLRSNAMKHLPNFFYKGQLTKMFFLFPDPHFKRTKHKWRIISPTLLAEYAYVLRVGGLVYTITDVLELHDWMCTHFEEHPLFERVPLEDLSEDPVVGHLGTSTEEGKKVLRNGGKNFPAIFRRIQDPVLQAVTSQTSLPGH

SEQ ID NO: 3691 - DNA, 1594 bp, Homo sapiens
ggcctgcgcctccacgtggatttggtagagaaaccccggactgggatcatggcagccgagactcggaacgtggccggagcagaggccccaccgccccagaagcgctactaccggcaacgtgctcactccaaccccatggcggaccacacgctgcgctaagcacaaacacaaagtaggatcccagtgcattaggcagccagtctcgggagaaggggaacttgtgccccagaaagggcagttacccggccagggtcacatcaaccgccagaagtggagttgggcagccctgtgaagccagaggagatggactggtctgagctatacccagagttcttcgctccactcactcaaaatcagagccacgatgacccaaaggataagaaagaaaagagagctcaggcccaagtggagtttgcagacataggctgtggctatggtggcctgttagtggaactgtcaccgctgttcccagacacacttattctgggtctggagatccgggtgaaggtctcagactatgtacaagaccggattcgggccctacgcgcagctcctgcaggtggcttccagaacatcgcctgtctccgtagcaatgccatgaagcaccttcctaacttcttctacaagggccagctgacaaagatgttcttcctcttccccgacccacatttcaagcggacaaagcacaagtggcgaatcatcagtcccaccctgctagcagaatatgcctacgtgctaagagttggggggctggtgtataccataaccgatgtgctggagctacacgactggatgtgcactcatttcgaagagcacccactgtttgagcgtgtgcctctggaggacctgagtgaagaccccgttgtgggacatctaggcacctcaactgaggaggggaagaaagttctacgtaatggagggaagaatttcccagccatcttccgaagaatacaagatcccgtcctccaggcagtgacctcccaaaccagcctgcctggtcactgactgcttactctaccttagctggacctcgtctcccagggattagagaaaagagcaggagtcctgggtcttcccagttgagactgctggagctgagacacagtactctcttaaagaaggtggggagctgcccagggcagaacccactggtgttcatgactacccctggctcctctcaccttgtccctccactgccaacagaaaacaaagcagctgactgagatggtcaaaggactttggaccataggggatctttggaaggctgtggggtcttgctcttccttagcactcctttctccttgtgagatctctcctcagctggaatgaggaatgtagtccatctaaactgcttgctaggctcaattaccacttctgtttgctttgtggatcctgggataacatgtatatgtgtacacatgcctattctgccatttctcaggaaagggtggagtatgtatcatatgccttctaccatcctcctgtcctctccctgcgtaagacttgacctggggaatctgtgttccctaaaaaaaaaaaaaaaaaaaaaaaaaaaaaaaaaaaaaaaaaaaaaaaaaaaaaaaaaaaaaaaaaa

SEQ ID NO: 3692 - protein, 36 aa, Homo sapiens
MAAETRNVAGAEAPPPQKRYYRQRAHSNPMADHTLR

SEQ ID NO: 3693 - DNA, 1283 bp, Homo sapiens
ggcctgcgcctccacgtggatttggtagagaaaccccggactgggatcatggcagccgagactcggaacgtggccggagcagaggccccaccgccccagaagcgctactaccggcaacgtgctcactccaaccccatggcggaccacacgctgcgctaccctgtgaagccagaggagatggactggtctgagctatacccagagttcttcgctccactcactcaaaatcagagccacgatgacccaaaggataagaaagaaaagagagctcaggcccaagtggagtttgcagacataggctgtggctatggtggcctgttagctgacaaagatgttcttcctcttccccgacccacatttcaagcggacaaagcacaagtggcgaatcatcagtcccaccctgctagcagaatatgcctacgtgctaagagttggggggctggtgtataccataaccgatgtgctggagctacacgactggatgtgcactcatttcgaagagcacccactgtttgagcgtgtgcctctggaggacctgagtgaagaccccgttgtgggacatctaggcacctcaactgaggaggggaagaaagttctacgtaatggagggaagaatttcccagccatcttccgaagaatacaagatcccgtcctccaggcagtgacctcccaaaccagcctgcctggtcactgactgcttactctaccttagctggacctcgtctcccagggattagagaaaagagcaggagtcctgggtcttcccagttgagactgctggagctgagacacagtactctcttaaagaaggtggggagctgcccagggcagaacccactggtgttcatgactacccctggctcctctcaccttgtccctccactgccaacagaaaacaaagcagctgactgagatggtcaaaggactttggaccataggggatctttggaaggctgtggggtcttgctcttccttagcactcctttctccttgtgagatctctcctcagctggaatgaggaatgtagtccatctaaactgcttgctaggctcaattaccacttctgtttgctttgtggatcctgggataacatgtatatgtgtacacatgcctattctgccatttctcaggaaagggtggagtatgtatcatatgccttctaccatcctcctgtcctctccctgcgtaagacttgacctggggaatctgtgttccctaaaaaaaaaaaaaaaaaaaaaaaaaaaaaaaaaaaaaaaaaaaaaaaaaaaaaaaaaaaaaaaaaa

SEQ ID NO: 3694 - protein, 155 aa, Homo sapiens
MAAETRNVAGAEAPPPQKRYYRQRAHSNPMADHTLRYPVKPEEMDWSELYPEFFAPLTQNQSHDDPKDKKEKRAQAQVEFADIGCGYGGLLADKDVLPLPRPTFQADKAQVANHQSHPASRICLRAKSWGAGVYHNRCAGATRLDVHSFRRAPTV

SEQ ID NO: 3695 - DNA, 1253 bp, Homo sapiens
ggggggagggtgtttatcgcggctagagagatgtcgctgctgcggtcgctgcgcgtgtttctggtcgcgcggaccgggagctacccggctgggtctcttctgcgtcagtcgccccagccaaggcacacattttatgctgggccccgtctgtctgcctcggcctccagcaaggagctcctcatgaagctgcggcggaaaacaggctactcctttgtaaattgcaagaaagctctggagacttgtggcggggacctcaaacaggcagagatctggctccacaaggaggcccagaaggagggctggagcaaagctgccaagctccaagggaggaagaccaaagaaggcctgattgggctgttgcaggaaggaaacacaactgtattagtagaggtaaactgtgagacagattttgtttctagaaatttaaaatttcaactgttggtccagcaagtagcccttggaaccatgatgcattgtcagaccctaaaggatcaaccctctgcatacagtaaagtgcagtggctcacgcctgtaaacctagcactttgggaggctgaagcaggtggatcacttgagggtttcttgaattcctctgagctttctggacttccagctgggcctgacagagaaggctcactcaaggatcagttggctttagcaattggaaaactgggagaaaacatgattcttaaacgagctgcatgggtgaaggtgccatctgggttctacgttggctcttatgtccacggagcaatgcagagtccctcacttcacaagctggtgctggggaagtatggggccctggtcatctgtgagacgtctgaacagaaaacaaaccttgaagacgttggccgccgccttgggcagcatgtggtgggcatggcccccctctctgttggctccctggacgatgagcctgggggagaggcagagactaagatgctgtcccagccgtatttgctggatccctccattaccttggggcagtatgtgcagcctcagggggtgtcggtagtagactttgtgcggtttgaatgtggagaaggtgaagaggcagcagaaactgaataggttccagagacttttggcccaggaggaatatttacttttagctctggacatcattacaaaaaggaatatttcccaaacctcttcagaccgagaatgcatgggtaaaattattaaatagttgtataataaaaataattttttccttgtttgcacaaaaaaaaaaaaaaaaaaaaaaaaaaaaa

SEQ ID NO: 3696 - protein, 346 aa, Homo sapiens
MSLLRSLRVFLVARTGSYPAGSLLRQSPQPRHTFYAGPRLSASASSKELLMKLRRKTGYSFVNCKKALETCGGDLKQAEIWLHKEAQKEGWSKAAKLQGRKTKEGLIGLLQEGNTTVLVEVNCETDFVSRNLKFQLLVQQVALGTMMHCQTLKDQPSAYSKVQWLTPVNLALWEAEAGGSLEGFLNSSELSGLPAGPDREGSLKDQLALAIGKLGENMILKRAAWVKVPSGFYVGSYVHGAMQSPSLHKLVLGKYGALVICETSEQKTNLEDVGRRLGQHVVGMAPLSVGSLDDEPGGEAETKMLSQPYLLDPSITLGQYVQPQGVSVVDFVRFECGEGEEAAETE

SEQ ID NO: 3697 - DNA, 2711 bp, Homo sapiens
gatgtttcagtcctggaaagacaagcatcatgcctctgaccagtgccttcagggctgtggacaacgaccctgggatcattgtctggagaatagagaaaatggagctggcgctggtgcctgtgagcgcccacggcaacttctatgagggggactgctacgtcatcctctcgacccggagagtggccagtctcctatcccaggacatccacttctggatcgggaaggactcctcccaggatgagcaaagctgcgcagccatatataccacacagctggacgactacctgggaggcagccctgtgcagcaccgagaggtccagtaccatgagtcagacactttccgtggctacttcaagcagggcatcatctacaagcaggggggtgtcgcctctgggatgaagcacgtggagaccaatacctacgacgtgaagcggctgctacatgtgaaagggaaaagaaacatcagggctaccgaggtggaaatgagctgggacagtttcaaccgaggtgatgtcttcttgctggaccttgggaaagtcatcatccaatggaatggcccagagagcaacagtggggagcgcctgaaggctatgcttctggcaaaggatattcgagacagggagcgagggggccgtgctgaaataggagtgatcgagggagacaaggaggcagccagcccagagctgatgaaggtccttcaggacacccttggccgacgctccattatcaagcctacagtccctgatgagatcatagatcagaagcagaaatcaactatcatgttgtatcatatctcagattcagctgggcagctggcagtcacagaggtagcaacaaggcctctggtccaggacttactgaaccatgatgactgctacatcctggaccaaagtggaaccaaaatctacgtgtggaaaggaaaaggagccacaaaggctgaaaaacaggcagccatgtctaaagcgctgggcttcatcaagatgaagagctaccccagcagcaccaatgtggagaccgtcaacgatggtgctgagtcggccatgttcaagcagctgttccagaagtggtcagtaaaggaccagaccatgggcctggggaaaacgttcagcattggtaaaattgctaaagttttccaggataaatttgatgtgactctgctacacaccaagccagaggtagctgcccaggaaagaatggtcgatgatggcaacggaaaagttgaggtctggagaattgagaacctggagctggtccctgtggagtatcaatggtatggcttcttttatgggggagactgttatctggtcctctacacatacgaggtaaatgggaagccacatcacatcttgtacatctggcagggccgccacgcctcacaggatgagctggcagcctcagcataccaggcagtggaggtggatcggcagtttgatggggctgctgtgcaggttcgagtcaggatgggaacggagccacgccacttcatggccatcttcaaagggaagctagttatctttgagggtgggacttccaggaagggaaatgccgagcctgaccctccagtaagactcttccaaattcatggaaatgacaaatctaacaccaaagcagtggaagttccagcctttgcctcctccctaaactccaatgatgtctttctgctgcgaactcaggcagagcactacctgtggtatggcaaggggtctagtggggatgagcgggcaatggctaaggagctggccagccttctctgtgatggcagcgagaacactgtggccgagggccaggagccagccgagttctgggacctactgggagggaaaactccctatgccaatgataaaagacttcagcaggaaatcctagatgtccagtctcgtctctttgaatgttccaataagaccggccaattcgttgtcactgagatcacagacttcacccaggatgacctgaaccctactgacgtgatgctcctagatacctgggaccaggtgttcttgtggattggggctgaggccaatgccacggagaaggagagtgcccttgccacagcacagcagtacctgcacactcaccccagcggccgagatcccgacacaccaatcctgatcattaagcaggggtttgagcctcccatcttcacaggctggttcctagcctgggaccctaacatttggagtgcaggaaaaacatatgaacaattaaaagaagagctgggagatgctgctgctatcatgcgaatcactgctgacatgaagaatgcaaccctctccctgaattctaatgacagtgagccaaaatattaccctatagcagttctgttgaaaaaccagaatcaggagctgcctgaggatgtaaaccctgccaaaaaggagaattacctctctgaacaggactttgtgtctgtgtttggcatcacaagagggcaatttgcagctctgcctggctggaaacagctccaaatgaagaaagaaaaggggcttttctaaagcaagaaggcctatacctattgcaaggccacagaaaagagcagatagtgccaatatcaggaaataatttatccaccaatttctgcctgacattcagctacttaatttagatataatagagtctgcaaatcacggcatgttctccattttttctcatccttgcattccttgcttgttatatacctaaaatgttaaccatatagtttttgggttttgtggccc

SEQ ID NO: 3698 - protein, 819 aa, Homo sapiens
MPLTSAFRAVDNDPGIIVWRIEKMELALVPVSAHGNFYEGDCYVILSTRRVASLLSQDIHFWIGKDSSQDEQSCAAIYTTQLDDYLGGSPVQHREVQYHESDTFRGYFKQGIIYKQGGVASGMKHVETNTYDVKRLLHVKGKRNIRATEVEMSWDSFNRGDVFLLDLGKVIIQWNGPESNSGERLKAMLLAKDIRDRERGGRAEIGVIEGDKEAASPELMKVLQDTLGRRSIIKPTVPDEIIDQKQKSTIMLYHISDSAGQLAVTEVATRPLVQDLLNHDDCYILDQSGTKIYVWKGKGATKAEKQAAMSKALGFIKMKSYPSSTNVETVNDGAESAMFKQLFQKWSVKDQTMGLGKTFSIGKIAKVFQDKFDVTLLHTKPEVAAQERMVDDGNGKVEVWRIENLELVPVEYQWYGFFYGGDCYLVLYTYEVNGKPHHILYIWQGRHASQDELAASAYQAVEVDRQFDGAAVQVRVRMGTEPRHFMAIFKGKLVIFEGGTSRKGNAEPDPPVRLFQIHGNDKSNTKAVEVPAFASSLNSNDVFLLRTQAEHYLWYGKGSSGDERAMAKELASLLCDGSENTVAEGQEPAEFWDLLGGKTPYANDKRLQQEILDVQSRLFECSNKTGQFVVTEITDFTQDDLNPTDVMLLDTWDQVFLWIGAEANATEKESALATAQQYLHTHPSGRDPDTPILIIKQGFEPPIFTGWFLAWDPNIWSAGKTYEQLKEELGDAAAIMRITADMKNATLSLNSNDSEPKYYPIAVLLKNQNQELPEDVNPAKKENYLSEQDFVSVFGITRGQFAALPGWKQLQMKKEKGLF

SEQ ID NO: 3699 - DNA, 4118 bp, Homo sapiens
  unsure 1330: unknown base
  unsure 1333: unknown base
  unsure 1334: unknown base
acacaccacacacactcacactcacacacactcacacacactcatcccacttgaatcttggggcaggaactcagaaaacttccagcccgggcagcgcgcgcttggtgcaagactcaggagctagcagcccgtccccctccgactctccggtgccgccgctgcctgctcccgccaccctaggaggcgcggtgccacccactactctgtcctctgcctgtgctccgtgcccgaccctatcccggcggagtctccccatcctcctttgctttccgactgcccaaggcactttcaatctcaatctcttctctctctctctctctctctctctctctctctctctctctctctctctctctctcgcagggtggggggaagaggaggaggaattctttccccgcctaacatttcaagggacacaattcactccaagtctcttccctttccaagccgcttccgaagtgctcccggtgcccgcaactcctgatcccaacccgcgagaggagcctctgcgacctcaaagcctctcttccttctccctcgcttccctcctcctcttgctacctccacctccaccgccacctccacctccggcacccacccaccgccgccgccgccaccggcagcgcctcctcctctcctcctcctcctcccctcttctctttttggcagccgctggacgtccggtgttgatggtggcagcggcggcagcctaagcaacagcagccctcgcagcccgccagctcgcgctcgccccgccggcgtccccagccctatcacctcatctcccgaaaggtgctgggcagctccggggcggtcgaggcgaagcggctgcagcggcggtagcggcggcgggaggcaggatgagcgcacgcggtgagggcgcggggcagccgtccacttcagcccagggacaacctgccgccccagcgcctcagaagagaggacgcggccgccccaggaagcagcagcaagaaccaaccggtgagccctctcttaagagacccaggggaagacccaaaggcagcaaaaacaagagtccctctaaagcagctcaaaagaaagcagaagccactggagaaaaacggccaagaggcagacctaggaaatggccacaacaagttgttcagaagaagcctgctcaggaggaaactgaagagacatcctcacaagagtctgccgaagaggactagggggcgccaacgttcgatttctacctcagcagcagttggatcttttgaagggagaagacactgcagtgaccacttattctgtattgccatggtctttccactttcatctggggtggggtggggtggggtggggggagggnggnntggggtggggagaaatcacataaccttaaaaaggactatattaatcaccttctttgtaatcccttcacagtcccaggtttagtgaaaaactgctgtaaacacaggggacacagcttaacaatgcaacttttaattactgttttcttttttcttaacctactaatagtttgttgatctgataagcaagagtgggcgggtgagaaaaaccgaattgggtttagtcaatcactgcactgcatgcaaacaagaaacgtgtcacacttgtgacgtcgggcattcatataggaagaacgcggtgtgtaacactgtgtacacctcaaataccaccccaacccactccctgtagtgaatcctctgtttagaacaccaaagataaggactagatactactttctctttttcgtataatcttgtagacacttacttgatgatttttaactttttatttctaaatgagacgaaatgctgatgtatcctttcattcagctaacaaactagaaaaggttatgttcatttttcaaaaagggaagtaagcaaacaaatattgccaactcttctatttatggatatcacacatatcagcaggagtaataaatttactcacagcacttgttttcaggacaacacttcattttcaggaaatctacttcctacagagccaaaatgccatttagcaataaataacacttgtcagcctcagagcatttaaggaaactagacaagtaaaattatcctctttgtaatttaatgaaaaggtacaacagaataatgcatgatgaactcacctaattatgaggtgggaggagcgaaatctaaatttcttttgctatagttatacatcaatttaaaaagcaaaaaaaaaaaaggggggggcaatctctctctgtgtctttctctctctctcttcctctccctctctcttttcattgtgtatcagtttccatgaaagacctgaataccacttacctcaaattaagcatatgtgttacttcaagtaatacgttttgacataagatggttgaccaaggtgcttttcttcggcttgagttcaccatctcttcattcaaactgcacttttagccagagatgcaatatatccccactactcaatactacctctgaatgttacaacgaatttacagtctagtacttattacatgctgctatacacaagcaatgcaagaaaaaaacttactgggtaggtgattctaatcatctgcagttctttttgtacacttaattacagttaaagaagcaatctccttactgtgtttcagcatgactatgtatttttctatgtttttttaattaaaaatttttaaaatacttgtttcagcttctctgctagatttctacattaacttgaaaattttttaaccaagtcgctcctaggttcttaaggataattttcctcaatcacactacacatcacacaagatttgactgtaatatttaaatattaccctccaagtctgtacctcaaatgaattctttaaggagatggactaattgacttgcaaagacctacctccagacttcaaaaggaatgaacttgttacttgcagcattcatttgttttttcaatgtttgaaatagttcaaactgcagctaaccctagtcaaaactatttttgtaaaagacatttgatagaaaggaacacgtttttacatacttttgcaaaataagtaaataataaataaaataaaagccaaccttcaaagaaacttgaagctttgtaggtgagatgcaacaagccctgcttttgcataatgcaatcaaaaatatgtgtttttaagattagttgaatataagaaaatgcttgacaaatattttcatgtattttacacaaatgtgatttttgtaatatgtctcaaccagatttattttaaacgcttcttatgtagagtttttatgcctttctctcctagtgagtgtgctgactttttaacatggtattatcaactgggccaggaggtagtttctcatgacggcttttgtcagtatggcttttagtactgaagccaaatgaaactcaaaaccatctctcttccagctgcttcagggaggtagtttcaaaggccacatacctctctgagactggcagatcgctcactgttgtgaatcaccaaaggagctatggagagaattaaaactcaacattactgttaactgtgcgttaaataagcaaataaacagtggctcataaaaataaaagtcgcattccatatctttggatgggccttttagaaacctcattggccagctcataaaatggaagcaattgctcatgttggccaaacatggtgcaccgagtgatttccatctctggtaaagttacacttttatttcctgtatgttgtacaatcaaaacacactactacctcttaagtcccagtatacctcatttttcatactgaaaaaaaaagcttgtggccaatggaacagtaagaacatcataaaatttttatatatatagtttatttttgtgggagataaattttataggactgttctttgctgttgttggtcgcagctacataagactggacatttaacttttctaccatttctgcaagttaggtatgtttgcaggagaaaagtatcaagacgtttaactgcagttgactttctccctgttcctttgagtgtcttctaactttattctttgttctttatgtagaattgctgtctatgattgtactttgaatcgcttgcttgttgaaaatatttctctagtgtattatcactgtctgttctgcacaataaacataacagcctctgtga

SEQ ID NO: 3700 - DNA, 723 bp, Homo sapiens
ccttctcacctaacgccaccaacatggtgttcaggcgcttcgtggaggttggccgggtggcctatgtctcctttggacctcatgccggaaaattggtcgcgattgtagatgttattgatcagaacagggctttggtcgatggaccttgcactcaagtgaggagacaggccatgcctttcaagtgcatgcagctcactgatttcatcctcaagtttccgcacagtgcccgccaaaagtatgtccaacaagcctggcagaaggcagacatcaatacaaaatgggcagccacacgatgggccaagaagattgaagccagagaaaggaaagccaagatgacagattttgatcgttttaaagttatgaaggcaaagaaaacgaggaacagaataatcaagaatgaagttaagaagcttcaaaaggcagctctcctgaaagcttctcccaaaaaagcacctggtactaagggtactgctgctgctgctgctgctgctgctgctgctaaagttccagcaaaaaagatgacggccgcgagtaaaaaggcttcagcccagaaggttcctgcccagaaagccacaggccagaaagcagcacctgctccaaaagctcagaagggtcaaaaagctccagcccagaaagcacctgctccaaaggcatctggcaagaaagcataagtggcaatcataaaaagtaataaaggttctttttgacctgttggcaaatgta

SEQ ID NO: 3701 - protein, 215 aa, Homo sapiens [sequence omitted]

SEQ ID NO: 3702 - DNA, 872 bp, Homo sapiens
gaacgcctctgtgtttgaaacaaacattcgagtggtaggaggactcctgtctgctcatctgctctccaagaaggctggggtggaagtagaggctggatggccctgttccgggcctctcctgagaatggctgaggaggcggcccgaaaactcctcccagcctttcagacccccactggcatgccatatggaacagtgaacttacttcatggcgtgaacccaggagagacccctgtcacctgtacggcagggattgggaccttcattgttgaatttgccaccctgagcagcctcactggtgacccggtgttcgaagatgtggccagagtggctttgatgcgcctctgggagagccggtcagatatcgggctgagtataacaaagccatccggaactacacccgcttcgatgactggtacctgtgggttcagatgtacaaggggactgtgtccatgccagtcttccagtccttggaggcctactggcctggtcttcagagcctcattggagacattgacaatgccatgaggaccttcctcaactactacactgtatggaagcagtttggggggctcccggaattctacaacattcctcagggatacacagtggagaagcgagagggctacccacttcggccagaacttattgaaagcgcaatgtacctctaccgtgccacgggggatcccaccctcctagaactcggaagagatgctgtggaatccattgaaaagctggacaaccgcatggagtcgttcttcctggccgagactgtgaaatacctctacctcctgtttgacccaaccaacttcatccacaacaatgggtccaccttcgacgcggtgatcaccccctatggggagtgcatcctggg

SEQ ID NO: 3703 - protein, 133 aa, Homo sapiens
MAEEAARKLLPAFQTPTGMPYGTVNLLHGVNPGETPVTCTAGIGTFIVEFATLSSLTGDPVFEDVARVALMRLWESRSDIGLSITKPSGTTPASMTGTCGFRCTRGLCPCQSSSPWRPTGLVFRASLETLTMP

SEQ ID NO: 3704 - DNA, 1614 bp, Homo sapiens
caaatttttatcaaagttaatggatcagttagaagctctaaagaagcagttgggtgataatgaagctattactcaagaaatagtgggctgtgcccatttggagaattatgctttgaaaatgtttttgtatgcagacaatgaagatcgtgctggacgatttcacaaaaacatgatcaagtccttctatactgcaagtcttttgatagatgtcataacagtatttggagaactcactgatgaaaatgtgaaacacaggaagtatgccagatggaaggcaacatacatccataattgtttaaagaatggggagactcctcaagcaggccctgttggaattgaagaagataatgatattgaagaaaatgaagatgctggagcagcctctctgcccactcagccaactcagccatcatcatcttcaacttatgacccaagcaacatgccatcaggcaactatactggaatacagattcctccgggtgcacacgctccagctaatacaccagcagaagtgcctcacagcacaggtgtagcaagtaatactatccaacctactccacagactatacctgccattgatcccgcacttttcaatacaatttcccagggggatgttcgtctaaccccagaagactttgctagagctcagaagtactgcaaatatgctggcagtgctttgcagtatgaagatgtaagcactgctgtccagaatctacaaaaggctctcaagttactgacgacaggcagagaatgaagcctttgtatgacagacccatgtatttttggcatgaggaactaacagtccattactctatcttcagcctatcaggatcacattttcattgtccatttactagattcaatcgtctctgagtatatagggctgatgttagcaagaccctaaaaatgtccattgaaccctgcttcaaaaaatgaaaacacacctctataaaatgtgtactgggaataagctttgtatttacatacattaggggaattttttaaaatctgtaatgtttggacaaacagatgatattactttgctataaaattataaatgtaacttttaataaagatagccagaatattctaaattagaaattacgtttttgtttccctcaagacataaaacaaatataaacattctaaactgctggatgaatctgaaaagacattaagttcaaattttaatttattctcatattaaatataactccattaaaagtttaaaatttcatgggagaaaatataataaggtaaagaggtagaatcactttcagacttaagaataatgttgatttcccaagtgctttaccttatctgttaaagcgtaagatgaattggtatttgcttcataggcagtttgactgcatgtattagagaatgaaaagaagatatttgtagtaatgcctggaaacttggtgctttaaattaaggtactcctctgctgctgtagaatggattccacacagtggatagctatgggtgattcagaatattatgtttagattcccatttgttaagtttataagttttgtggggaattatgaacttactgtgtactacctgcatttgtgctgtgtgaaaaataaatacaaggattcgtttagctaa

SEQ ID NO: 3705 - DNA, 1448 bp, Homo sapiens
gtgagcgccgggctcggggcccccccggccgccagccccttcccttccctccatcccatcccctcccctcccccccgggccccgcgccccccccgcccccgccccccccatggacatgctggacccgggtctggatcccgctgcctcggccaccgctgctgccgccgccagccacgacaagggacccgaggcggaggagggcgtcgagctgcaggaaggcggggacggcccaggagcggaggagcagacagcggtggccatcaccagcgtccagcaggcggcgttcggcgaccacaacatccagtaccagttccgcacagagacaaatggaggacaggctgtgatccaaaatcccttcagcaatggtggcagtccggcggccgaggctgtcagcggggaggcacgatttgcctatttcccagcgtccagtgtgggagatactacggctgtgtccgtacagaccacagaccagagcttgcaggctggaggccagttctacgtcatgatgacgccccaggatgtgcttcagacaggaacacagaggacgatcgccccccggacacacccttactctccaaaaattgatggaaccagaacaccccgagatgagaggagaagagcccagcacaacgaagtggagcggaggcggagggacaagatcaacaactggatcgtccagctttcgaaaatcattccagactgtaacgcagacaacagcaagacgggagcgagtaaaggagggatcctgtccaaggcctgcgattacatccgggagttgcgccagaccaaccagcgcatgcaggagaccttcaaagaggccgagcggctgcagatggacaacgagctcctgaggcagcagatcgaggagctgaagaatgagaacgccctgcttcgagcccagctgcagcagcacaacctggagatggtgggcgagggcacccggcagtgacgcccgccaccaccacgcagccgccgccgcccacgccggcctctgctgcccccttccccagcccttagcacagagagggacacatgcccctcccccagctgcgtttttttatagtagatttttaacaaaaaacggggagaaataatgcatttctgtggatacagtgcccaccgccctcctccacttggaaacggtatcctccctgcccatccgtctgtctgtcgcccttctcccggccctcactaagccccggcacttctagtggtctcacctggaggcaagagggaggggacagaggccctgccacgtcccgctgcctcctgctctctggaggtactgagacagggtgctgatgggaaggaggggagcctttggggggccacccggggcctggacctatgcagggaggccacgtcccaccccacctcttgtttctgggtccctgctcccctttgggggtgtgtgtgtgtgttttaattttctttatggaaaaattgac

SEQ ID NO: 3706 - protein, 279 aa, Homo sapiens
MDMLDPGLDPAASATAAAAASHDKGPEAEEGVELQEGGDGPGAEEQTAVAITSVQQAAFGDHNIQYQFRTETNGGQAVIQNPFSNGGSPAAEAVSGEARFAYFPASSVGDTTAVSVQTTDQSLQAGGQFYVMMTPQDVLQTGTQRTIAPRTHPYSPKIDGTRTPRDERRRAQHNEVERRRRDKINNWIVQLSKIIPDCNADNSKTGASKGGILSKACDYIRELRQTNQRMQETFKEAERLQMDNELLRQQIEELKNENALLRAQLQQHNLEMVGEGTRQ

SEQ ID NO: 3707 - DNA, 1857 bp, Homo sapiens
cgattgttggtgacagcgaaagaacgataacaaaatgccggagcgagatagtgagccgttctccaaccctttggcccccgatggccacgatgtggatgatcctcactccttccaccaatcaaaactcaccaatgaagacttcaggaaacttctcatgacccccagggctgcacctacctctgcaccaccttctaagtcacgtcaccatgagatgccaagggagtacaatgaggatgaagacccagctgcacgaaggaggaaaaagaaaagttattatgccaagctacgccaacaagaaattgagagagagagagagctagcagagaagtaccgggatcgtgccaaggaacggagagatggagtgaacaaagattatgaagaaaccgagcttatcagcaccacagctaactatagggctgttggccccactgctgaggcggacaaatcagctgcagagaagagaagacagttgatccaggagtccaaattcttgggtggtgacatggaacacacccatttggtgaaaggcttggattttgctctgcttcaaaaggtacgagctgagattgccagcaaagagaaagaggaagaggaactgatggaaaagccccagaaagaaaccaagaaagatgaggatcctgaaaataaaattgaatttaaaacacgtctgggccgcaatgtttaccgaatgctttttaagagcaaagcatatgagcggaatgagttgttcctgccgggccgcatggctagtgtggtagacctggatgatgagtatgctgacacagatatccccaccactcttatccgcagcaaggctgattgccccaccatggaggcccagaccacactgaccacaaatgacattgtcattagcaagctgacccagatcctttcatacctgaggcagggaacccgtaacaagaagcttaagaagaaggataaagggaagctggaagagaagaaacctcctgaggctgacatgaatatttttgaagacattggggattacgtaccctccacaaccaagacacctcgggacaaggagcgggagagatatcgggaacgggagcgtgatcgggaaagagacagagaccgtgaccgagagcgagagcgagaacgagatcgggaacgagagcgagagcgggaccgagagagagaagaggaaaagaagagacacagctactttgagaagccaaaagtagatgatgagcccatggacgttgacaaaggacctgggtctaccaaggagttgatcaagtccatcaatgaaaagtttgctgggtctgctggctgggaaggcacagaatcgctgaagaagccagaagacaaaaagcagctgggagatttctttggcatgtccaacagttatgcagagtgctacccagccacgatggatgacatggctgtggatagtgatgaggaggtggattatagcaaaatggaccagggtaacaagaaggggcccttaggccgttgggactttgatacccaggaagaatacagcgagtatatgaacaacaaagaagctttgcccaaggctgcattccagtatggtatcaaaatgtctgaagggcggaaaaccaggcgcttcaaggaaaccaatgacaaagcagagcttgatcgccagtggaagaagattagtgcaatcattgagaagaggaagaagatggaagctgatggggttgaagtcaaaagaccaaaatactaatcactagttacaaccagagatgctccacaaggatatgctccccactgttttctttctacaatttccaaaggttgcaagatgtttttttgtggatgaatataaaattttattgtgtaattacttggttccattaaaattggttaacttgc

SEQ ID NO: 3708 - DNA, 1587 bp, Homo sapiens
gctggatggggagagctgtatggacgctcaggctacaactattttttctcagggggtgcagatgatgcctgggcagatgtggaggacgtcacggaggaggactgtgctcttcgaagtggtgacacgcatctttttgataaggtcagaggctatgacatcaagctgcttcgatacctgtcagtcaaatacatctgtgacctgatggtggagaacaagaaggtgaagtttggcatgaatgtaacctcctctgagaaggtggacaaagcccagcgctatgccgacttcactctcctctccatcccgtatccaggctgtgaatttttcaaggaatataaagatcgggattacatggcagaagggctcatatttaactggaagcaggactacgttgatgccccattgagcatccccgacttcctgactcactctctgaacattgactggagccagtatcagtgttgggatctggtgcaacaaacacaaaactacctgaagctgctgctttccttagttaacagtgatgatgacagcgggctgctggtacactgtatctcaggctgggatcggacccccctcttcatctccctcctgcgcctttccttgtgggctgatgggctcatccacacgtccctgaagcccactgagatcctctacctcactgtggcctatgactggttcctcttcgggcacatgttggtagatcggctcagcaaaggggaggagattttcttcttctgcttcaattttttgaagcatattacctccgaggagttctctgctctgaagacccagaggaggaagagtttgccagcccgggatggaggcttcaccctggaagacatctgcatgctgagacgaaaggaccgtggcagcaccaccagccttggcagcgacttctccctggtcatggagagttccccaggagccactgggagcttcacctatgaggccgtggagctggtcccagcaggagcgccaactcaggcagcttggcttgcagccctgagtgatcgagagactcgctgcaggaggtgcgctcagccttcttggctgcgtacagcagcacagtggggcttcgggcagtagcccccagtccttccggtgccatcgggggcctgctggagcaatttgcccgtggtgttggactccggagcatcagcagcaatgccttgtgaagaagccagcccatgacattttcctgctcctctctcagctgagcccttagcagagaatcaaagccatgcctggccgaaggggtacttccaggtcaggggaaatttcagtcccccatctccatcatgaacatggcagccccaaagctgagcaaggccaaagacagggttttccaacccccagcctcttgactggtgaccaccaccccttcttgtcactgtctcccacccaccccatctttgctgggattcccatcaactctcagaactgtgtggggtttccctggggccttgtggaagccatgacttcacaaagaccctacctgtcagttcttgtttctggggaggagggatcacctgcactgagaatgaggcagtttgacacagatcacaaaataaaatcaaagtctttttg

SEQ ID NO: 3709 - protein, 294 aa, Homo sapiens
MVENKKVKFGMNVTSSEKVDKAQRYADFTLLSIPYPGCEFFKEYKDRDYMAEGLIFNWKQDYVDAPLSIPDFLTHSLNIDWSQYQCWDLVQQTQNYLKLLLSLVNSDDDSGLLVHCISGWDRTPLFISLLRLSLWADGLIHTSLKPTEILYLTVAYDWFLFGHMLVDRLSKGEEIFFFCFNFLKHITSEEFSALKTQRRKSLPARDGGFTLEDICMLRRKDRGSTTSLGSDFSLVMESSPGATGSFTYEAVELVPAGAPTQAAWLAALSDRETRCRRCAQPSWLRTAAQWGFGQ

SEQ ID NO: 3710 - DNA, 1602 bp, Homo sapiens
acgagaagtagtcgtttatgctccactttcaaagaagcaggagatcttttatacagccattgtgaaccgtacaattgcaaacatgtttggatccagtgagaaagaaacaattgagttaagtcctactggtcgaccaaaacgacgaactagaaaatcaataaattacagcaaaatagatgatttccctaatgaattggaaaaactgatcagtcaaatacagccagaggtggaccgagaaagagctgttgtggaagtgaatatccctgtagaatctgaagttaatctgaagctgcagaatataatgatgctacttcgtaaatgttgtaatcatccatatttgattgaatatcctatagaccctgttacacaagaatttaagatcgatgaagaattggtaacaaattctgggaagttcttgattttggatcgaatgctgccagaactaaaaaaaagaggtcacaaggtgctgcttttttcacaaatgacaagcatgttggacattttgatggattactgccatctcagagatttcaacttcagcaggcttgatgggtccatgtcttactcagagagagaaaaaaacatgcacagcttcaacacggatccagaggtgtttatcttcttagtgagtacacgagctggtggcctgggcattaatctgactgcagcagatacagttatcatttatgatagtgattggaacccccagtcggatcttcaggcccaggatagatgtcatagaattggtcagacaaagccagttgttgtttatcgccttgttacagcaaatactatcgatcagaaaattgtggaaagagcagctgctaaaaggaaactggaaaagttgatcatccataaaaatcatttcaaaggtggtcagtctggattaaatctgtctaagaatttcttagatcctaaggaattaatggaattattaaaatctagagattatgaaagggaaataaaaggatcaagagagaaggtcattagtgataaagatctagagttgttgttagatcgaagtgatcttattgatcaaatgaatgcttcaggaccaattaaagagaagatggggatattcaagatattagaaaattctgaagattccagtcctgaatgtttgttttaaagtggagctcaagaatagcttttaaaagttcttatttacatctagtgatttccctgtattgggtttgaaatactgattgtccacttcaccttttttattatatcagttgacatgtaactagtaccatgcgtacttaaatagatggtaattttctgagccttaccaagaacaaagaagtatccatattaagtttagattttcagttaatttttgagactgagtagtattcttggatacaggctgatgtgtacttaaccacttccagatttatacagtcttcctgtggaagtttagtaaatgtctttttccctcctttcttctagtaatgcagttcatgggctttaggtacttcagttatgaagtaggcttttcatggggagagattgggattatgctctctgttgtttaagaaactgtttgattttagagtctatttctatgagatagtttaccaaataaatgttccttataag

SEQ ID NO: 3711 - protein, 348 aa, Homo sapiens
MFGSSEKETIELSPTGRPKRRTRKSINYSKIDDFPNELEKLISQIQPEVDRERAVVEVNIPVESEVNLKLQNIMMLLRKCCNHPYLIEYPIDPVTQEFKIDEELVTNSGKFLILDRMLPELKKRGHKVLLFSQMTSMLDILMDYCHLRDFNFSRLDGSMSYSEREKNMHSFNTDPEVFIFLVSTRAGGLGINLTAADTVIIYDSDWNPQSDLQAQDRCHRIGQTKPVVVYRLVTANTIDQKIVERAAAKRKLEKLIIHKNHFKGGQSGLNLSKNFLDPKELMELLKSRDYEREIKGSREKVISDKDLELLLDRSDLIDQMNASGPIKEKMGIFKILENSEDSSPECLF

SEQ ID NO: 3712 - DNA, 1010 bp, Homo sapiens
acttccggtcggcgtgagcgtgaggtgtgggtgttcgtttctcaggtaaaacatggctaaaagcttacggagtaagtggaaaagaaagatgcgtgctgaaaagagaaaaaagaatgccccaaaggaggccagcaggcttaaaagtattctcaaactagacggtgatgttttaatgaaagatgttcaagagatagcaactgtggtggtacccaaacccaaacattgccaagagaaaatgcaatgtgaggtaaaagatgaaaaagatgacatgaaaatggagactgatattaagagaaacaaaaagactcttctagaccagcatggacagtacccaatatggatgaaccaaaggcaaagaaaaaggctgaaggcaaagcgagagaaaagaaaggggaaaagcaaagcaaaagcagtgaaagtggcaaagggtttggcctggtagactcttaaaaccttggaaaatgccacatgggatagatgacggattagaatgtatacacatgtatactttgatttcaactgccaccaaatgaaaaccatttgttttcctattttaacttggccttttttcttcaattcaaacccagcataactcctcaagtttgttttgggaacttgaataaaatattttctttgatacatccaagctctactgatactttaactggatgctacccaatatccagttataatcaggcctcaacgttctgtcaggtattaatatggttagaattgttcttacaactggtaattatagtcaatagagataaaacagatgatgtactgacaaatttttgtgaacttagattttaaagaaagttgttgtataatcatatcatttaaaaatactacattagggctgggcatggtggctcacacctgtaatcccagcactttgggaggccgaggcaggtggatcacgaggtcagttcgagactagcctggctaatacagtgaaaccccatctctactaaaaatacaaaaaaaaaaaaaaaaaaaaaaaaaaaaaa

SEQ ID NO: 3713 - protein, 129 aa, Homo sapiens
MAKSLRSKWKRKMRAEKRKKNAPKEASRLKSILKLDGDVLMKDVQEIATVVVPKPKHCQEKMQCEVKDEKDDMKMETDIKRNKKTLLDQHGQYPIWMNQRQRKRLKAKREKRKGKSKAKAVKVAKGLAW

SEQ ID NO: 3714 - DNA, 5820 bp, Homo sapiens
gggagcgagtgcggagcgagtgggagcgagacggccctgagtggaagtgtctggctccccgtagaggcccttctgtacgccccgccgcccatgagctcgttctcacgcgaacagcgccgtcgttaggctggctctgtagcctcggcttaccccgggacaggcccacgcctcgccagggagggggcagcccgtcgaggcgcctccctagtcagcgtcggcgtcgcgctgcgaccctggaagcgggagccgccgcgagcgagaggaggagctccagtggcggcggcggcggcggcagcggcagcgggcagcagctccagcagcgccagcaggcgggatcgaggccgtcaacatggcgagcgcctcgtaccacatttccaatttgctggaaaaaatgacatccagcgacaaggactttaggtttatggctacaaatgatttgatgacggaactgcagaaagattccatcaagttggatgatgatagtgaaaggaaagtagtgaaaatgattttgaagttattggaagataaaaatggagaggtacagaatttagctgtcaaatgtcttggtcctttagtgagtaaagtgaaagaataccaagtagagacaattgtagataccctctgcactaacatgctttctgataaagaacaacttcgagacatttcaagtattggtcttaaaacagtaattggagaacttcctccagcttccagtggctctgcattagctgctaatgtatgtaaaaagattactggacgtcttacaagtgcaatagcaaaacaggaagatgtctctgttcagctagaagccttggatattatggctgatatgttgagcaggcaaggaggacttcttgttaatttccatccttcaattctgacctgtctacttccccagttgaccagccctagacttgcagtgaggaaaagaaccattatcgctcttggccatctggttatgagctgtggaaatatagtttttgtagatcttattgaacatctgttgtcagagttgtccaaaaatgattctatgtcaacaacaagaacctacatacaatgtattgctgctattagtaggcaagctggtcatagaataggtgaataccttgagaagataattcctttggtggtaaaattttgcaatgtagatgatgatgaattaagagagtactgtattcaagcctttgaatcatttgtaagaagatgtcctaaggaagtatatcctcatgtttctaccattataaatatttgtcttaaatatcttacctatgatccaaattataattacgatgatgaagatgaagatgaaaatgcaatggatgctgatggtggtgatgatgatgatcaagggagtgatgatgaatacagtgatgatgatgacatgagttggaaagtgagacgtgcagctgcgaagtgcttggatgctgtagttagcacaaggcatgaaatgcttccagaattctacaagaccgtctctcctgcactaatatccagatttaaagagcgtgaagagaatgtaaaggcagatgtttttcacgcatacctttctcttttgaagcaaactcgtcctgtacaaagttggctatgtgaccctgatgcaatggagcagggagaaacacctttaacaatgcttcagagtcaggttcccaacattgttaaagctcttcacaaacagatgaaagaaaaaagtgtgaagacccgacagtgttgttttaacatgttaactgagctggtaaatgtattacctggggccctaactcaacacattcctgtacttgtaccaggaatcattttctcactgaatgataaatcaagctcatcgaatttgaagatcgatgctttgtcatgtctatacgtaatcctctgtaaccattctcctcaagtcttccatcctcacgttcaggctttggttcctccagtggtggcttgtgttggagacccattttacaaaattacatctgaagcacttcttgttactcaacagcttgtcaaagtaattcgtcctttagatcagccttcctcgtttgatgcaactccttatatcaaagatctatttacctgtaccattaagagattaaaagcagctgacattgatcaggaagtcaaggaaagggctatttcctgtatgggacaaattatttgcaaccttggagacaatttgggttctgacttgcctaatacacttcagattttcttggagagactaaagaatgaaattaccaggttaactacagtaaaggcattgacactgattgctgggtcacctttgaagatagatttgaggcctgttctgggagaaggggttcctatccttgcttcatttcttagaaaaaaccagagagctttgaaactgggtactctttctgcccttgatattctaataaaaaactatagtgacagcttgacagctgccatgattgatgcagttctagatgagctcccacctcttatcagcgaaagtgatatgcatgtttcacaaatggccatcagttttcttaccactttggcaaaagtatatccctcctccctttcaaagataagtggatccattctcaatgaacttattggacttgtgagatcacccttattgcaggggggagctcttagtgccatgctagactttttccaagctctggttgtcactggaacaaataatttaggatacatggatttgttgcgcatgctgactggtccagtttactctcagagcacagctcttactcataagcagtcttattattccattgccaaatgtgtagctgcccttactcgagcatgccctaaagagggaccagctgtagtaggtcagtttattcaagatgtcaagaactcaaggtctacagattccattcgtctcttagctctactttctcttggagaagttgggcatcatattgacttaagtggacagttggaactaaaatctgtaatactagaagctttctcatctcctagtgaagaagtcaaatcagctgcatcctatgcattaggcagcattagtgtgggcaaccttcctgaatatctgccgtttgtcctgcaagaaataactagtcaacccaaaaggcagtatcttttacttcattccttgaaggaaattattagctctgcatcagtggtgggccttaaaccatatgttgaaaacatctgggccttattactaaagcactgtgagtgtgcagaggaaggaaccagaaatgttgttgctgaatgtctaggaaaactcactctaattgatccagaaactctccttccacggcttaaggggtacttgatatcaggctcatcatatgcccgaagctcagtggttacggctgtgaaatttacaatttctgaccatccacaacctattgatccactgttaaagaactgcataggtgatttcctaaaaactttggaagacccagatttgaatgtgagaagagtagccttggtcacatttaattcagcagcacataacaagccatcattaataagggatctattggatactgttcttccacatctttacaatgaaacaaaagttagaaaggagcttataagagaggtagaaatgggtccatttaaacatacggttgatgatggtctggatattagaaaggcagcatttgagtgtatgtacacacttctagacagttgtcttgatagacttgatatctttgaatttctaaatcatgttgaagatggtttgaaggaccattatgatattaagatgctgacatttttaatgttggtgagactgtctaccctttgtccaagtgcagtactgcagaggttggaccgacttgttgagccattacgtgcaacatgtacaactaaggtaaaggcaaactcagtaaagcaggagtttgaaaaacaagatgaattaaagcgatctgccatgagagcagtagcagcactgctaaccattccagaagcagagaagagtccactgatgagtgaattccagtcacagatcagttctaaccctgagctggcggctatctttgaaagtatccagaaagattcatcatctactaacttggaatcaatggacactagttagatgtttgttcaccatggggaccattacatatgaccatacaatgcactgaattgacaggttaatcataagacatggaaagagaagtgtctaaaagcttcaaaatgttccacttttttttccttcatggagactgtttgtttggctttcttccattgttgtttttgtagcatttatttcagaaatgtgtatttccataatccagaggttgtaaaaccactagtgttttagtggttacagcaacatttgaaatggaaactaaaagttaggattttatggagtatggagatagggtccagtatctatttaccctgtaatgtttaggattaaaatgttaaaattttgtgaccatgaatttctttcttttataaattttctcatttaaaaatcaaaaatcttgcaaaacaaaaaccatgtttctttttcttgtataactttttgttttcagcaacataaattgatttttagctggcagacaagaatatccatataagatttgttaaccatttcagagagtttggcaatttttaaaagataataaggtatcatttttaagtatgaaaattaacaatatccctgttgcgcacactaattttgcatgagtaagtttacaaatatgtatcgtctgtaaagcagcatgtgcagattattcataatatagaagttaaaataagtattagtgcaattttcagatatttatttttgcacagaaaacacattatctggagagaaagaaaggagaatttttgagacttgggttttcttaatgccagtgtgaatttgcagatgttttcagaaaatcaagtcacagtaacaatttgccacttttttctattataaatcttcttacttaaattttgaatatttagtttttctcagttacccatttgtgtgtgtgtgattccacttagaaattcttaaaaccagatttttctttcattccgtttggatgtctacattccttatcaaaggatataaatactgtgtatgcttttgaattttatttttaggaaaattctgaagccagctatcacaggtttgttagctaataatagtattttcttttagttgagttaggtttttccccatctcctgtagagcgaatttacatattgtattgggtaagtgttcactacttttcctgattaagggatctgtgctggggaacaaagcttttgcagtaccttatattgtagttaaaattttatttaacatatccttcagtgagctcatttcacactgtagcctcttccttaaaatttgtggtgctcctgtaacagtaagaactaattctgaaataaaagacatctcctaatgctgtgcaaacatagtttacatgtattgaaggaggcagttgttaaattgagtgaccaatttaagcaatcagatatttgaaaactgcaccctttagttttgaaactgtgaattagaaacacttttcctgctgtattactacctgctttaacatccaaatatacagtgattttaaatgataacatactgtggttattagattaacagcttgattttgaatgttcagatgataatgcagaagacatcacttctagtaaggattttgactagtgcattgatgttgaagttggtgccatttcaaaatgtggcaggtgataatcttttaccataatttgcataaaactgtaatagaagtttattttgagatgttagtatattatgtactatgcatttctgtggtatagatgttgtggatatatttaagtatttggttacatggttttacaataaattacaatactgcaggc

SEQ ID NO: 3715 - DNA, 1969 bp, Homo sapiens
ctggcttacagggcggcggcggggtgtgtgtcctctgttaagagtgctactcgcccggggttgatctgtgcatgccactcctgggtcagacggtgaggtcggcgtctgcgaggacgcggcggtggagtagaagggcagccggagacaggcccggcgccccttccgaggctagacggccccagcttcgcggggatcatggcattgctggtggaccgagtgcggggccactggcgaatcgccgccgggctcctgttcaacctgctggtgtccatctgcattgtgttcctcaacaaatggatttatgtgtaccacggcttccccaacatgagcctgaccctggtgcacttcgtggtcacctggctgggcttgtatatctgccagaagctggacatctttgcccccaaaagtctgccgccctccaggctcctcctcctggccctcagcttctgtggctttgtggtcttcactaacctttctctgcagaacaacaccataggcacctatcagctggccaaggccatgaccacgccggtgatcatagccatccagaccttctgctaccagaaaaccttctccaccagaatccagctcacgctgattcctataactttaggtgtaatcctaaattcttattacgatgtgaagtttaatttccttggaatggtgtttgctgctcttggtgttttagttacatccctttatcaagtgtgggtaggagccaaacagcatgaattacaagtgaactcaatgcagctgctgtactaccaggctccgatgtcatctgccatgttgctggttgctgtgcccttctttgagccagtgtttggagaaggaggaatatttggtccctgctataacatgttcggacacttcaagttctgcattactttattcggaggatatgttttatttaaggatccactgtccattaatcaggcccttggcattttatgtacattatttggcattctcgcctatacccactttaagctcagtgaacaggaaggaagtaggagtaaactggcacaacgtccttaattgggtttttgtggagaaaagaatgttgtcccaagaagataaaaaatattgttaagtgtgcaagttattaaaaaaaaaaaattgggccaggcacggtggctcacgcctgtaatcccagcactttgggaggccaaggccagcggatcacttgaggtcaggagttcgagaccagcctgaccaacatggagaaaccctgtctcaactaataatacaaaattagccaggcgtggtggcgcatgcctgtaatcccagctactcgggaggctgaggcaggagaatcacttgaacccgggaggcggcggttgcagtgagccgagatcgtaccattgcactccagcctgggcaacaagagcgaaactccatttcaaaaaaaaaaaattggtgacagactcaatgatggaatgatttgtcggaattaacacaaagcagattttattcatataatgacttttttttaagagtctcttttttaaaaaaacttaattctctaaaaccgaaatggttcatgcttctttttaaaaatgattgtataaaatgtatggaatggttagcctggtgtggtggtgcacacctgtaatcccagctacttgggagactgagacatgagaatcgcttgagcctgggaggcggaggttgcaatgagccaagatcgtaccactgcactccagcctgggcgacagagcaagacactgtctctctctctctctccatatatatatgtgtgtgtgtgtatatatatatatatgtgtgtgtgtgtgtgtgtatacatatatacacatatatacacacacacatacatatacatgtgtatatatataccatcccatatatatgtgggatatatatatatatatatatggatatggttatatatatgggaatggtttggggttggtcccagctgagtatagacaattaaattacgtgataa

SEQ ID NO: 3716 - protein, 129 aa, Homo sapiens [sequence omitted]

SEQ ID NO: 3717 - DNA, 3131 bp, Homo sapiens
gttttagggacagactgcttccgggtcgaagggcttgcttccggagagcgggaaggctaaaacgcggtagctaaactgcagccaactttggttgtgtgtggaaaaggctttagccatggacaggagtggctttggagagatatcatcccctgtaatccgggaggcagaggtgacacggactgcacggaaacagagtgctcagaaaagagttttacttcaggcatctcaagatgaaaattttggtaatactacaccaagaaaccaggttatccctcgaactcctagctcatttcgacagccttttaccccaacaagccgaagcttactaaggcagccagatatttcctgcattcttggaacaggagggaagtcgccccgacttacgcagtcttcagggttctttggaaatctctccatggttactaatctggatgacagtaactgggcagctgcattttcatcacagcgttccgggctgttcacaaacacagagccccacagtataacagaagatgtaactatcagtgctgttatgttacgtgaggatgatcctggagaagctgcatccatgagtatgttttctgatttcctgcagtcttttctgaagcactcttcgagtacagtttttgatcttgtggaagagtatgaaaacatctgtggtagtcaggtgaatatactgagtaaaatagtgagtcgagcaacacctggacttcaaaaattttcaaaaacagccagtatgctctggcttcttcaacaggagatggtcacatggaggctgctggcttctttgtatagagacagaatacagtctgcattagaagaggaaagtgtattcgcagttactgctgttaatgccagtgaaaaaacagttgtggaagcgttatttcagagggattcacttgttcgacaaagtcagctggtggtagattggttagagagtattgccaaagatgaaattggagaattttctgataatattgagttttatgcaaaatcagtatattgggaaaatactctgcataccttaaaacaacggcagctgacttcttacgttggaagtgttcgtccgcttgtcactgaattggaccctgatgctcccataagacagaaaatgccccttgatgatctggatagagaagatgaagttagattactcaaatatctctttactctaatccgtgctggaatgacagaagaggcacaacgactctgtaaacgctgtggtcaagcatggagagctgcaacacttgaaggctggaaactgtaccatgaccctaatgttaatggaggaacagaattagaacctgttgaagggaatccatatagacgcatttggaaaataagttgctggagaatggcagaagatgagctttttaatagatacgagagagcaatttatgcagctttaagtgggaatcttaagcagctgcttcctgtctgtgacacctgggaagacacagtttgggcctacttccgggtgatggtggacagtctggtagaacaggagatccagacatcagtagcaactctggatgaaactgaagaactccctagagaatatctgggagcaaactggacgttagaaaaggtttttgaggaacttcaagctactgacaaaaagagagttctggaagagaatcaagaacattatcatatagttcaaaagtttcttatcctgggagacattgatggtttgatggatgagtttagcaaatggctttccaaaagcagaaacaatctacctggacacctgcttcgctttatgactcaccttattttgtttttccgtactctgggactacagaccaaggaggaagtttctattgaagttttaaagacatacatacagcttttaataagagagaaacatacaaatcttatagcattttatacctgtcatttgcctcaagacctagctgttgcccagtatgcattatttttggaaagtgttacagaatttgaacagcgccaccattgcctggagttggctaaagaagcagatttggatgttgcaacaataacaaaaactgtagttgagaatattcgaaagaaagataatggtgaatttagtcatcatgacctggccccagccctagatactggcactactgaggaggatcgtttaaaaattgatgtaattgactggttggtatttgacccagcgcagagggcagaagcactgaaacaaggcaatgcaattatgagaaaattcttggcatcaaaaaagcacgaagctgcaaaagaagtatttgtgaaaattcctcaggattctatagcagaaatctataatcagtgcgaggaacaaggaatggaaagtccacttcctgctgaagatgataatgctatccgagaacatttgtgcatcagagcttatttggaagcccatgaaacctttaatgagtggtttaagcatatgaattcagttccacaaaaacctgctttgatacctcaaccaacttttactgagaaagtggctcatgaacacaaagaaaagaaatatgaaatggattttggtatttggaaagggcatttggatgccctaactgctgatgtgaaggagaaaatgtataacgtcttgttgtttgttgatggagggtggatggtggatgttagagaggatgccaaagaagaccatgaaagaacacatcaaatggtcttactgagaaagctttgtctgccaatgttgtgttttctgcttcatacgatattgcacagtactggtcagtatcaggaatgcctacagttagcagatatggtatcctctgagcgccacaaactgtacctggtattttctaaggaagagctaaggaagttgctgcagaagctcagagagtcctctctaatgctcctagaccagggacttgacccattagggtatgaaattcagttatagtttaatctttgtaatctcactaattttcatgataaatgaagtttttaataaaatatacttgttattagtaattttttcttttgcattaccatgtaaaatttagacatttgaattttgtacttttcagaatattatcgtgacactttcaacatgtagggatatcagcgtttctctgtgtgcttgttaataaaactatataaaaattaaaattttctgtttttacaaaaaaaaaaaaaaa

SEQ ID NO: 3718 - protein, 925 aa, Homo sapiens
MDRSGFGEISSPVIREAEVTRTARKQSAQKRVLLQASQDENFGNTTPRNQVIPRTPSSFRQPFTPTSRSLLRQPDISCILGTGGKSPRLTQSSGFFGNLSMVTNLDDSNWAAAFSSQRSGLFTNTEPHSITEDVTISAVMLREDDPGEAASMSMFSDFLQSFLKHSSSTVFDLVEEYENICGSQVNILSKIVSRATPGLQKFSKTASMLWLLQQEMVTWRLLASLYRDRIQSALEEESVFAVTAVNASEKTVVEALFQRDSLVRQSQLVVDWLESIAKDEIGEFSDNIEFYAKSVYWENTLHTLKQRQLTSYVGSVRPLVTELDPDAPIRQKMPLDDLDREDEVRLLKYLFTLIRAGMTEEAQRLCKRCGQAWRAATLEGWKLYHDPNVNGGTELEPVEGNPYRRIWKISCWRMAEDELFNRYERAIYAALSGNLKQLLPVCDTWEDTVWAYFRVMVDSLVEQEIQTSVATLDETEELPREYLGANWTLEKVFEELQATDKKRVLEENQEHYHIVQKFLILGDIDGLMDEFSKWLSKSRNNLPGHLLRFMTHLILFFRTLGLQTKEEVSIEVLKTYIQLLIREKHTNLIAFYTCHLPQDLAVAQYALFLESVTEFEQRHHCLELAKEADLDVATITKTVVENIRKKDNGEFSHHDLAPALDTGTTEEDRLKIDVIDWLVFDPAQRAEALKQGNAIMRKFLASKKHEAAKEVFVKIPQDSIAEIYNQCEEQGMESPLPAEDDNAIREHLCIRAYLEAHETFNEWFKHMNSVPQKPALIPQPTFTEKVAHEHKEKKYEMDFGIWKGHLDALTADVKEKMYNVLLFVDGGWMVDVREDAKEDHERTHQMVLLRKLCLPMLCFLLHTILHSTGQYQECLQLADMVSSERHKLYLVFSKEELRKLLQKLRESSLMLLDQGLDPLGYEIQL

SEQ ID NO: 3719 - DNA, 1649 bp, Homo sapiens
ccttccaagtaactgggattacaggcatgtaccaccataccagctgatttttttgtatttttagtaaagacagggtttcaccatgttagccaggctgatcttgaactcctaaactcaagtgatctactcacctcagcctcccaaaatgctgggattacagatgtgaggcacctggcctcagatttttgatactcttaaaccttctgatccttagtttctctctccaaaatactctttctaggttaaaaaaaaaaaggctcttatatttggtgctatgtaaatgaaaatgttttttaggttttcttgatttaacaatagagacagggtctccctgtgttgcccaggctggtctcgaactcctgggctcaagagatcctcctgtcttggcctcgcaaagtgctaagtaggattacaggcgttagccaccacacccggctgtaaaaatgtacttattctccagcctcttttgtataaaccatagtaagggatgggagtaatgatgttatctgtgaaaatagccaccatttacccgtaagacaaaacttgttaaagcctcctgagtctaacctagattacatcaggccctttttcacacacaaaaaaatcctttatgggatttaatggaatctgttgtttccccctaagttgaaaaacaactctaagacactttaaagtaccttcttggcctgggttacatggttcccagcctaggtttcagacttttgcttaaggccagttttagaaacccgtgaattcagaaaagttaattcagaaatttgataaacagaattgttatttaaaaactaactggaaagattgttaagttctttctgaattattcagaaattatgcatcattttccttcaagaatgacagggtcagcatgtggaattccaagatacctcttgacttcctctcaagctccgtgtttggtcagtggaggcccatccgagctcagcactgagaagtgttagtttctttgggacccatctaccctgaccacatcatgatgttcatctgcagctgttgcaaggtgttcagattgtataaacataaatgtcacaaaaactttaaaagaagtgcaattctcaaaaggttaggtggactaaagcattctgtaaagcaactgctaataatgagcttacagtggatttgaatttgaaaaatatagtaacaagcctgtcaaatatctgcaagaactatggaataaaactactgatgcagtgaagacagttgaaaagatcaaacaaatgccaagctatatttataatgaacaaattcaagaaaaaggactacggaaagttcaggacatcaaagaagtcaggcaaaactcatcttgacccctgttgcaggcaaaggaacgcagctggaagaaaagatgatataacagttaacaggatgcagacatggcagaggtttcctaaaaatctcattatctataaccatttctatatttacatttgaaaatctcctttggagacttagaacctctaaattattgacttattttttatataaggtcactccgatgaaaggtgattacaaaatcatctacattgctgtctacaaaacagataatatggatgtttgatcgcatctcattgttaactctttactgatatgtttgtaaatacagaagtgaaatgtgg

SEQ ID NO: 3720 - DNA, 1927 bp, Homo sapiens
gtaaaccagccggagcggcgcggcagcggcaggaccgccgtggcgcctagagtagcgacccggggggagcgcggggcgacgctggctgcagggacccggtgacagcgtgagaggttcgcagagtactaggttttgacaagcttgcatcatgcgtgagtataagctagtcgttcttggctcaggaggcgttggaaagtctgctttgactgtacaatttgttcaaggaatttttgtagaaaaatacgatcctacgatagaagattcttatagaaagcaagttgaagtagatgcacaacagtgtatgcttgaaatcttggatactgcaggaacggagcaatttacagcaatgagggatttatacatgaaaaatggacaaggatttgcattagtttattccatcacagcacagtccacatttaacgatttacaagacctgagagaacagattcttcgagttaaagacactgatgatgttccaatgattcttgttggtaataagtgtgacttggaagatgaaagagttgtagggaaggaacaaggtcaaaatctagcaagacaatggaacaactgtgcattcttagaatcttctgcaaaatcaaaaataaatgttaatgagatcttttatgacctagtgcggcaaattaacagaaaaactccagtgcctgggaaggctcgcaaaaagtcatcatgtcagctgctttaatatactaaatgcattgtagctctgagccaggtctgaagaactgttgcccaattcaacagtgccagcattccaactttgttaaacctaccaacatcttaaatggactttcctgtggtggtaccctttaagaggcggatgaaagctactatatcagtttgcacattctaatcactttccagtatcacaagagagatttttacttatataatagtcctagagtttgcagctggtaaaaccagaggctacatccagtattactgctaagagacattcttcatccaccaatgttgtacatgtatgaaaatggtgtactgtatactttaacatgccccatactttgtattggagagtacaataatgtaaatcctaaaagcaccactattttagcataataaaagaaagtccaaagagctcctatatagactactccagataacttcgcttctttgatacttgtagcttattgtaattttttttaagaaattcaaggtcattattattgtacaaaataagcgctttgattaacacagctatatagtttttttaatttttaaaaaacctgtggagacggtgatcttgtctttaaaacatgatagtcctttcagtataatgtcttagattaaagacgttgcctttaatatctgttgggaaggaaatgtccagacttttcaaatctcttattatatgtttcctttttttgtttacatagggaacaatgtttatagtcgtgtgtacagtgggggtctacaacaagaagtgtatattttcaaacaattttttaatgatttaacaatttttgtaaatcattttcaggcttctgcagctgtagattctcactgtgaatcccttgcttgctcatgcataagtgtatttgcaataccaaatatacaggtttagtatttttgcctgttagtgattgtttcacatgtgtaacgttttggttgagatgttaaatggtggacgagtactgtggatgtgaatgtgggaagtaattttaatcatatgtaattggtcacaaggcctaatttgcagtaactattgctgttttatttaacaatgccttgttgctttgtatgcattaatgtttggatgtaaagattgtgtgtctatccaacagggagccacagtatttaaattgaccaacctaatgttacaactactttgaggtggccaaatgtaaactaaaagccttaattaaagtggtgcaattttgtaaaaaaaaaa

SEQ ID NO: 3721 - protein, 184 aa, Homo sapiens
MREYKLVVLGSGGVGKSALTVQFVQGIFVEKYDPTIEDSYRKQVEVDAQQCMLEILDTAGTEQFTAMRDLYMKNGQGFALVYSITAQSTFNDLQDLREQILRVKDTDDVPMILVGNKCDLEDERVVGKEQGQNLARQWNNCAFLESSAKSKINVNEIFYDLVRQINRKTPVPGKARKKSSCQLL

SEQ ID NO: 3722 - DNA, 1030 bp, Homo sapiens
tttccgcgctacctgcagaggggtccatacggcgctgttctggattcccgttgtaacttaaagggaaactttcacaatgtccggagcccttgatgtcctgcaaatgagggaggaggatgtccttaagttccttgcagcaggaacccacttaggtggcaccaatcttgacttccagatggaacagtacatctatgaaaggaaaagtgatggcatctatatcataaatctgaagaggacctgggagaagcttctgctggcagctcatgctattgttgccattgaaaaccctgctgatgtcagtgttatatcctccaggaatactggccagacggctgtgctgaagtttgctgctgccactggagccactccaattgctgggcgcttcactcctggaaccttcactaaccagatccaggcagccttccgggagccacggcttcttgtggttactgaccccagggctgaccaccagcctctcacggaggcatcttatgttaacctacctaccattgcgctgtgtaacacagattctcctctgcgctatgtggacattgccatcccatgcaacaacaagggagcttactcagtgggtttgatgtggtggatgctggctcgggaagttctgtgcatgcttggcaccatttcctgtgaacacccatgggaggtcatgcctgatctgtacttctacagagatcctgaagagattgaaaaagaagagcaggctgctgctgaaaaggcagtgaccaaggaggaatttcagggtgaatggactgctccagctcctgagttcactgctattcagcctgaggttgcagactggtctgaaggtgtacaggtgccctctgtgcctattcagcaattccctactgaagactggagctctcagcctgccatggaagactggtctgcagctcccactgctcaggccactgaatgggtaggagcaaccactgactggtcttaagctgttcttgcataggctcttaagcagcatggaaaaatggttgatggaaaataagcatcagtttct

SEQ ID NO: 3723 - protein, 295 aa, Homo sapiens [sequence omitted]

SEQ ID NO: 3724 - DNA, 1759 bp, Homo sapiens
ggcacgagaaaattcatgcgagggagacgtggtgggcggtccttcctgtgacacgacccttgagtgacagttctatttgattgcctccggtactgtgaggaaaggacacgactctatggtgaggactgatggacatacattatctgagaaaagaaactaccaggtgacaaacagcatgtttggtgcttcaagaaagaagtttgtagagggggtcgacagtgactaccatgacgaaaacatgtactacagccagtcttctatgtttccacatcggtcagaaaaagatatgctggcatcaccatctacatcaggtcagctgtctcagtttggggcaagtttatacgggcaacaaagtgcactaggccttccaatgagggggatgagcaacaatacccctcagttaaatcgcagcttatcacaaggcactcagttaccgagccacgtcacgccaacaacaggggtaccaacaatgtcacttcacacgcctccatctccaagcaggggtattttgcctatgaatcctaggaatatgatgaaccactcccaggttggtcagggcattggaattcctagcaggacaaatagcatgagcagttcagggttaggtagccccaacagaagctcgccaagcataatatgtatgccaaagcagcagccttctcgacagccttttactgtgaacagtatgtctggatttggaatgaacaggaatcaggcatttggaatgaataactccttatcaagtaacatttttaatggaacagacggaagtgaaaatgtgacaggattggacctttcagatttcccagcattagcagaccgaaacaggagggaaggaagtggtaacccaactccattaataaaccccttggctggaagagctccttatgttggaatggtaacaaaaccagcaaatgaacaatcccaggacttctcaatacacaatgaagattttccagcattaccaggctccagctataaagatccaacatcaagtaatgatgacagtaaatctaatttgaatacatctggcaagacaacttcaagtacagatggacccaaattccctggagataaaagttcaacaacacaaaataataaccagcagaaaaaagggatccaggtgttacctgatggtcgggttactaacattcctcaagggatggtgacggaccaatttggaatgattggcctgttaacatttatcagggcagcagagacagacccaggaatggtacatcttgcattaggaagtgacttaacaacattaggcctcaatctgaactctcctgaaaatctctaccccaaatttgcgtcaccctgggcatcttcaccttgtcgacctcaagacatagacttccatgttccatctgagtacttaacgaacattcacattagggataagctggctgcaataaaacttggccgatatggtgaagaccttctcttctatctctattacatgaatggaggagacgtattacaacttttagctgcagtggagctttttaaccgtgattggagataccacaaagaagaacgagtatggattaccagggcaccaggcatggagccaacaatgaaaaccaatacctatgagaggggaacatattacttctttgactgtcttaactggaggaaagtagctaaggagttccatctggaatatgacaaattagaagaacggcctcacctgccatccaccttcaactacaaccctgctcagcaagccttctaaaaaaaaaaaaaaaaaaaaaaa

SEQ ID NO: 3725 - protein, 540 aa, Homo sapiens
MVRTDGHTLSEKRNYQVTNSMFGASRKKFVEGVDSDYHDENMYYSQSSMFPHRSEKDMLASPSTSGQLSQFGASLYGQQSALGLPMRGMSNNTPQLNRSLSQGTQLPSHVTPTTGVPTMSLHTPPSPSRGILPMNPRNMMNHSQVGQGIGIPSRTNSMSSSGLGSPNRSSPSIICMPKQQPSRQPFTVNSMSGFGMNRNQAFGMNNSLSSNIFNGTDGSENVTGLDLSDFPALADRNRREGSGNPTPLINPLAGRAPYVGMVTKPANEQSQDFSIHNEDFPALPGSSYKDPTSSNDDSKSNLNTSGKTTSSTDGPKFPGDKSSTTQNNNQQKKGIQVLPDGRVTNIPQGMVTDQFGMIGLLTFIRAAETDPGMVHLALGSDLTTLGLNLNSPENLYPKFASPWASSPCRPQDIDFHVPSEYLTNIHIRDKLAAIKLGRYGEDLLFYLYYMNGGDVLQLLAAVELFNRDWRYHKEERVWITRAPGMEPTMKTNTYERGTYYFFDCLNWRKVAKEFHLEYDKLEERPHLPSTFNYNPAQQAF

SEQ ID NO: 3726 - DNA, 1908 bp, Homo sapiens
ctggtcccgagcacgagctgtgaggggattcacttgtgtgcggaactcctcggaaccatggcgtccctttcccttgcacctgttaacatctttaaggcaggagctgatgaagagagagcagagacagctcgtctgacttcttttattggtgccatcgccattggagacttggtaaagagcaccttgggacccaaaggcatggacaaaattcttctaagcagtggacgagatgcctctcttatggtaaccaatgatggtgccactattctaaaaaacattggtgttgacaatccagcagctaaagttttagttgatatgtcaagggttcaagatgatgaagttggtgatggcactacctctgttaccgttttagcagcagaattattaagggaagcagaatctttaattgcaaaaaagattcatccacagaccatcatagcgggttggagagaagccacgaaggctgcaagagaggcgctgttgagttctgcagttgatcatggttccgatgaagttaaattccgtcaagatttaatgaatattgcgggcacaacattatcctcaaaacttcttactcatcacaaagaccactttacaaagttagctgtagaagcagttctcagactgaaaggctctggcaacctggaggcaattcatattatcaagaagctaggaggaagtttggcagattcctatttagatgaaggcttcctgttggataaaaaaattggagtaaatcaaccaaaacgaattgaaaatgctaaaattcttattgcaaatactggtatggatacagacaaaataaagatatttggttcccgggtaagagttgactctacagcaaaggttgcagaaatagaacatgcggaaaaggaaaaaatgaaggagaaagttgaacgtattcttaagcatggaataaattgctttattaacaggcaattaatttataattatcctgaacagctctttggtgctgctggtgtcatggctattgagcatgcagattttgcaggtgtggaacgcctagctcttgtcacaggtggtgaaattgcctctacctttgatcacccagaactggtgaagcttggaagttgcaaacttatcgaggaagtcatgattggagaagacaaactcattcacttttctggggttgcccttggtgaggcttgtaccattgttttgcgtggtgccactcaacaaattttagatgaagcagaaagatcattgcatgatgctctttgtgttcttgcgcaaactgtaaaggactctagaacagtttatggaggaggctgttctgagatgttgatggctcatgctgtgacacagcttgccaatagaacaccaggcaaagaagctgttgcaatggagtcttatgctaaagcactgagaatgttgccaaccatcatagctgacaatgcaggctatgacagtgcagacctggtggcacagctcagggctgctcacagtgaaggcaataccactgctggattggatatgagggaaggcaccattggagatatggctatcctgggtataacagaaagttttcaagtgaagcgacaggttcttctgagtgcagctgaagcagcagaggtgattctgcgtgtggacaacatcatcaaagcggcacccaggaaacgtgtccctgatcaccacccctgttaagcattcccacgtgctgtcgatctttggaccagtttctagcaaagttgtgtttgaaagatactctattaaagaagactgtggaatctgtttatcggtgcccattatatccttaagtttggatatttagctgaccttcgctttaacataggtctaatttatttgccgtgtcattttccatacaaatcagttgatttaaaaaagttcatttctcatactgtgcattaaaataaaaatttgaacaat

SEQ ID NO: 3727 - DNA, 1404 bp, Homo sapiens
cggcgttctccacctgcgcgggcctgaatggccttcaggagcacagtcggcctgaggagttgacggttactcaccgccgtgagcccaagtaactcgccctccttcggctaaaaaccctccgcctgggcccgcgcgacaggagcgcggtctctgaggggagcggcgaccccgccagccccggtctctttccctggcggcggcggcttcttccgtgggacaatatgttcaagagaatggccgaatttgggcctgactccggcgggagagtaaagggtgttactatcgttaaaccaatagtttacggtaatgttgctcggtattttggaaagaaaagagaagaagatgggcacactcatcagtggacagtatatgtgaaaccatatagaaatgaggatatgtcagcatatgtgaagaaaatccagtttaaattacatgaaagctatggcaatcctttaagagttgttactaaacctccatatgaaattactgaaacaggatggggtgaattcgaaataatcatcaaaatatttttcattgaccctaatgaaagacctgtaaccctgtatcatttgctaaagctgtttcaatcagacaccaatgcaatgctggggaaaaagacagtggtttcagagttctatgatgaaatgatatttcaagacccaacagcaatgatgcaacaattattgacaacatctcgtcagctaacattaggagcctataagcatgaaacagaatttgcagagcttgaagtgaaaaccagagaaaaattagaagctgctaagaaaaaaacaagctttgagattgcagagcttaaggagagattaaaagcaagtcgtgaaactataaattgtttaaaaaatgaaatcagaaaacttgaagaagatgaccaagcaaaagacatataaacagttctcatgagaacttggtagtaagctaaactgaaaataaggtgggcttcactggagaaatggacttactgcaaatgctgtgatgtttcttagaggaacttcatatacagctgttgaccatgaatttcttagcaataggaatttgtactatttaagcaatctttaatggaaaatatgtgtgtaagaatggatgctatataggtattttaccaacccattttaagaaaattctatgatattaagcacagtttttaaaaatgtttattgtagtatatgtatagcttattacccttttgacaggcatcaaaatttcattataaagtattacttgtacaaattttgtacttctttagtggctagaattagtgaagaaacttaatgtgtatatttaatttcttcaagttcttacctgcccccatccttttttgtatatgatgtgtccagtaagtattcaataaatgtagtttacagatcctaaaaaaaaaaaaaaaaaaaa

SEQ ID NO: 3728 - protein, 227 aa, Homo sapiens
MFKRMAEFGPDSGGRVKGVTIVKPIVYGNVARYFGKKREEDGHTHQWTVYVKPYRNEDMSAYVKKIQFKLHESYGNPLRVVTKPPYEITETGWGEFEIIIKIFFIDPNERPVTLYHLLKLFQSDTNAMLGKKTVVSEFYDEMIFQDPTAMMQQLLTTSRQLTLGAYKHETEFAELEVKTREKLEAAKKKTSFEIAELKERLKASRETINCLKNEIRKLEEDDQAKDI

SEQ ID NO: 3729 - DNA, 1487 bp, Homo sapiens
ctagcactctgacctagcagtcaacatgaaggctctcattgttctggggcttgtcctcctttctgttacggtccagggcaaggtctttgaaaggtgtgagttggccagaactctgaaaagattgggaatggatggctacaggggaatcagcctagcaaactggatgtgtttggccaaatgggagagtggttacaacacacgagctacaaactacaatgctggagacagaagcactgattatgggatatttcagatcaatagccgctactggtgtaatgatggcaaaaccccaggagcagttaatgcctgtcatttatcctgcagtgctttgctgcaagataacatcgctgatgctgtagcttgtgcaaagagggttgtccgtgatccacaaggcattagagcatgggtggcatggagaaatcgttgtcaaaacagagatgtccgtcagtatgttcaaggttgtggagtgtaactccagaattttccttcttcagctcattttgtctctctcacattaagggagtaggaattaagtgaaaggtcacactaccattatttccccttcaaacaaataatatttttacagaagcaggagcaaaatatggcctttcttctaagagatataatgttcactaatgtggttattttacattaagcctacaacatttttcagtttgcaaatagaactaatactggtgaaaatttacctaaaaccttggttatcaaatacatctccagtacattccgttcttttttttttttgagacagtctcgctctgtcgcccaggctggagtgcagtggcgcaatctcggctcactgcaacctccacctcccgggttcacgccattctcctgcctcagcctcccgagtagctgggattacgggcgcccgccaccacgcccggctaattttttgtatttttagtagagacagggtttcaccgtgttagccaggatggtctcgatctcctgaccttgtgatccacccacctcggcctcccaaagtgctgggattacaggcgtgagccactgcgcccggccacattcagttcttatcaaagaaataacccagacttaatcttgaatgatacgattatgcccaatattaagtaaaaaatataagaaaaggttatcttaaatagatcttaggcaaaataccagctgatgaaggcatctgatgccttcatctgttcagtcatctccaaaaacagtaaaaataaccactttttgttgggcaatatgaaatttttaaaggagtagaataccaaatgatagaaacagactgcctgaattgagaattttgatttcttaaagtgtgtttctttctaaattgctgttccttaatttgattaatttaattcatgtattatgattaaatctgaggcagatgagcttacaagtattgaaataattactaattaatcacaaatgtgaagttatgcatgatgtaaaaaatacaaacattctaattaaaggctttgcaacac

SEQ ID NO: 3730 - protein, 148 aa, Homo sapiens
MKALIVLGLVLLSVTVQGKVFERCELARTLKRLGMDGYRGISLANWMCLAKWESGYNTRATNYNAGDRSTDYGIFQINSRYWCNDGKTPGAVNACHLSCSALLQDNIADAVACAKRVVRDPQGIRAWVAWRNRCQNRDVRQYVQGCGV

SEQ ID NO: 3731 - DNA, 1560 bp, Homo sapiens
ccctgagtcactgcctgcgcagctccggccgcctggctccccatactagtcgccgatatttggagttcttacaacatggcagacattgacaacaaagaacagtctgaacttgatcaagatttggatgatgttgaagaagtagaagaagaggaaactggtgaagaaacaaaactcaaagcacgtcagctaactgttcagatgatgcaaaatcctcagattcttgcagcccttcaagaaagacttgatggtctggtagaaacaccaacaggatacattgaaagcctgcctagggtagttaaaagacgagtgaatgctctcaaaaacctgcaagttaaatgtgcacagatagaagccaaattctatgaggaagttcacgatcttgaaaggaagtatgctgttctctatcagcctctatttgataagcgatttgaaattattaatgcaatttatgaacctacggaagaagaatgtgaatggaaaccagatgaagaagatgagatttcggaggaattgaaagaaaaggccaagattgaagatgagaaaaaagatgaagaaaaagaagaccccaaaggaattcctgaattttggttaactgtttttaagaatgttgacttgctcagtgatatggttcaggaacacgatgaacctattctgaagcacttgaaagatattaaagtgaagttctcagatgctggccagcctatgagttttgtcttagaatttcactttgaacccaatgaatattttacaaatgaagtgctgacaaagacatacaggatgaggtcagaaccagatgattctgatcccttttcttttgatggaccagaaattatgggttgtacagggtgccagatagattggaaaaaaggaaagaatgtcactttgaaaactattaagaagaagcagaaacacaagggacgtgggacagttcgtactgtgactaaaacagtttccaatgactctttctttaacttttttgcccctcctgaagttcctgagagtggagatctggatgatgatgctgaagctatccttgctgcagacttcgaaattggtcactttttacgtgagcgtataatcccaagatcagtgttatattttactggagaagctattgaagatgatgatgatgattatgatgaagaaggtgaagaagcggatgaggaaggggaagaagaaggagatgaggaaaatgatccagactatgacccaaagaaggatcaaaacccagcagagtgcaagcagcagtgaagcaggatgtatgtggccttgaggataacctgcactggtctaccttctgcttccctggaaaggatgaatttacatcatttgacaagcctattttcaagttatttgttgtttgtttgcttgtttttgtttttgcagctaaaataaaaatttcaaatacaattttagttcttacaagataatgtcttaattttgtaccaattcaggtagaagtagaggcctaccttgaattaagggttatactcagtttttaacacattgttgaagaaaaggtaccagctttggaacgagatgctatactaataagcaagt

SEQ ID NO: 3732 - DNA, 3625 bp, Homo sapiens
agaggcccaggaggctgggtgaggcgctgagacggtttggcggtgagtcctgggccaggcgcagctgaaaggcccgcaacccgggaaacgtcaaaacaaacagaaggacttgggattccggagcagtcgcccctatcgctgctcctgcagttgcggacgccaccgaccccgccgccggaggactgggcactgaaaggcctctaggcctaggcgcggcccgcggagccagacgtgttgctgccgtgagtaaaacgagcgccctctccgcactcgtttacaaattaaaatggaggaaatttcgttggccaacctggatactaacaagctagaggccatcgctcaggagatttacgtagacctgatagaggattcttgtttgggattctgctttgaggtgcaccgggcagtcaagtgtggctacttctacctggagttcgcagagactggtagcgtgaaggattttggcattcagccagtggaagacaaaggagcgtgccgcctcccgctttgctcccttcccggagaacctgggaatgggcctgatcagcagctgcagcgctcacctccggaattccagtagctgcaaaatgagagtctgaaagtggccaggacaataacatagactggtcctgtggcttcgaggagtaagctaagtagaaaaaagtagaaaaatcagacaaaagttttaattcccccttgaagatcctagcatttaaaaacccaaagtggataatttaggaatcctttttttaaagtgtattacctggagcaagctctgaagccctgggcaggaggagctgcacagcctgcgggccatgcagtgcctgttgatctctaaacacaccaggatgtgcgcaagatcctgtagtgcccccagtgcacaggtgagcagttgtgtgcccagcatataaaatttttggttcctcagcctttctgtctgcctgatgtcaagggcttcttggacagtttggacgttacagttcgtcaggccgtgatcagtggcctgcagtgggactgctcctttgatatctgaacctctgttatgggcttctctgagacaagtaaatgtcaggtgcaagatctggatactaacagtttcagtttgggaaatccaagaaaaagaattatcaagtttgatagggaagctctgtagccttgactccagcaagaagaaaaggtcaaaaccacgtgtttcccaaaagtccagactacaatgattcagctgacttgaggacaaggcctagcatttggctgagcagagccctcttccttgccctccaacctggtggcataggcttggcaaatggacaacttggttgtccagacaggttgaggattcggttatgatcccctggggaggtagcagggacctctgcaactatgcatgatttctcaaacttcaagattcatgtctggatgtattatgctgtggatataagtttagtagggcggtcatttcctactctgagttactggttacctagccagtccatgggtgtgacttggtccttaagtcaggtcactatctgcctcccaccctgggggcaggactgaagtatggaagagcatcatggctgtgcaggaggctgtggtttgaaaactgagcccagagggcactttcagctgccctcaataatgtgaatggattagtgctaggagccaaggagcaggactggattatctcatctgactgtgtgcagaatcctgttgaatgtccctgttttctttggttgggcagtcagagctctgctatggtgaacatccagactgtcaccactttctgtctgccgctcgaaagggatagtcctttccactcggtcccctttggatcttcttgacaacaggagcagtccttttattgttagaagtcagagaaagacctccagaatctcctgactttagggaatggtataggggaagatgggaagtaagagtcacatatcaaaactaccctccactttattccctgagcgagggtttatgaagtataaaggggtgggagccccgaggtgagcgggaacggtgctgctttatttgaaatgttttcttacctcattctgtgccccagtagggggtccagcctcatctgtctggcttggccctgtgttcctcctgtcccctgctccactgcctatctggtgccccaggtgctgcttgccactccagctgtcacattgaacagtttcaattcagctcttaatgctcctgcttccgaagcctgcccaatttcttttttcttggcctctgttttttttttttctttctttttcccttgtttttgtagaagactcagaggagaatctttcttatggctccctctgttgagattggaattggaagagaacttaattttttgtatttaaaatgcagtgtcatgcctataagcatttctcctatataggactgctttgctagtgtgccctcttgctgtgtcttacttcataaggagttgtatcttcccacctccatttcaatactgccggttaggacctaagtagaagagcagtaaaggctgattgacacacagggggatggagttggtccttgtccattctctcacccttgctgtgcatgtatcaatccttatcccagaaggtactatttagactgtatagactgatttagattacatactttagaggattaaggaaaccatagagtttgggccttggaactgttactgccttgtcctagagttgtcctgatcaggcttggggcctagttacagattagtcttaaagaattgcattaacttaaaaaaaatcaaaccttggcaagagctaaaataatttggagatatctttgcccttgacttgtagacgacatctaagaggatgaagaaaggagagtctaagtgagactctggcctacttcctaacaatgtcttggaagtgggatgatggtaaaggagaaaggccacagtccaatccctctgccttcagatagggaactcaaatcctgaaattactgttttctttctggccttttctcctggttagaggaggaagcggaaagtagttttgagtagtattttgttcatattaccccccttttgttttttgtttctggcccctctaccaatagggcagtagcctcctgccctggatgggtataaggtgggcttggtccaacaggtgcccagagggtacatactcctttctggggagagaatgctccctaccatatagttgacagtggttaggaactctccctttccctacctaccttccttttaatagcagaattcctatttttcccttgattatgtgtattgatcaccctgcaatcctattatgtatctgagtgtgtgtgtgtgtgtatgtgtgtgttatgggggaaggggggggttctttaaaatttctgtggtttgtggctttttcttccatacattagttcccaccatcgcatgcccagggaccactgcctggcattatcgcatgctgggatcatcgggggagggtagtgaagctcaccactgtcctttgttttggagatttttatttttgcataagtagtccatcctatacagatagctgattaactgtattcccctttcccctatggctgctggtgtaaataaactgcatctccccattggtaaacagtaataaaattttaaaaaatg

SEQ ID NO: 3733 - protein, 107 aa, Homo sapiens
MFSYLILCPSRGSSLICLAWPCVPPVPCSTAYLVPQVLLATPAVTLNSFNSALNAPASEACPISFFLASVFFFSFFFPCFCRRLRGESFLWLPLLRLELEENLIFCI

SEQ ID NO: 3734 - DNA, 554 bp, Homo sapiens
gaaccgccatcttccagtaattcgccaaaatgacgaacacaaagggaaagaggagaggcaccccatatatgttctctaggccttttagaaaacatggagttgtttgtttggccacatatatgcgaatctataagaaaggtgatattgtagacatcaagggaatgggtactgttcaaaaaggaatgccccacaagtgttaccatggcaaaactggaagagtctacaatgttacccagcatactgttggcattgttgtaaacaaacaagttaagggcaagattcttgccaagagaattaatgtgcgtattgagcacattaagcactctaagagctgagatagcttcctgaaacgcgtgaaggaaaatgatcagaaaaagaaagaagccaaagagaaaggtacctgggttcaactaaagcgccagcctgctccacccagagaagcacactttgtgagaaccaatgggaaggagcctgagctgctggaacctattccctgtgaattcatggcataataggtgttaaaaaaaaaaataaataaaggacctctgggctat

SEQ ID NO: 3735 - protein, 160 aa, Homo sapiens
MTNTKGKRRGTPYMFSRPFRKHGVVCLATYMRIYKKGDIVDIKGMGTVQKGMPHKCYHGKTGRVYNVTQHTVGIVVNKQVKGKILAKRINVRIEHIKHSKSEDSFLKRVKENDQKKKEAKEKGTWVQLKRQPAPPREAHFVRTNGKEPELLEPIPCEFMA

SEQ ID NO: 3736 - DNA, 4616 bp, Homo sapiens
atgaagatggcggacgcgaagcagaagcggaacgagcagctgaaacgctggatcggctccgagacggacctcgagcctccggtggtgaagcgccagaagaccaaggtgaagttcgacgatggcgccgtcttcctggctgcttgctccagcggcgacacggacgaggtcctcaagctgctgcaccgcggcgccgacatcaattacgccaatgtggacggactcactgccctgcaccaggcttgcattgatgacaatgttgatatggtgaagtttctggtagaaaatggagcaaatattaatcaacctgataatgaaggctggataccactacatgcagcagcttcctgtggatatcttgatattgcagagtttttgattggtcaaggagcacatgtaggggctgtcaacagtgaaggagatacacctttagatattgcggaggaggaggcaatggaagagctacttcaaaatgaagttaatcggcaaggggttgatatagaagcagctcgaaaggaagaagaacggatcatgcttagagatgccaggcagtggctaaatagtggtcatataaatgatgtccggcatgcaaaatctggaggtacagcacttcacgttgcagctgctaaaggctatacggaagttttaaaacttttaatacaggcaggctatgatgttaatattaaagactatgatggctggacacctcttcatgctgcagctcattggggtaaagaagaagcatgtcgaattttagtggacaatctgtgtgatatggagatggtcaacaaagtgggccaaacagcctttgatgtagcagatgaagacattttaggatatttagaagagttgcaaaagaaacaaaatctgctccatagtgaaaaacgggacaagaaatctccactaattgaatcaacagcaaatatggacaataatcagtcacagaagacctttaaaaacaaagagacgttgattattgaaccagagaaaaatgcatcccgtattgaatctctggaacaagaaaaggttgatgaagaagaagaaggaaagaaggatgagtctagctgctctagtgaagaagatgaggaagatgactcggaatcagaagctgaaacagataagacaaaacccctggcttctgtaactaatgccaacacttctagtacacaagcagctcctgtagctgttacaacacctactgtgtcatcaggtcaagcaacacctacatcacctattaaaaagtttccaaccacagctacaaaaatttctcccaaagaagaagagagaaaagatgagtctcctgcaacttggaggttaggacttagaaagacgggcagctatggtgcacttgctgaaatcacagcatctaaagagggtcagaaagaaaaagatactgcaggtgttacacgttcagcttcaagtcccagactttcctcctctttggataataaagaaaaggagaaagatagtaaaggaactaggcttgcatatgttgcacctacaataccaagacgactagccagtacatctgacattgaagagaaagaaaacagagattcttcaagtttgcgaacaagtagttcatatacaaggagaaaatgggaagatgatcttaaaaaaaatagctcagttaatgaaggatcaacgtatcataaaagttgctcctttggtagaagacaagatgatttgattagttctagtgttccaagcaccacatcaacaccaacagttacctctgcagctgggcttcagaaaagcctgctttccagcacaagcactactacaaagattacaacgggttcttcctcagcaggcacacaaagcagtacctcaaatcgtttgtgggctgaggatagtactgagaaagaaaaggacagtgttcctacggcagtgaccattcctgttgctccaactgttgtaaatgctgcagcttctaccacaaccctgactacaactactgctggcactgtctcctccacaacagaggtcagggagagacgcagatcatacctcactcctgttagggatgaagagtctgaatcccaaagaaaagcaagatctagacaagcaagacaatctagaagatcaacacagggagtgacattaactgatcttcaagaagctgagaaaacaataggaagaagtcgttctacccgaaccagagaacaagaaaatgaagaaaaagaaaaagaggaaaaagagaaacaagataaagagaaacaagaagaaaagaaggagtcagaaacatctagagaagatgaatataaacaaaagtactccagaacgtatgatgagacttaccagcgttataggccagtatcaacttcaagttcaaccactccatcctcttcactttctactatgagcagttcactgtatgcttcaagtcaactaaacaggccaaatagtcttgtaggcataacttctgcttactccagaggaataacaaaagaaaatgaaagagagggagaaaaaagagaagaggagaaagaaggagaagataaatcacaacctaaatcaatcagagaacgacgacgaccaagagagaaaagaagatctacaggagtttcattttggacacaagatagtgatgaaaatgaacaagaacaacaatcagacacagaagagggatccaataagaaagaaactcagacggattccatttctagatatgaaaccagttctacatcagctggtgatcgatatgattccttgctgggtcgctctggatcatacagttacttagaagaaagaaaaccttacagcagcaggctagaaaaggatgactcaactgactttaaaaagctttatgaacaaattctagctgaaaatgaaaagctgaaggcacagctacatgatacaaatatggaactaacagatcttaaattacagttggaaaaggccacccagagacaagaaagatttgctgatagatcactgttggaaatggaaaaaagggaacgaagagctctagaaagaagaatatctgaaatggaagaagagctcaaaatgttaccagacctaaaagcagacaaccagaggctaaaggatgaaaatggggccttgatcagagttataagcaaactttccaaataaaaaaaaaaaaagcagcaagtaatggaattgcacatattagtaacccagtggaccataattggcagtcactggaagtctgggaagaatccttggagactgtcattttcggatatcctgccaaatgccctcttatctagaatttttgtttcattttgtttaattttctggggtgtttttgttgttgttggtttgttttttgttttttttttttaatcaagaccattgtttcatgttaatgcagctgctgagaagatttttttttaatgactgagaaaacttgtttacagctccagcatataaggaaagtgttcaaggccagatatgcctcagatatttaaccagtaagccttagttgtacataaatacttttgtgtcaacaaaaactttcagctctcacagaagacagttactcaacattttttgatgtgccacagtttcgagtttttcgatatttaaattttttggcttttcatctaagtttgggtttgtattttttccttctaaactcttcatgtggcagagtcttctatgttttcacagctttttcattacagaaaagaacacttgctcttctgtgattattgtcatgtattaggctaatgctgtgttgtctcccacctggaactgaattgcttggtggaacatatgctttcactgtttgtgcaatatgcatttatttcttatatgaatgctttaaagtcatttgaggttagatcttttaattcctattttctgcttcattggtcactttttttttattgtagtataagatgttagattctgtaatcttcacattcattttagcaggtactgagtgatgctgtatatacaaataagtgtattgttttgatttttagaccaccacatggcatgcttgactatttcttatttcaaatgtctgctaatgcagagtaggctactccatgatagtgttaaaaaacaaaatttgctaacaatgtgatataaagactttaaaagttacacattatgtggagccctatctttacaaaagtttcctactgtaaagtgcttttattttcagttttcacttgatagtactcaaccataattaaagttgcataagataattgctttacatttcacatacctatatttatctgagtgctgtctaaaactgttgtgctagccaaagtaatgctatgaaatcatttgcagaattaacccgtgagttaatgttaaatgcactgttattgccatgtgaagaggcatcgactttgataccaccatcatgttcagaccattttatacatttcagtggcctttttttttttttaaggaaaaaaaagcgcaaaaccaagtacatagtgacgatggcttttatttggacaaatagcttttatattttcattaaaccatgcaaaaaatactacatctttctggcacataactgtctccttaaccactgaacagttcagccatttgaataaattgtacattgtaaagcttatagtagctgattgtattattgattgtattgtatactatattaaatgtgaatttgt

SEQ ID NO: 3737 - DNA, 2387 bp, Homo sapiens
cagccttggagggagggattagaagccgctagactttttttcctcccctctcagtagcacggagtccgaattaattggatttcattcactggggaggaacaaaaactatctgggcagcttcattgagagagattcattgacactaagagccagcggctgcagctgggtgcagagagaacctccggctttacttctgtctcgtctgccccaaccgctagcctcggcttgggtaaggcgaggcggaattaaaccccgctccgagagcggcagcttcgcgcgcggtgcgctcggcctatgcctgccccgaggggcgtctggtaggcaccccgccctctcccgcagctcgacccccatgatagatacgctcagacccgtgcccttcgcgtcggaaatggcgatcagcaagacggtggcgtggctcaacgagcagctggagctgggcaacgagcggctgctgctgatggactgccggccgcaggagctatacgagtcgtcgcacatcgagtcggccatcaacgtggccatcccgggcatcatgctgcggcgcctgcagaagggtaacctgccggtgcgcgcgctcttcacgcgcggcgaggaccgggaccgcttcacccggcgctgtggcaccgacacagtggtgctctacgacgagagcagcagcgactggaacgagaatacgggcggcgagtcggtgctcgggctgctgctcaagaagctcaaggacgagggctgccgggcgttctacctggaaggtggcttcagtaagttccaagccgagttctccctgcattgcgagaccaatctagacggctcgtgtagcagcagctcgccgccgttgccagtgctggggctcgggggcctgcggatcagctctgactcttcctcggacatcgagtctgaccttgaccgagaccccaatagtgcaacagactcggatggtagtccgctgtccaacagccagccttccttcccagtggagatcttgcccttcctctacttgggctgtgccaaagactccaccaacttggacgtgttggaggaattcggcatcaagtacatcttgaacgtcacccccaatttgccgaatctctttgagaacgcaggagagtttaaatacaagcaaatccccatctcggatcactggagccaaaacctgtcccagtttttccctgaggccatttctttcatagatgaagcccggggcaagaactgtggtgtcttggtacattgcttggctggcattagccgctcagtcactgtgactgtggcttaccttatgcagaagctcaatctgtcgatgaacgacgcctatgacattgtcaaaatgaaaaaatccaacatatcccctaacttcaacttcatgggtcagctgctggacttcgagaggacgctgggactcagcagcccatgtgacaacagggttccagcacagcagctgtattttaccaccccttccaaccagaatgtataccaggtggactctctgcaatctacgtgaaagaccccacacccctccttgctggaatgtgtctggcccttcagcagtttctcttggcagcatcagctgggctgctttctttgtgtgtggccccaggtgtcaaaatgacaccagctgtctgtactagacaaggttaccaagtgcggaattggttaatactaacagagagatttgctccattctctttggaataacaggacatgctgtatagatacaggcagtaggtttgctctgtacccatgtgtacagcctacccatgcagggactgggattcgaggacttccaggcgcatagggtagaaccaaatgatagggtaggagcatgtgttctttagggccttgtaaggctgtttccttttgcatctggaactgactatataattgtcttcaatgaagactaattcaattttgcatatagaggagccaaagagagatttcagctctgtatttgtggtatcagtttggaaaaaaaaatctgatactccatttgattattgtaaatatttgatcttgaatcacttgacagtgtttgtttgaattgtgtttgttttttcctttgatgggcttaaaagaaattatccaaagggagaaagagcagtatgccacttcttaaaacagaacaaaacaaaaaaagaaaattgtgctcttttctaatccaaagggtatatttgcagcatgcttgactttaccaattctgatgacatctttacggacactattatcactaagaccttgttatggcgaagtctttagtctttttcatgtattttcctcatgattttttctctttatgtagtttgactatgccttacctttgtaaatatttttgcttgtgttgtcgcaaaggggataatctgggaaagacaccaaatcatgggctcactttaaaa

SEQ ID NO: 3738 - protein, 381 aa, Homo sapiens
MIDTLRPVPFASEMAISKTVAWLNEQLELGNERLLLMDCRPQELYESSHIESAINVAIPGIMLRRLQKGNLPVRALFTRGEDRDRFTRRCGTDTVVLYDESSSDWNENTGGESVLGLLLKKLKDEGCRAFYLEGGFSKFQAEFSLHCETNLDGSCSSSSPPLPVLGLGGLRISSDSSSDIESDLDRDPNSATDSDGSPLSNSQPSFPVEILPFLYLGCAKDSTNLDVLEEFGIKYILNVTPNLPNLFENAGEFKYKQIPISDHWSQNLSQFFPEAISFIDEARGKNCGVLVHCLAGISRSVTVTVAYLMQKLNLSMNDAYDIVKMKKSNISPNFNFMGQLLDFERTLGLSSPCDNRVPAQQLYFTTPSNQNVYQVDSLQST

SEQ ID NO: 3739 - DNA, 1286 bp, Homo sapiens
gtctctcttctcccttccgtcatgtctaagtcagagtctcctaaagagcccgaacagctgaggaagctcttcattggagggttgagctttaaaacaaccgatgagagcctgaggagccattttgagcaatggggaacgctcacggactgtgtggtaatgagagatccaaacacagagcactccaggggctttgggttcatcacacatgccactgtggaggaggtggatgcagccatgaatgcaaggccacataaggtggatggaagagttgtggaaccaaagagagctgtctcaagagaagattctcaaagaccaggtgcccacttaactatgaaaaagatatttgttggtggcattaaacaatgaagaacaacacctaagagattattttgaacagtatggaaaaattgaagtgactcaaatcatgactcactgaggcagtgccaagaaaaggggctttgcctttgtaacctttgacgaccatgactccgtggataagactgtcattcagaaataccatactgtgaatggccacaactgtgaagttaggaaagccctgtcaaagcaagagatggctagggctttatccagccaaagaggctgaagtggttctagaaactttggcggtggtcgtggaggtggttttggcaggaatgacaacactggtagtggaggaaacttcagtggtggtggtggatatggtggcagtggggatggctataatggatttggtaatgatggaagcaattttggaggtggtggaagctacaatgattttggcaattacaacaatcagtcttcaaattttggacccatgaagggaggaaactttggaggcagaagccctggcccctatggtggtggaggccaatactttgccaaaccatgaaaccaaggtggctatggtggttccagtagcagcagtagctatggcaatggcagaagattttaattaggaaacaaagcttagcaggagaggagagccagagaagtgacagggaagctacaggttacaacagattgtgaactcagccaagcacagtggtggcagggcctagctgctacaaagaagacctgttttagacaaatactcatgggtatgggcaaaaaactcgaggactgtatttgtgactaattgtataacaagtcattttagtttctgttctgtggaaagtgtaaagcattccaacaaagggtttcaatgtagatttttttttttttttgcaaacatgctgttgattgctaaatgtaagtctgatcatgatgcagaataaatgtcttttttt

SEQ ID NO: 3740 - DNA, 1751 bp, Homo sapiens
tttaactgtgctatggagtagaagcaggaggttttcaacctagtcacagagcagcacctaccccctcctcctttccacacctgcaaactcttttacttgggctgaatatttagtgtaattacatctcagctttgagggctcctgtggcaaattcccggattaaaaggttccctggttgtgaaaatacatgagataaatcatgaaggccactatcatcctccttctgcttgcacaagtttcctgggctggaccgtttcaacagagaggcttatttgactttatgctagaagatgaggcttctgggataggcccagaagttcctgatgaccgcgacttcgagccctccctaggcccagtgtgccccttccgctgtcaatgccatcttcgagtggtccagtgttctgatttgggtctggacaaagtgccaaaggatcttccccctgacacaactctgctagacctgcaaaacaacaaaataaccgaaatcaaagatggagactttaagaacctgaagaaccttcacgcattgattcttgtcaacaataaaattagcaaagttagtcctggagcatttacacctttggtgaagttggaacgactttatctgtccaagaatcagctgaaggaattgccagaaaaaatgcccaaaactcttcaggagctgcgtgcccatgagaatgagatcaccaaagtgcgaaaagttactttcaatggactgaaccagatgattgtcatagaactgggcaccaatccgctgaagagctcaggaattgaaaatggggctttccagggaatgaagaagctctcctacatccgcattgctgataccaatatcaccagcattcctcaaggtcttcctccttcccttacggaattacatcttgatggcaacaaaatcagcagagttgatgcagctagcctgaaaggactgaataatttggctaagttgggattgagtttcaacagcatctctgctgttgacaatggctctctggccaacacgcctcatctgagggagcttcacttggacaacaacaagcttaccagagtacctggtgggctggcagagcataagtacatccaggttgtctaccttcataacaacaatatctctgtagttggatcaagtgacttctgcccacctggacacaacaccaaaaaggcttcttattcgggtgtgagtcttttcagcaacccggtccagtactgggagatacagccatccaccttcagatgtgtctacgtgcgctctgccattcaactcggaaactataagtaattctcaagaaagccctcatttttataacctggcaaaatcttgttaatgtcattgctaaaaaataaataaaagctagatactggaaacctaactgcaatgtggatgttttacccacatgacttattatgcataaagccaaatttccagtttaagtaattgcctacaataaaaagaaattttgcctgccattttcagaatcatcttttgaagctttctgttgatgttaactgagctactagagatattcttatttcactaaatgtaaaatttggagtaaatatatatgtcaatatttagtaaagcttttcttttttaatttccaggaaaaaataaaaagagtatgagtcttctgtaattcattgagcagttagctcatttgagataaagtcaaatgccaaacactagctctgtattaatccccatcattactggtaaagcctcatttgaatgtgtgaattcaatacaggctatg

SEQ ID NO: 3741 - protein, 359 aa, Homo sapiens
MKATIILLLLAQVSWAGPFQQRGLFDFMLEDEASGIGPEVPDDRDFEPSLGPVCPFRCQCHLRVVQCSDLGLDKVPKDLPPDTTLLDLQNNKITEIKDGDFKNLKNLHALILVNNKISKVSPGAFTPLVKLERLYLSKNQLKELPEKMPKTLQELRAHENEITKVRKVTFNGLNQMIVIELGTNPLKSSGIENGAFQGMKKLSYIRIADTNITSIPQGLPPSLTELHLDGNKISRVDAASLKGLNNLAKLGLSFNSISAVDNGSLANTPHLRELHLDNNKLTRVPGGLAEHKYIQVVYLHNNNISVVGSSDFCPPGHNTKKASYSGVSLFSNPVQYWEIQPSTFRCVYVRSAIQLGNYK

SEQ ID NO: 3742 - DNA, 1669 bp, Homo sapiens
aaagcagcatcttgcctggatgagccaggggacacagaagagaagcccactatctcatttaatctttacaactctcttgcaagggttccctggttgtgaaaatacatgagataaatcatgaaggccactatcatcctccttctgcttgcacaagtttcctgggctggaccgtttcaacagagaggcttatttgactttatgctagaagatgaggcttctgggataggcccagaagttcctgatgaccgcgacttcgagccctccctaggcccagtgtgccccttccgctgtcaatgccatcttcgagtggtccagtgttctgatttgggtctggacaaagtgccaaaggatcttccccctgacacaactctgctagacctgcaaaacaacaaaataaccgaaatcaaagatggagactttaagaacctgaagaaccttcacgcattgattcttgtcaacaataaaattagcaaagttagtcctggagcatttacacctttggtgaagttggaacgactttatctgtccaagaatcagctgaaggaattgccagaaaaaatgcccaaaactcttcaggagctgcgtgcccatgagaatgagatcaccaaagtgcgaaaagttactttcaatggactgaaccagatgattgtcatagaactgggcaccaatccgctgaagagctcaggaattgaaaatggggctttccagggaatgaagaagctctcctacatccgcattgctgataccaatatcaccagcattcctcaaggtcttcctccttcccttacggaattacatcttgatggcaacaaaatcagcagagttgatgcagctagcctgaaaggactgaataatttggctaagttgggattgagtttcaacagcatctctgctgttgacaatggctctctggccaacacgcctcatctgagggagcttcacttggacaacaacaagcttaccagagtacctggtgggctggcagagcataagtacatccaggttgtctaccttcataacaacaatatctctgtagttggatcaagtgacttctgcccacctggacacaacaccaaaaaggcttcttattcgggtgtgagtcttttcagcaacccggtccagtactgggagatacagccatccaccttcagatgtgtctacgtgcgctctgccattcaactcggaaactataagtaattctcaagaaagccctcatttttataacctggcaaaatcttgttaatgtcattgctaaaaaataaataaaagctagatactggaaacctaactgcaatgtggatgttttacccacatgacttattatgcataaagccaaatttccagtttaagtaattgcctacaataaaaagaaattttgcctgccattttcagaatcatcttttgaagctttctgttgatgttaactgagctactagagatattcttatttcactaaatgtaaaatttggagtaaatatatatgtcaatatttagtaaagcttttcttttttaatttccaggaaaaaataaaaagagtatgagtcttctgtaattcattgagcagttagctcatttgagataaagtcaaatgccaaacactagctctgtattaatccccatcattactggtaaagcctcatttgaatgtgtgaattcaatacaggctatg

SEQ ID NO: 3743 - protein, 359 aa, Homo sapiens; identical to SEQ ID NO: 3741

SEQ ID NO: 3744 - DNA, 1258 bp, Homo sapiens
gttccctggttgtgaaaatacatgagataaatcatgaaggccactatcatcctccttctgcttgcacaagtttcctgggctggaccgtttcaacagagaggcttatttgactttatgctagaagatgaggcttctgggataggcccagaagttcctgatgaccgcgacttcgagccctccctaggcccagtgtgccccttccgctgtcaatgccatcttcgagtggtccagtgttctgatttggaactgggcaccaatccgctgaagagctcaggaattgaaaatggggctttccagggaatgaagaagctctcctacatccgcattgctgataccaatatcaccagcattcctcaaggtcttcctccttcccttacggaattacatcttgatggcaacaaaatcagcagagttgatgcagctagcctgaaaggactgaataatttggctaagttgggattgagtttcaacagcatctctgctgttgacaatggctctctggccaacacgcctcatctgagggagcttcacttggacaacaacaagcttaccagagtacctggtgggctggcagagcataagtacatccaggttgtctaccttcataacaacaatatctctgtagttggatcaagtgacttctgcccacctggacacaacaccaaaaaggcttcttattcgggtgtgagtcttttcagcaacccggtccagtactgggagatacagccatccaccttcagatgtgtctacgtgcgctctgccattcaactcggaaactataagtaattctcaagaaagccctcatttttataacctggcaaaatcttgttaatgtcattgctaaaaaataaataaaagctagatactggaaacctaactgcaatgtggatgttttacccacatgacttattatgcataaagccaaatttccagtttaagtaattgcctacaataaaaagaaattttgcctgccattttcagaatcatcttttgaagctttctgttgatgttaactgagctactagagatattcttatttcactaaatgtaaaatttggagtaaatatatatgtcaatatttagtaaagcttttcttttttaatttccaggaaaaaataaaaagagtatgagtcttctgtaattcattgagcagttagctcatttgagataaagtcaaatgccaaacactagctctgtattaatccccatcattactggtaaagcctcatttgaatgtgtgaattcaatacaggctatg

SEQ ID NO: 3745 - protein, 250 aa, Homo sapiens
MKATIILLLLAQVSWAGPFQQRGLFDFMLEDEASGIGPEVPDDRDFEPSLGPVCPFRCQCHLRVVQCSDLELGTNPLKSSGIENGAFQGMKKLSYIRIADTNITSIPQGLPPSLTELHLDGNKISRVDAASLKGLNNLAKLGLSFNSISAVDNGSLANTPHLRELHLDNNKLTRVPGGLAEHKYIQVVYLHNNNISVVGSSDFCPPGHNTKKASYSGVSLFSNPVQYWEIQPSTFRCVYVRSAIQLGNYK

SEQ ID NO: 3746 - DNA, 1144 bp, Homo sapiens
gttccctggttgtgaaaatacatgagataaatcatgaaggccactatcatcctccttctgcttgcacaagtttcctgggctggaccgtttcaacagagaggcttatttgactttatgctagaagatgaggcttctgggataggcccagaagttcctgatgaccgcgacttcgagccctccctaggcccagtgtgccccttccgctgtcaatgccatcttcgagtggtccagtgttctgatttgggtcttcctccttcccttacggaattacatcttgatggcaacaaaatcagcagagttgatgcagctagcctgaaaggactgaataatttggctaagttgggattgagtttcaacagcatctctgctgttgacaatggctctctggccaacacgcctcatctgagggagcttcacttggacaacaacaagcttaccagagtacctggtgggctggcagagcataagtacatccaggttgtctaccttcataacaacaatatctctgtagttggatcaagtgacttctgcccacctggacacaacaccaaaaaggcttcttattcgggtgtgagtcttttcagcaacccggtccagtactgggagatacagccatccaccttcagatgtgtctacgtgcgctctgccattcaactcggaaactataagtaattctcaagaaagccctcatttttataacctggcaaaatcttgttaatgtcattgctaaaaaataaataaaagctagatactggaaacctaactgcaatgtggatgttttacccacatgacttattatgcataaagccaaatttccagtttaagtaattgcctacaataaaaagaaattttgcctgccattttcagaatcatcttttgaagctttctgttgatgttaactgagctactagagatattcttatttcactaaatgtaaaatttggagtaaatatatatgtcaatatttagtaaagcttttcttttttaatttccaggaaaaaataaaaagagtatgagtcttctgtaattcattgagcagttagctcatttgagataaagtcaaatgccaaacactagctctgtattaatccccatcattactggtaaagcctcatttgaatgtgtgaattcaatacaggctatg

SEQ ID NO: 3747 - protein, 212 aa, Homo sapiens
MKATIILLLLAQVSWAGPFQQRGLFDFMLEDEASGIGPEVPDDRDFEPSLGPVCPFRCQCHLRVVQCSDLGLPPSLTELHLDGNKISRVDAASLKGLNNLAKLGLSFNSISAVDNGSLANTPHLRELHLDNNKLTRVPGGLAEHKYIQVVYLHNNNISVVGSSDFCPPGHNTKKASYSGVSLFSNPVQYWEIQPSTFRCVYVRSAIQLGNYK

SEQ ID NO: 3748 - DNA, 911 bp, Homo sapiens
gttccctggttgtgaaaatacatgagataaatcatgaaggccactatcatcctccttctgcttgcacaagtttcctgggctggaccgtttcaacagagaggcttatttgactttatgctagaagatgaggcttctgggataggcccagaagttcctgatgaccgcgacttcgagccctccctaggcccagtgtgccccttccgctgtcaatgccatcttcgagtggtccagtgttctgatttgggttgtctaccttcataacaacaatatctctgtagttggatcaagtgacttctgcccacctggacacaacaccaaaaaggcttcttattcgggtgtgagtcttttcagcaacccggtccagtactgggagatacagccatccaccttcagatgtgtctacgtgcgctctgccattcaactcggaaactataagtaattctcaagaaagccctcatttttataacctggcaaaatcttgttaatgtcattgctaaaaaataaataaaagctagatactggaaacctaactgcaatgtggatgttttacccacatgacttattatgcataaagccaaatttccagtttaagtaattgcctacaataaaaagaaattttgcctgccattttcagaatcatcttttgaagctttctgttgatgttaactgagctactagagatattcttatttcactaaatgtaaaatttggagtaaatatatatgtcaatatttagtaaagcttttcttttttaatttccaggaaaaaataaaaagagtatgagtcttctgtaattcattgagcagttagctcatttgagataaagtcaaatgccaaacactagctctgtattaatccccatcattactggtaaagcctcatttgaatgtgtgaattcaatacaggctatg

SEQ ID NO: 3749 - protein, 75 aa, Homo sapiens
MKATIILLLLAQVSWAGPFQQRGLFDFMLEDEASGIGPEVPDDRDFEPSLGPVCPFRCQCHLRVVQCSDLGCLPS

SEQ ID NO: 3750 - DNA, 1024 bp, Homo sapiens
gttccctggttgtgaaaatacatgagataaatcatgaaggccactatcatcctccttctgcttgcacaagtttcctgggctggaccgtttcaacagagaggcttatttgactttatgctagaagatgaggcttctgggataggcccagaagttcctgatgaccgcgacttcgagccctccctaggcccagtgtgccccttccgctgtcaatgccatcttcgagtggtccagtgttctgatttgggtctggacaaagtgccaaaggatcttccccctgacacaactctgctagacctgcaaaacaacaaaataaccgaaatcaaagatggagactttaagaacctgaagaaccttcacgttgtctaccttcataacaacaatatctctgtagttggatcaagtgacttctgcccacctggacacaacaccaaaaaggcttcttattcgggtgtgagtcttttcagcaacccggtccagtactgggagatacagccatccaccttcagatgtgtctacgtgcgctctgccattcaactcggaaactataagtaattctcaagaaagccctcatttttataacctggcaaaatcttgttaatgtcattgctaaaaaataaataaaagctagatactggaaacctaactgcaatgtggatgttttacccacatgacttattatgcataaagccaaatttccagtttaagtaattgcctacaataaaaagaaattttgcctgccattttcagaatcatcttttgaagctttctgttgatgttaactgagctactagagatattcttatttcactaaatgtaaaatttggagtaaatatatatgtcaatatttagtaaagcttttcttttttaatttccaggaaaaaataaaaagagtatgagtcttctgtaattcattgagcagttagctcatttgagataaagtcaaatgccaaacactagctctgtattaatccccatcattactggtaaagcctcatttgaatgtgtgaattcaatacaggctatg

SEQ ID NO: 3751 - protein, 172 aa, Homo sapiens
MKATIILLLLAQVSWAGPFQQRGLFDFMLEDEASGIGPEVPDDRDFEPSLGPVCPFRCQCHLRVVQCSDLGLDKVPKDLPPDTTLLDLQNNKITEIKDGDFKNLKNLHVVYLHNNNISVVGSSDFCPPGHNTKKASYSGVSLFSNPVQYWEIQPSTFRCVYVRSAIQLGNYK

SEQ ID NO: 3752 - DNA, 1804 bp, Homo sapiens
gtatcactcagaatctggcagccagttccgtcctgacagagttcacagcatatattggtggattcttgtccatagtgcatctgctttaagaattaacgaaagcagtgtcaagacagtaaggattcaaaccatttgccaaaaatgagtctaagtgcatttactctcttcctggcattgattggtggtaccagtggccagtactatgattatgattttcccctatcaatttatgggcaatcatcaccaaactgtgcaccagaatgtaactgccctgaaagctacccaagtgccatgtactgtgatgagctgaaattgaaaagtgtaccaatggtgcctcctggaatcaagtatctttaccttaggaataaccagattgaccatattgatgaaaaggcctttgagaatgtaactgatctgcagtggctcattctagatcacaaccttctagaaaactccaagataaaagggagagttttctctaaattgaaacaactgaagaagctgcatataaaccacaacaacctgacagagtctgtgggcccacttcccaaatctctggaggatctgcagcttactcataacaagatcacaaagctgggctcttttgaaggattggtaaacctgaccttcatccatctccagcacaatcggctgaaagaggatgctgtttcagctgcttttaaaggtcttaaatcactcgaataccttgacttgagcttcaatcagatagccagactgccttctggtctccctgtctctcttctaactctctacttagacaacaataagatcagcaacatccctgatgagtatttcaagcgttttaatgcattgcagtatctgcgtttatctcacaacgaactggctgatagtggaatacctggaaattctttcaatgtgtcatccctggttgagctggatctgtcctataacaagcttaaaaacataccaactgtcaatgaaaaccttgaaaactattacctggaggtcaatcaacttgagaagtttgacataaagagcttctgcaagatcctggggccattatcctactccaagatcaagcatttgcgtttggatggcaatcgcatctcagaaaccagtcttccaccggatatgtatgaatgtctacgtgttgctaacgaagtcactcttaattaatatctgtatcctggaacaatattttatggttatgtttttctgtgtgtcagttttcatagtatccatattttattactgtttattacttccatgaattttaaaatctgagggaaatgttttgtaaacatttattttttttaaagaaaagatgaaaggcaggcctatttcatcacaagaacacacacatatacacgaatagacatcaaactcaatgctttatttgtaaatttagtgtttttttatttctactgtcaaatgatgtgcaaaaccttttactggttgcatggaaatcagccaagttttataatccttaaatcttaatgttcctcaaagcttggattaaatacatatggatgttactctcttgcaccaaattatcttgatacattcaaatttgtctggttaaaaaataggtggtagatattgaggccaagaatattgcaaaatacatgaagcttcatgcacttaaagaagtatttttagaataagaatttgcatacttacctagtgaaacttttctagaattatttttcactctaagtcatgtatgtttctctttgattatttgcatgttatgtttaataagctactagcaaaataaaacatagcaaatgaaaaaaaaaaaaaaaaaaaaaaaaaaaaaaaa

SEQ ID NO: 3753 - protein, 338 aa, Homo sapiens
MSLSAFTLFLALIGGTSGQYYDYDFPLSIYGQSSPNCAPECNCPESYPSAMYCDELKLKSVPMVPPGIKYLYLRNNQIDHIDEKAFENVTDLQWLILDHNLLENSKIKGRVFSKLKQLKKLHINHNNLTESVGPLPKSLEDLQLTHNKITKLGSFEGLVNLTFIHLQHNRLKEDAVSAAFKGLKSLEYLDLSFNQIARLPSGLPVSLLTLYLDNNKISNIPDEYFKRFNALQYLRLSHNELADSGIPGNSFNVSSLVELDLSYNKLKNIPTVNENLENYYLEVNQLEKFDIKSFCKILGPLSYSKIKHLRLDGNRISETSLPPDMYECLRVANEVTLN

SEQ ID NO: 3754 - DNA, 1304 bp, Homo sapiens
gcagaacaaagaatactccacttttgatagatggggttaccaggattcaggctacatggcctgaggcaaggtcacaacatgagtgacagaatgtgtcctggaagccaggcatcctctggggtgtatttggggcgctcaacaaggcttgatcgagctttgggggtagatctagctattccatggggattcttttcagaattgctgttttcggtaactaattccatgaccaggtccatggcattggatgacattgcgctacactgttgctcacccgggtcacccgtcctcacaggttggatggcaagcatgttgtgttcggtcacgtcaaagagggcatggacgtcgtgaagaaaaatagaatctttcggctctaagagtgggaggacatccaagaagattgtcatcacagactgtggccagttgagctaatctgtggcccagggtgctggcatggtggcagctgcaaatgtccatgcacccaggtggcccgcgttgggctgtcagccaaggtgcctgaaacgatacgtgtgcccactccactgtcacagtgtgcctgaggaaggctgctagggatgttagacctcggccaggacccaccacattgcttcctaatacccacccttcctcacgacctcatttctgggcatctttgtggacatgatgtcacccaccccttgtcaagcattgcctgtgattgcccagcccagattcatctgtgccttggacatggtgatggtgatgggttgccatccaagtgaaagtcttttccttgaccaagggggacagtcagttttgcaaaaggactctaatacctgtttaatattgtcttcctaattgggataatttaattaacaagattgactagaagtgaaactgcaacactaacttccccgtgctgtggtgtgacctgagttggtgacacaggccacagaccccagagcttggcttttgaaacacaactcagggcttttgtgaaggttcccccgctgagatctttcctcctggttactgtgaagcctgttggtttgctgctgtcgtttttgaggagggcccatgggggtaggagcagttgaacctgggaacaaacctcacttgagctgtgcctagacaatgtgaattcctgtgttgctaacagaagtggcctgtaagctcctgtgctccggagggaagcatttcctggtaggctttgatttttctgtgtgttaaagaaattcaatctactcatgatgtgttatgcataaaacatttctggaacatggatttgtgttcaccttaaatgtgaaaataaatcctattttctatgg

SEQ ID NO: 3755 - DNA, 1132 bp, Homo sapiens
ggattgaaacaagatggcgggttcgtggtgagaagccgtcaaggagtagaaattggtatgcttagaagcagattctaaaagcagtttctcttcagaacatcttttttcataccacttgataagcatcttgaaacaccatggctgtagctgcagtaaaatgggtgatgtcaaagagaactatcttgaaacatttatttccagtccaaaatggagctttatattgtgtttgtcataaatctacgtattctcctctaccagatgactataattgcaacgtagagcttgctctgacttctgatggcaggacaatagtatgctaccacccttctgtggacattccatatgaacacacaaaacctatccctcggccagatcctgtgcataataatgaagaaacacatgatcaagtgctgaaaaccagattggaagaaaaagttgaacaccttgaggaaggacctatgatagaacaacttagcaaaatgttctttactactaagcaccgttggtatcctcatggacggtatcacagatgtcgtaagaatctgaatcctccaaaagacagatgatgcggaggttcctgggggaatcaaagagaaatgtgcctcatttgccatttgagaaaatgcagtctggtgtattcagtaatatatagtaaagtaataatgataaaatatcttttcatatattagaatgtgtacttttatataaagtaattctggatttgacattctcatttagagaaacctattttcttttttctttttctattttagtgtttcatttatgtgcggtctccaatttaggacttttccatagtgccaaagccatacatattcagtagaacatcaataaattacatcagaaattcaacactttattataaaacgggcttcgtgttagataattttgctaaacagtaggctactgtaagtgttctgagcatatttaagacaggctagcattttcaatttacaatattttcaactgatagtaggtttattgggatgtaaccctatgataagttgagaaacatctctttttgtgtgtctactgtgatttaagtatttttaatcatcagccaagcattgttagtagtataaatatgattaataaaaatgtgcatggctttcct

SEQ ID NO: 3756 - protein, 142 aa, Homo sapiens
MAVAAVKWVMSKRTILKHLFPVQNGALYCVCHKSTYSPLPDDYNCNVELALTSDGRTIVCYHPSVDIPYEHTKPIPRPDPVHNNEETHDQVLKTRLEEKVEHLEEGPMIEQLSKMFFTTKHRWYPHGRYHRCRKNLNPPKDR

SEQ ID NO: 3757 - DNA, 2210 bp, Homo sapiens
agccgcggcctcaactaaaagtggccattgacctttcaagctttcgagcagtgatgcaatagaatagtatttcaaagaaaaatgcttatcgaaattttggatccggttttcccgtgattgttaagggtttcttttaaaaagtaggtcacatttcaagtaggtcatatttcgggggcgggtgcgcagacaaggagatgagtttccactaaggccagggggcctccaacggggttggaggtgagaatcccaggtagggtagaggtgccgagatccttccgaatcccagccctggggcgtcagccctgcagggaatggcagagacactctccggactgagggaaccgaggccagtcaccaagccccttccgggcgcgcaggcgatcagtgggtgaccgcggctgcgagggactttgtcatccgtcctccaggatctggggagaaagagccccatcccttctctctctgccaccatttcggacaccccgcagggactcgttttgggattcgcactgacttcaaggaaggacgcgaacccttctctgaccccagctcgggcggccacctgtctttgccgcggtgacccttctctcatgaccctgcggtgccttgagccctccgggaatggcggggaagggacgcggagccagtgggggaccgcggggtcggcggaggagccatccccgcaggcggcgcgtctggcgaaggccctgcgggagctcggtcagacaggatggtactggggaagtatgactgttaatgaagccaaagagaaattaaaagaggcaccagaaggaactttcttgattagagatagctcgcattcagactacctactaacaatatctgttaaaacatcagctggaccaactaatcttcgaatcgaataccaagacggaaaattcagattggactctatcatatgtgtcaaatccaagcttaaacaatttgacagtgtggttcatctgatcgactactatgttcagatgtgcaaggataagcggacaggtccagaagccccccggaacggcactgttcacctttatctgaccaaaccgctctacacgtcagcaccatctctgcagcatctctgtaggctcaccattaacaaatgtaccggtgccatctggggactgcctttaccaacaagactaaaagattacttggaagaatataaattccaggtataaatgtttctctttttttaaacatgtctcacatagagtatctccgaatgcagctatgtaaaagagaaccaaaacttgagtgctctggataactatatggaatgctttctaagaacagctgaagctaatctaatttaaatttaacagcttgaagaggtagctaggtgtttaaagttcctccagatacttttacctgagtgatgcttcccttcctaaggctgaccaagacctgttgatccttttagattaaaaataaaatgtcgcatgtaaaggctgaagtcgcgttttatcagaatgccttgccttcttaggttcttttccattatgtcaaaggtccaggctccagtaggagagaaagaactcctcataggaatactgaagaagtgggaaggaaccaagctgacacaggcctcactgcaatttgatatgcctgctgatcagagtctcttgggcattttatattttgcattctgatgtacctaggagttttgttaaacagatgatgtatgtgagtatttatcccattttatgcaattaaccaaatcaaccaaaaaaagtgaccatgaagtcctgtatttgtctttttactacatgtaggaactctcatgtgaatgagtactgtagtaatccattctatgggagccttatttcagaaatatttcaaactggtgcaaatggaaaagactttctcttttcctttaaagctaaagacaagaatatcatgctatacaggtgcaactcaatccccgttaataaaaaccaatgtaggtataggcattctaccctttgaaatagctgtgtcccaacctgttgccattgattttttggaaatggctttagaaatatccaagttgtccttgaattgtctaaccatggacataaacagttgtctcccttctactgtgtagaatactttgacttaattttcttccagatacagggggatacctgcctgtttttcaaagtgtttatttactgctgttactatttgattagaatgtattaaataaaaaaaacctgatttct

SEQ ID NO: 3758 - protein, 198 aa, Homo sapiens
MTLRCLEPSGNGGEGTRSQWGTAGSAEEPSPQAARLAKALRELGQTGWYWGSMTVNEAKEKLKEAPEGTFLIRDSSHSDYLLTISVKTSAGPTNLRIEYQDGKFRLDSIICVKSKLKQFDSVVHLIDYYVQMCKDKRTGPEAPRNGTVHLYLTKPLYTSAPSLQHLCRLTINKCTGAIWGLPLPTRLKDYLEEYKFQV

SEQ ID NO: 3759 - DNA, 1709 bp, Homo sapiens
ggtgccgcatccccagcccgccgccatggccgcctacaaactggtgctgatccggcacggcgagagcgcatggaacctggagaaccgcttcagcggctggtacgacgccgacctgagcccggcgggccacgaggaggcgaagcgcggcgggcaggcgctacgagatgctggctatgagtttgacatctgcttcacctcagtgcagaagagagcgatccggaccctctggacagtgctagatgccattgatcagatgtggctgccagtggtgaggacttggcgcctcaatgagcggcactatgggggtctaaccggtctcaataaagcagaaactgctgcaaagcatggtgaggcccaggtgaagatctggaggcgctcctatgatgtcccaccacctccgatggagcccgaccatcctttctacagcaacatcagtaaggatcgtaggtatgcagacctcacagaagatcagctaccctcctgtgagagtctgaaggatactattgccagagctctgcccttctggaatgaagaaatagttccccagatcaaggaggggaaacgtgtactgattgcagcccatggcaacagcctccggggcattgtcaagcatctggagggtctctctgaagaggctatcatggagctgaacctgccgactggtattcccattgtctatgaattggacaagaacttgaagcctatcaagcccatgcagtttctgggggatgaagagacggtgcgcaaagccatggaagctgtggctgcccagggcaaggccaagaagtgaaggccggcggggaggatactgtccccaggagcaccctccctgcccgtcttgtccctctgcccctcccacctgcacatgtcacactgaccacatctgtagacatcttgagttgtagctgcagatggggaccagtggctcccattttcattttagccattttgtcgcctgcacccactcccttcatacaatctagtcagaatagcagttctagagcacaggttctcagtctaagctatggaaaagctccccttatccaacagagtttaaaagtagtgacttgggtttttgcgagtgctttgtttactaaggactttggggaggaaccatgctaagccatgaccagtgaggagaagcaacagagcctgtctgtccccatgagcggagtctgtcctctgctcttctgcagtcaggccactgcctactgcctgggggctctagtcattccagtggaagacgaatgtaacctgcgtggtgatgtgacaactgtttcctccctgaccccagaggatctggctctaggttgggatcaatcctgaatttcgttatgtgttaatttacttttattaaaaaagtatagtatatataaataatacaaaacaataacccttctggggtttcttgtggcggttgaaatagtcccacatgtggtcatcagaaaataagccattcctcataccaatataggatcagctccttgacctctgaggggcaggagtgcttcctggtgtgtgtattagaatcccttcctgccttgtttcatggcagtgaaatgcctcttggtcctgtccaagtgtatctttcactgatttctgaatcatgttctagttgcttgaccctgccacatgggtccagtgttcatctgagcataactgtactaaatcctttttccatatcagtataataaaggagtgatgtgcaa

SEQ ID NO: 3760 - protein, 254 aa, Homo sapiens; identical to SEQ ID NO: 3027

SEQ ID NO: 3761 - DNA, 433 bp, Homo sapiens
ggccatttctcttgaaactgcggctcgggacctgcggtacctgctgtagtcacgagggacgggcggcggcctggtcggcagagagtagcctgcaacattcggccgtgagtttacccctcaatcccaaacctttcctcaatggactaacaggaaagccagtgatggtgaaacttaagtggggaatggagtacaagggctatctggtatctgtagatggctacatgaacatgcagcttgcaaatacagaagaatacatagatggagctttgtctggacatctgggtgaagttttaataaggtgtaataatgtcctttatatcagaggtgtggaagaagaggaagaagatggggaaatgagagaatagcatcttttgtgggggattttttttatatatatttctagacaataaagatttgtttgtttttcaacttg

SEQ ID NO: 3762 - protein, 86 aa, Homo sapiens
  unsure 1: unknown amino acid
XSLPLNPKPFLNGLTGKPVMVKLKWGMEYKGYLVSVDGYMNMQLANTEEYIDGALSGHLGEVLIRCNNVLYIRGVEEEEEDGEMRE

SEQ ID NO: 3763 - DNA, 2060 bp, Homo sapiens
ctctatcgacgagtctggtagctgagcgttgggctgtaggtcgctgtgctgtgtgatcccccagagccatgcccgagatagtggatacctgttcgttggcctctccggcttccgtctgccggaccaagcacctgcacctgcgctgcagcgtcgactttactcgccggacgctgaccgggactgctgctctcacggtccagtctcaggaggacaatctgcgcagcctggttttggatacaaaggaccttacaatagaaaaagtagtgatcaatggacaagaagtcaaatatgctcttggagaaagacaaagttacaagggatcgccaatggaaatctctcttcctatcgctttgagcaaaaatcaagaaattgttatagaaatttcttttgagacctctccaaaatcttctgctctccagtggctcactcctgaacagacttctgggaaggaacacccatatctctttagtcagtgccaggccatccactgcagagcaatccttccttgtcaggacactccttctgtgaaattaacctatactgcagaggtgtctgtccctaaagaactggtggcacttatgagtgctattcgtgatggagaaacacctgacccagaagacccaagcaggaaaatatacaaattcatccaaaaagttccaataccctgctacctgattgctttagttgttggagctttagaaagcaggcaaattggcccaagaactttggtgtggtctgagaaagagcaggtggaaaagtctgcttatgagttttctgagactgaatctatgcttaaaatagcagaagatctgggaggaccgtatgtatggggacagtatgacctattggtcctgccaccatccttcccttatggtggcatggagaatccttgccttacttttgtaactcctactctactggcaggcgacaagtcactctccaatgtcattgcacatgaaatatctcatagctggacagggaatctagtgaccaacaaaacttgggatcacttttggttaaatgagggacatactgtgtacttggaacgccacatttgcggacgattgtttggtgaaaagttcagacattttaatgctctgggaggatggggagaactacagaattcggtaaagacatttggggagacacatcctttcaccaaacttgtggttgatctgacagatatagaccctgatgtagcttattcttcagttccctatgagaagggctttgctttacttttttaccttgaacaactgcttggaggaccagagattttcctaggattcttaaaagcttatgttgagaagttttcctataagagcataactactgatgactggaaggatttcctgtattcctattttaaagataaggttgatgttctcaatcaagttgattggaatgcctggctctactctcctggactgcctcccataaagcccaattatgatatgactctgacaaatgcttgtattgccttaagtcaaagatggattactgccaaagaagatgatttaaattcattcaatgccacagacctgaaggatctctcttctcatcaattgaatgagtttttagcacagacgctccagagggcacctcttccattggggcacataaagcgaatgcaagaggtgtacaacttcaatgccattaacaattctgaaatacgattcagatggctgcggctctgcattcaatccaagtgggaggacgcaattcctttggcgctaaagatggcaactgaacaaggaagaatgaagtttacccggcccttattcaaggatcttgctgcctttgacaaatcccatgatcaagctgtccgaacctaccaagagcacaaagcaagcatgcatcccgtgactgcaatgctggtggggaaagacttaaaagtggattaaagacctgcgtattgatgattttagagatttctcttttttaaatggaattcgtaaagaaatataaaacttcagctcacaattaaaactgtctttttagttttggctttttattgttttgttggtgattttactgaaataaagatgagctacttcttc

SEQ ID NO: 3764 - protein, 611 aa, Homo sapiens
MPEIVDTCSLASPASVCRTKHLHLRCSVDFTRRTLTGTAALTVQSQEDNLRSLVLDTKDLTIEKVVINGQEVKYALGERQSYKGSPMEISLPIALSKNQEIVIEISFETSPKSSALQWLTPEQTSGKEHPYLFSQCQAIHCRAILPCQDTPSVKLTYTAEVSVPKELVALMSAIRDGETPDPEDPSRKIYKFIQKVPIPCYLIALVVGALESRQIGPRTLVWSEKEQVEKSAYEFSETESMLKIAEDLGGPYVWGQYDLLVLPPSFPYGGMENPCLTFVTPTLLAGDKSLSNVIAHEISHSWTGNLVTNKTWDHFWLNEGHTVYLERHICGRLFGEKFRHFNALGGWGELQNSVKTFGETHPFTKLVVDLTDIDPDVAYSSVPYEKGFALLFYLEQLLGGPEIFLGFLKAYVEKFSYKSITTDDWKDFLYSYFKDKVDVLNQVDWNAWLYSPGLPPIKPNYDMTLTNACIALSQRWITAKEDDLNSFNATDLKDLSSHQLNEFLAQTLQRAPLPLGHIKRMQEVYNFNAINNSEIRFRWLRLCIQSKWEDAIPLALKMATEQGRMKFTRPLFKDLAAFDKSHDQAVRTYQEHKASMHPVTAMLVGKDLKVD

SEQ ID NO: 3765 - DNA, 1313 bp, Homo sapiens
gcaacctttccaagggagtggttgtgtgatcgccatcttagggaaaagatgttctcgtccgtggcgcacctggcgcgggcgaaccccttcaacacgccacatctgcagctggtgcacgatggtctcggggacctccgcagcagctccccagggcccacgggccagccccgccgccctcgcaacctggcagccgccgccgtggaagagtacagttgtgaatttggctccgcgaagtattatgcactgtgtggctttggtggggtcttaagttgtggtctgacacacactgctgtggttcccctggatttagtgaaatgccgtatgcaggtggacccccaaaagtacaagggcatatttaacggattctcagttacacttaaagaggatggtgttcgtggtttggctaaaggatgggctccgactttccttggctactccatgcagggactctgcaagtttggcttttatgaagtctttaaagtcttgtatagcaatatgcttggagaggagaatacttatctctggcgcacatcactatatttggctgcctctgccagtgctgaattctttgctgacattgccctggctcctatggaagctgctaaggttcgaattcaaacccagccaggttatgccaacactttgagggatgcagctcccaaaatgtataaggaagaaggcctaaaagcattctacaagggggttgctcctctctggatgagacagataccatacaccatgatgaagttcgcctgctttgaacgtactgttgaagcactgtacaagtttgtggttcctaagccccgcagtgaatgttcaaagccagagcagctggttgtaacatttgtagcaggttacatagctggagtcttttgtgcaattgtttctcaccctgctgattctgtggtatctgtgttgaataaagaaaaaggtagcagtgcttctctggtcctcaagagacttggatttaaaggtgtatggaagggactgtttgcccgtatcatcatgattggtaccctgactgcactacagtggtttatctatgactccgtgaaggtctacttcagacttcctcgccctcctccacccgagatgccagagtctctgaagaagaagcttgggttaactcagtagttagatcaaagcaaatgtggactgaatctgcttgttgatcagtgttgaagaaagtgcaaaaggaacttttatatatttgacagtgtaggaaattgtctattcctgatataattactgtagtactcttgcttaaggcaagagtttcagatttactgttgaaataaacccaactcttcatg

SEQ ID NO: 3766 - DNA, 2158 bp, Homo sapiens
gcacactgaagagtacgtcttcgggtctacccctaatcacataatggctgtgtttaatcagaagtctgtctcggatatgattaaagagtttcgaaaaaattggcgtgctctttgtaactctgagagaaccactctatgtggtgcagactccatgctcttggcattgcagctttctatggcggagaacaacaaacagtggagaatttacagtctctctcagtgatgttttattgacatggaaatacttgctccatgagaaattgaacttaccagttgaaaacatggacgtgactgaccattatgaggacgttaggaagatttatgatgatttcttgaagaacagtaatatgttagatctgattgatgtttatcaaaaatgtagggctttgacttctaattgtgaaaattataacacagtatctcctagtcaactactggattttctgtctggcaaacagtatgcagtaggtgatgaaactgatctttctataccaacatcaccaacaagtaaatacaaccgtgataatgaaaaggtgcagctgctagcaaggaaaattatcttttcatatttaaatctgctagtgaattcaaagaatgacctggctgtggcttatattctcaatattcctgatagaggactaggaagagaagccttcactgatttgaaacatgctgctcgagagaaacaaatgtctatctttttggtggccacgtcttttattagaacaatagagcttggagggaaaggatatgcaccaccaccatcagatcctttaaggacacatgtaaagggattgtctaattttattaatttcattgacaaattagatgagattcttggagaaataccaaacccaagcattgcagggggtcaaatactgtcagtgataaagatgcaactgattaaaggccaaaacagcagggatcctttttgcaaagcaatagaggaagttgctcaggatttggatttgaggattaaaaatattatcaattctcaagaaggtgttgtagctcttagcaccactgacatcagtcctgctcggccaaaatctcatgccataaaccatggtactgcatactgtggcagagatactgtgaaagccttattagttcttttggacgaagaagcagctaatgctcctaccaaaaacaaagcagagcttttatatgatgaggaaaacacaatccatcatcatggaacgtctattcttacactttttaggtctcccacacaggtgaataattcgataaaacccctaagagaacgcatctgtgtgtcaatgcaagagaaaaaaattaagatgaagcaaactttaattagatcccaatttgcttgtacttataaagatgactacatgataagcaaggataattggaataatgttaatttagcatcaaagcctttgtgtgttctttacatggaaaatgacctttctgagggtgtaaatccatctgttggaagatcaacaattggaacgagttttggaaatgttcatctggacagaagtaaaaatgaaaaagtatcaagaaaatcaaccagtcagacaggaaataaaagctcaaaaaggaaacaggtggatttggatggtgaaaatattctctgtgataatagaaatgaaccacctcaacataaaaatgctaaaatacctaagaaatcaaatgattcacagaatagattgtacggcaaactagctaaagtagcaaaaagtaataaatgtactgccaaggacaagttgatttctggccaggcaaagttaactcagttttttagactataaatttgtgtcttatatgctttaggtttatgtatctataaaccattcaccaaagacatgcttaatttttaagagatcaaggtgtaaattatgatgatttattattttggtctacagtgtatgtaaggttagtatgttaagcactgtttttgactttttaaaaataccttagatgcaaatttataggagaaaaaacactttcagataagaggtgtttgctgggatggaagaactacctggcatgtaagaaatatcgtcagtcgtcctaatgcatattgtgactgtttgcatatacttctgtttataaaagtatcagttttacttttcagaggatttgtaagaatcatttaaattttcattgaaataaacgacaagtcacattg

SEQ ID NO: 3767 - DNA, 276 bp, Homo sapiens
atggcaagccaagcgtttagaaagtttcttccactccttgaccgagttttggttgaaaggcgtgctgctgaaactgtaaccaaaggaggcattatgcttccagaaaaatctcaaggaaaattattgcaagcaagaggtagagagattcaaccagttagcgtgaaagttggagataaagttcttctcccagaatatggaggcaccaaagtagttctagatgacaaggattatttcctatttagagatggtgacattcttagaaagtacgtagactga

SEQ ID NO: 3768 - protein, 91 aa, Homo sapiens
MASQAFRKFLPLLDRVLVERRAAETVTKGGIMLPEKSQGKLLQARGREIQPVSVKVGDKVLLPEYGGTKVVLDDKDYFLFRDGDILRKYVD

SEQ ID NO: 3769 - DNA, 1629 bp, Homo sapiens
ccgagacccggcgcaagagagcgcagccttagtaggagaggaacgcgagacgcggcagagcgcgttcagcactgacttttgctgctgcttctgcttttttttttcttagaaacaagaaggcgccagcggcagcctcacacgcgagcgccacgcgaggctcccgaagccaacccgcgaagggaggaggggagggaggaggaggcggcgtgcagggaggagaaaaagcattttcactttttttgctcccactctaagaagtctcccggggattttgtatatattttttaacttccgtcagggctcccgcttcatatttccttttctttccctctctgttcctgcacccaagttctctctgtgtccccctcgcgggccccgcacctcgcgtcccggatcgctctgattccgcgactccttggccgccgctgcgcatggaaagctctgccaagatggagagcggcggcgccggccagcagccccagccgcagccccagcagcccttcctgccgcccgcagcctgtttctttgccacggccgcagccgcggcggccgcagccgccgcagcggcagcgcagagcgcgcagcagcagcagcagcagcagcagcagcagcagcaggcgccgcagctgagaccggcggccgacggccagccctcagggggcggtcacaagtcagcgcccaagcaagtcaagcgacagcgctcgtcttcgcccgaactgatgcgctgcaaacgccggctcaacttcagcggctttggctacagcctgccgcagcagcagccggccgccgtggcgcgccgcaacgagcgcgagcgcaaccgcgtcaagttggtcaacctgggctttgccacccttcgggagcacgtccccaacggcgcggccaacaagaagatgagtaaggtggagacactgcgctcggcggtcgagtacatccgcgcgctgcagcagctgctggacgagcatgacgcggtgagcgccgccttccaggcaggcgtcctgtcgcccaccatctcccccaactactccaacgacttgaactccatggccggctcgccggtctcatcctactcgtcggacgagggctcttacgacccgctcagccccgaggagcaggagcttctcgacttcaccaactggttctgaggggctcggcctggtcaggccctggtgcgaatggactttggaagcagggtgatcgcacaacctgcatctttagtgctttcttgtcagtggcgttgggagggggagaaaaggaaaagaaaaaaaaaagaagaagaagaagaaaagagaagaagaaaaaaacgaaaacagtcaaccaaccccatcgccaactaagcgaggcatgcctgagagacatggctttcagaaaacgggaagcgctcagaacagtatctttgcactccaatcattcacggagatatgaagagcaactgggacctgagtcaatgcgcaaaatgcagcttgtgtgcaaaagcagtgggctcctggcagaagggagcagcacacgcgttatagtaactcccatcacctctaacacgcacagctgaaagttcttgctcgggtcccttcacctcctcgccctttcttaaagtgcagttcttagccctctagaaacgagttggtgtctttc

SEQ ID NO: 3770 - protein, 236 aa, Homo sapiens
MESSAKMESGGAGQQPQPQPQQPFLPPAACFFATAAAAAAAAAAAAAQSAQQQQQQQQQQQQAPQLRPAADGQPSGGGHKSAPKQVKRQRSSSPELMRCKRRLNFSGFGYSLPQQQPAAVARRNERERNRVKLVNLGFATLREHVPNGAANKKMSKVETLRSAVEYIRALQQLLDEHDAVSAAFQAGVLSPTISPNYSNDLNSMAGSPVSSYSSDEGSYDPLSPEEQELLDFTNWF

SEQ ID NO: 3771 - DNA, 3794 bp, Homo sapiens
ggtcgagtcctgaaggagggcctgatgtcttcatcattctcaaattcttgtaagctctgcgtcgggtgaaaccagacaaagccgcgagcccagggatgggagcacgcgggggacggcctgccggcggggacgacagcattgcgcctgggtgcagcagtgtgcgtctcggggaagggaagatattttaaggcgtgtctgagcagacggggaggcttttccaaacccaggcagcttcgtggcgtgtgcggtttcgacccggtcacacaaagcttcagcatgtcatgtgaggacggtcgggccctggaaggaacgctctcggaattggccgcggaaaccgatctgcccgttgtgtttgtgaaacagagaaagataggcggccatggtccaaccttgaaggcttatcaggagggcagacttcaaaagctactaaaaatgaacggccctgaagatcttcccaagtcctatgactatgaccttatcatcattggaggtggctcaggaggtctggcagctgctaaggaggcagcccaatatggcaagaaggtgatggtcctggactttgtcactcccacccctcttggaactagatggggtctcggaggaacatgtgtgaatgtgggttgcatacctaaaaaactgatgcatcaagcagctttgttaggacaagccctgcaagactctcgaaattatggatggaaagtcgaggagacagttaagcatgattgggacagaatgatagaagctgtacagaatcacattggctctttgaattggggctaccgagtagctctgcgggagaaaaaagtcgtctatgagaatgcttatgggcaatttattggtcctcacaggattaaggcaacaaataataaaggcaaagaaaaaatttattcagcagagagatttctcattgccactggtgaaagaccacgttacttgggcatccctggtgacaaagaatactgcatcagcagtgatgatcttttctccttgccttactgcccgggtaagaccctggttgttggagcatcctatgtcgctttggagtgcgctggatttcttgctggtattggtttagacgtcactgttatggttaggtccattcttcttagaggatttgaccaggacatggccaacaaaattggtgaacacatggaagaacatggcatcaagtttataagacagttcgtaccaattaaagttgaacaaattgaagcagggacaccaggccgactcagagtagtagctcagtccaccaatagtgaggaaatcattgaaggagaatataatacggtgatgctggcaataggaagagatgcttgcacaagaaaaattggcttagaaaccgtaggggtgaagataaatgaaaagactggaaaaatacctgtcacagatgaagaacagaccaatgtgccttacatctatgccattggcgatatattggaggataaggtggagctcaccccagttgcaatccaggcaggaagattgctggctcagaggctctatgcaggttccactgtcaaggtgactatgaaaatgttccaaccactgtatttactcctttggaatatggtgcttgtggcctttctgaggagaaagctgtggagaagtttggggaagaaaatattgaggtttaccatagttacttttggccattggaatggacgattccgtcaagagataacaacaaatgttatgcaaaaataatctgtaatactaaagacaatgaacgtgttgtgggctttcacgtactgggtccaaatgctggagaagttacacaaggctttgcagctgcgctcaaatgtggactgaccaaaaagcagctggacagcacaattggaatccaccctgtctgtgcagaggtattcacaacattgtctgtgaccaagcgctctggggcaagcatcctccaggctggctgctgaggttaagccccagtgtggatgctgttgccaagactgcaaaccactggctcgtttccgtgcccaaatccaaggcgaagttttctagagggttcttgggctcttggcacctgcgtgtcctgtgcttaccaccgcccaaggcccccttggatctcttggataggagttggtgaatagaaggcaggcagcatcacactggggtcactgacagacttgaagctgacatttggcagggcatcgaagggatgcatccatgaagtcaccagtctcaagcccatgtggtaggcggtgatggaacaactgtcaaatcagttttagcatgacctttccttgtggattttcttattctcgttgtcaagttttctagggttgaatttttttcttttttctccatggtgttaatgatattagagatgaaaaacgttagcagttgatttttgtccaaaagcaagtcatggctagagtatccatgcaaggtgtcttgttgcatggaagggatagtttggctcccttggaggctatgtaggcttgtcccgggaaagagaactgtcctgcagctgaaatggactgttctttactgacctgctcagcagtttcttctctcatatattcccaaaacaagtacatctgcgatcaactctagccaaatttgcccctgtgtgctacatgatggatgattattattttaaggtctgtttaggaagggaaatggctacttggccagccattgcctggcatttggtagtatagtatgattctcaccattatttgtcatggaggcagacatacaccagaaatgggggagaaacagtacatatctttctgtctttagtttattgtgtgctggtctaagcaagctgagatcatttgcaatggaaaacacgtaacttgtttaaaagtttttctggtagctttagctttatgctaaaaaaaataatgacattgggtatctatttctttctaagactacattagtaggaaaataagtcttttcatgcttatgatttagctgttttgtggtaattgctttttaaaggaagttattaatatcataagttattattaatattttgaacacaggtggatgtgaaggattttcatttaaaaaccaagtggttttgactttttctgttgaatgaacaactgtgccttgtggaatttttgcagaagtgtttatgctttgttagcatttcaacttgcattattataaagaggtattaatgcctcagttatgtgtttgtcaatgtactggctgaggattctatctcagctgtcttttctaactgtgtaggttgagttttgaacacgtgcttgtggacatcaggcctcctgccagcagttcttgaagcttctttttcattcctgctactctacctgtatttctcagttgcagcactgagtggtcaaaatacatttctgggccacctcagggaacccatgcatctgcctggcatttaggcagcagagcccctgaccgtcccccacagggctctgcctcacgtcctcatctcatttggctgtgtaaagaaatgggaaaagggaaaaggagagagcaattgaggcagttgaccatattcagttttatttatttatttttaatttgtttttttctccaagtccaccagtctctgaaattagaacagtaggcggtatgagataatcaggcctaatcatgttgtgattctcttttcttagtggagtggaatgttctatccccacaagaaggattatatcttatagacttgtcttgttcagattctgtatttacccattttattgaaacatatactaagttccatgtatttttgttacaaatcttctgaaaaaaaacaaaacaatgtgaaacattaaaattaaaaggcattaataata

SEQ ID NO: 3772 - DNA, 618 bp, Homo sapiens
cttttgcgggtggcggcgaacgcggagagcacgccatgaaggcctcgggcacgctacgagagtacaaggtagtgggtcgctgcctgcccacccccaaatgccacacgccgcccctctaccgcatgcgaatctttgcgcctaatcatgtcgtcgccaagtcccgcttctggtactttgtatctcagttaaagaagatgaagaagtcttcaggggagattgtctactgtgggcaggtgtttgagaagtcccccctgcgggtgaagaacttcaggatctggctgcgctatgactcccggagcggcacccacaacatgtaccgggaataccgggacctgaccaccgcaggcgctgtcacccagtgctaccgagacatgggtgcccggcaccgcgcccgagcccactccattcagatcatgaaggtggaggagatcgcggccagcaagtgccgccggccggctgtcaagcagttccacgactccaagatcaagttcccgctgccccaccgggtcctgcgccgtcagcacaagccacgcttcaccaccaagaggcccaacaccttcttctaggtgcagggccctcgtccgggtgtgccccaaataaactcaggaacgccccggt

SEQ ID NO: 3773 - DNA, 1064 bp, Homo sapiens
cgcatccccagcccgccgccatggccgcctacaaactggtgctgatccggcacggcgagagcgcatggaacctggagaaccgcttcagcggctggtacgacgccgacctgagcccggcgggccacgaggaggcgaagcgcggcgggcaggcgctacgagatgctggctatgagtttgacatctgcttcacctcagtgcagaagatctggaggcgctcctatgatgtcccaccacctccgatggagcccgaccatcctttctacagcaacatcagtaaggatcgcaggtatgcagacctcacagaagatcagctaccctcctgtgagagtctgaaggatactattgccagagctctgcccttctggaatgaagaaatagttccccagatcaaggaggggaaacgtgtactgattgcagcccatggcaacagcctccggggcattgtcaagcatctggagggtctctctgaagaggctatcatggagctgaacctgccgactggtattcccattgtctatgaattggacaagaacttgaagcctatcaagcccatgcagtttctgggggatgaggagacggtgcgcaaagccatggaagctgtggctgcccagggcaaggccaagaagtgaaggccggcggggaagatactgtccccaggagcaccctccctgcccatcttgtccctctgcccctcccacctgcacatgtcacactgaccacatctgtagacatcttgagttgtagctgcagatggggaccagtggctcccattttcattttagccattttgtcgcctgcacccactcccttcatacaatctagtcagaatagcagttctagagcacaggttctcagtctaagctatggaaaagctccccttatccaacagagtttaaaaccatgctaagccatgaccagtgagaagaagcaacagagcctgtctgtccccatgagcggagtctgtcctctgctcttctgcagtcaggtcactgcctactgcctgggggctctagtcattccagtggaagacgaatgtaacctgcgtggtgatgtgacaactgttt

SEQ ID NO: 3774 - DNA, 2769 bp, Homo sapiens
gtgggcggaccgcgcggctggaggtgtgaggatccgaacccaggggtggaggcggctcctgcgatcgaaggggacttgagactcaccggccgcacgccatgagggccctgtgggtgctgggcctctgctgcgtcctgctgaccttcgggtcggtcagagctgacgatgaagttgatgtggatggtacagtagaagaggatctgggtaaaagtagagaaggatcaaggacggatgatgaagtagtacagagagaggaagaagctattcagttggatggattaaatgcatcacaaataagagaacttagagagaagtcggaaaagtttgccttccaagccgaagttaacagaatgatgaaacttatcatcaattcattgtataaaaataaagagattttcctgagagaactgatttcaaatgcttctgatgctttagataagataaggctaatatcactgactgatgaaaatgctctttctggaaatgaggaactaacagtcaaaattaagtgtgataaggagaagaacctgctgcatgtcacagacaccggtgtaggaatgaccagagaagagttggttaaaaaccttggtaccatagccaaatctgggacaagcgagtttttaaacaaaatgactgaagcacaggaagatggccagtcaacttctgaattgattggccagtttggtgtcggtttctattccgccttccttgtagcagataaggttattgtcacttcaaaacacaacaacgatacccagcacatctgggagtctgactccaatgaattttctgtaattgctgacccaagaggaaacactctaggacggggaacgacaattacccttgtcttaaaagaagaagcatctgattaccttgaattggatacaattaaaaatctcgtcaaaaaatattcacagttcataaactttcctatttatgtatggagcagcaagactgaaactgttgaggagcccatggaggaagaagaagcagccaaagaagagaaagaagaatctgatgatgaagctgcagtagaggaagaagaagaagaaaagaaaccaaagactaaaaaagttgaaaaaactgtctgggactgggaacttatgaatgatatcaaaccaatatggcagagaccatcaaaagaagtagaagaagatgaatacaaagctttctacaaatcattttcaaaggaaagtgatgaccccatggcttatattcactttactgctgaaggggaagttaccttcaaatcaattttatttgtacccacatctgctccacgtggtctgtttgacgaatatggatctaaaaagagcgattacattaagctctatgtgcgccgtgtattcatcacagacgacttccatgatatgatgcctaaatacctcaattttgtcaagggtgtggtggactcagatgatctccccttgaatgtttcccgcgagactcttcagcaacataaactgcttaaggtgattaggaagaagcttgttcgtaaaacgctggacatgatcaagaagattgctgatgataaatacaatgatactttttggaaagaatttggtaccaacatcaagcttggtgtgattgaagaccactcgaatcgaacacgtcttgctaaacttcttaggttccagtcttctcatcatccaactgacattactagcctagaccagtatgtggaaagaatgaaggaaaaacaagacaaaatctacttcatggctgggtccagcagaaaagaggctgaatcttctccatttgttgagcgacttctgaaaaagggctatgaagttatttacctcacagaacctgtggatgaatactgtattcaggcccttcccgaatttgatgggaagaggttccagaatgttgccaaggaaggagtgaagttcgatgaaagtgagaaaactaaggagagtcgtgaagcagttgagaaagaatttgagcctctgctgaattggatgaaagataaagcccttaaggacaagattgaaaaggctgtggtgtctcagcgcctgacagaatctccgtgtgctttggtggccagccagtacggatggtctggcaacatggagagaatcatgaaagcacaagcgtaccaaacgggcaaggacatctctacaaattactatgcgagtcagaagaaaacatttgaaattaatcccagacacccgctgatcagagacatgcttcgacgaattaaggaagatgaagatgataaaacagttttggatcttgctgtggttttgtttgaaacagcaacgcttcggtcagggtatcttttaccagacactaaagcatatggagatagaatagaaagaatgcttcgcctcagtttgaacattgaccctgatgcaaaggtggaagaagagcctgaagaagaacctgaagagacagcagaagacacaacagaagacacagagcaagacgaagatgaagaaatggatgtgggaacagatgaagaagaagaaacagcaaaggaatctacagctgaaaaagatgaattgtaaattatactctcaccatttggatcctgtgtggagagggaatgtgaaatttacatcatttctttttgggagagacttgttttggatgccccctaatccccttctcccctgcactgtaaaatgtgggattatgggtcacaggaaaaagtgggttttttagttgaattttttttaacattcctcatgaatgtaaatttgtactatttaactattcttgatgtaaaatcttgtcatgtgtataaaaataaaaaagatcccaaat

SEQ ID NO: 3775 - DNA, 1185 bp, Homo sapiens
atgagcttcaccactcgctccaccttctccaccaactaccggtccctgggctctgtccagacgcccagctatggcgcctggccagtcagcagtgtggccagcgtctatgcaggcagcaggggctctcattcccggatctctgtgtgctgcttcaccagcttccgggttgcatggggaataggaggcatccagaacgagaaggagaccatgcaaagcctgaacgactgcctggcctcctacctggacagagtgaggagcctggtgaccaagaaccagaagctggagagcaaaatccgggagcacgtggagaagaagggaccccatgtcagagactggagccattacttcaagatcatcgatgacctgagggctcagatctttgcaaacactgtggacaatgcctgcatcgttctgcagatcgacaatgtctgtcttgctgctgatgactttagggtcaagtatgagacagagctggccatggcccatgacatccatgggctccgcaaggtcattgttgacaccaatgtcactcggctgcagctggagacagagattgaggctctcaaggaggagctgctcttcataaagaagaaccacaaagaggaagtaaaaggcctacaagcccagattgccagctctgggttgaccatggaggtagatgcccttaaatctcagtgcctcgccaagatcatggcagacatctgggcccaatatgacgagctggctcggaagaaccaagaggagctggacaaatactggtctcagaagaatgaggaaatcgccaaagtggtcaccacgcagtccgccgaggttggagctgctgagatgacgctcacagagctgagatgtacagtccagtccttggaggttgacctggactccatgagaagtctgaaggccagcttggaggaccgcctgagggaggtggaggcccgccacaccctgcagatggagcagctcaatgggatcctgttgcacctggagtcagagctggcacagaccctggcagagggacagtgccaggcccaggagtacgaggccctgctgaacatcaaggtcaagttggaggctgagatcgccacctaccgccgcctgctggaagatggcgaggagttcaatcttggtgatgccctggacagcagcaactccatgcaaaccatccaaaagaccaccactgccggatag

SEQ ID NO: 3776 - protein, 351 aa, Homo sapiens [sequence omitted]

SEQ ID NO: 3777 - DNA, 2352 bp, Homo sapiens
cagtgccaggctggaggcggcagcggttggaggcttcgcccggctttgcagcggggacttcggcggcggcgcctcaggcacctcggcccggacacgatgaggcgagtggtacgacagagcaagtttcggcatgtatttgggcaagcggtgaaaaatgaccagtgctatgatgacatccgggtttctcgtgtgacctgggatagttccttttgtgctgtcaatcccagatttgttgccataatcatagaggcaagtgggggaggagcgttccttgtcctccctctgcacaagactggtcgaattgacaaatcttaccctacagtatgtggccacacaggaccagtgctggacatagactggtgcccacataacgatcaggtcattgccagcggttcagaggactgcacggtcatggtatggcagatcccagaaaatggactcaccctttccctgactgaacctgtggtgattttggaaggccactcaaagagagtcggcatcgtggcttggcatccaacggcccgcaatgtgcttcttagtgcaggctgtgataatgccattatcatctggaatgtgggaacaggggaagcccttataaacttggacgatatgcattcagacatgatttacaatgtgagctggaaccggaatggcagtctgatctgcacagcttccaaagacaagaaagtgagagtcattgatcccaggaaacaagagattgttgctgagaaggagaaagcacatgaaggagcaagacccatgagagccatcttcctggccgatggcaatgtcttcaccactgggttcagccgcatgagcgagcggcagctggctctctggaatccgaaaaatatgcaggaaccaattgctcttcatgagatggacactagcaatggggtgttgctgcctttctatgaccctgacaccagcatcatttacttatgtggaaagggtgacagcagtattcgctattttgagatcacggatgaatccccgtacgtccactacctcaacacattcagcagcaaggagcctcagagagggatgggttacatgcccaagaggggacttgatgttaacaaatgtgagattgccagattcttcaaacttcatgagagaaagtgtgaacctattattatgactgttcccaggaagtctgaccttttccaagatgacctgtatcctgacacagcggggccagaggccgcgctggaggcagaagagtggttcgaaggcaagaatgcagacccaatcctcatctccttgaagcacgggtacattccaggcaaaaacagggatctcaaggtggtcaagaagaacattctggatagcaagcccactgcaaacaagaagtgcgacctgatcagcatccccaagaaaaccacagacacggccagtgtgcaaaatgaagccaagttggatgagattttaaaagagatcaaatctataaaagacacaatctgcaatcaagatgagcgtatttccaagttagaacagcagatggcaaagatagcagcctgaaggtcccacccccacccctacagaaaaaatgggagcaagaacttgtgcttgggagctggttattggtgtggtcctagggagggcggaaagggaggcactgccatttggagacattccatttcagatttgtcaaccagcgataggccacattccagtaagaactcaatttgtctcccaaatttgcagaaacaaaacgtgatttaaaagctgagctttttatcagaaagcttttttgatgttttaagtgttatgtgacttgttgaactttttaaaaagtgctacttttaaaatcccagatactctgaattttagaaaacaaactaattctgattgtgtcgtgcccaagtacccttttttttttaatgaatagggaccaatgccacattgctttttatatttctttcttttttaatgttgccaaaaccaaaagtagctttgttttcctttgtattttgctactttgcagtatttgtgtgtgtggttttttttccttaatttgaaagggacagcactgtgtatgtttataaactaaatgaagataagatattattttgtataaacattcatctgagaacaatcaaagcagtagccacatggtgctggctcctttgcagcacaaacctggtcattttgatgactgtacaacaggaagacttgaaaaatcacgtggattcatattaccaccgctctcatttcatggagtcttctgatcaaaaaagctcacgtcgtatttcttcttttcctttctcttttctagaaattgggtgtttgtaccagaatggaattttgcttctcggttatcctgtgcttcagatgattataatctaaccc

SEQ ID NO: 3778 - protein, 474 aa, Homo sapiens
MRRVVRQSKFRHVFGQAVKNDQCYDDIRVSRVTWDSSFCAVNPRFVAIIIEASGGGAFLVLPLHKTGRIDKSYPTVCGHTGPVLDIDWCPHNDQVIASGSEDCTVMVWQIPENGLTLSLTEPVVILEGHSKRVGIVAWHPTARNVLLSAGCDNAIIIWNVGTGEALINLDDMHSDMIYNVSWNRNGSLICTASKDKKVRVIDPRKQEIVAEKEKAHEGARPMRAIFLADGNVFTTGFSRMSERQLALWNPKNMQEPIALHEMDTSNGVLLPFYDPDTSIIYLCGKGDSSIRYFEITDESPYVHYLNTFSSKEPQRGMGYMPKRGLDVNKCEIARFFKLHERKCEPIIMTVPRKSDLFQDDLYPDTAGPEAALEAEEWFEGKNADPILISLKHGYIPGKNRDLKVVKKNILDSKPTANKKCDLISIPKKTTDTASVQNEAKLDEILKEIKSIKDTICNQDERISKLEQQMAKIAA

SEQ ID NO: 3779 - DNA, 1131 bp, Homo sapiens
atggctgtaaagcatcttcagaagcatcgcctctgttccttctcctgctggccagctacaagtgagcggcacagcctgctccatgccacaggcctgcctgcgcccctgggaaccatagtagtgcagtccacaaggagcatcccggctgggccccacaacaggccccccgaactagagaacgtggaacatgagtctcttaggatgaacgaggagccgctggagcggactctcagagcgctacctggccaccagtctctgggtgggggtcctgggggcaccatggtttcggcggcagcccccagcctcctcatccttctgttgctgctcctggggtctgtgcctgctaccgacgcccgctctgtgcccctgaaggccacgttcctggaggatgtggcgggtagtggggaggccgagggctcgtcggcctcctccccgagcctcccgccaccctggaccccggccctcagccccacatcgatggggccccagcccataaccctggggggcccatcaccccccaccaacttcctggatgggatagtggacttcttccgccagtacgtgatgctgattgctgtggtgggctccctggcctttctgctgatgttcatcgtctgtgccgcggtcatcacccggcagaagcagaaggcctcggcctattacccatcgtccttccccaagaagaagtacgtggaccagagtgaccgggccgggggcccccgggccttcagtgaggtccccgacagagcccccgacagcaggcccgaggaagccctggattcctcccggcagctccaggccgacatcttggccgccacccagaacctcaagtcccccaccagggctgcactgggcggtggggacggagccaggatggtggagggcaggggcgcagaggaagaggagaagggcagccaggagggggaccaggaagtccagggacatggggtcccagtggagacaccagaggcgcaggaggagccgtgctcaggggtccttgagggggctgtggtggccggtgagggccaaggggagctggaagggtctctcttgttagcccaggaagcccagggaccagtgggtccccccgaaagcccctgtgcttgcagcagtgtccaccccagtgtctaa

SEQ ID NO: 3780 - protein, 283 aa, Homo sapiens
MVSAAAPSLLILLLLLLGSVPATDARSVPLKATFLEDVAGSGEAEGSSASSPSLPPPWTPALSPTSMGPQPITLGGPSPPTNFLDGIVDFFRQYVMLIAVVGSLAFLLMFIVCAAVITRQKQKASAYYPSSFPKKKYVDQSDRAGGPRAFSEVPDRAPDSRPEEALDSSRQLQADILAATQNLKSPTRAALGGGDGARMVEGRGAEEEEKGSQEGDQEVQGHGVPVETPEAQEEPCSGVLEGAVVAGEGQGELEGSLLLAQEAQGPVGPPESPCACSSVHPSV

SEQ ID NO: 3781 - DNA, 950 bp, Homo sapiens
gggaccttaattctctttcccatcttgcaagatggcgggtgaaaaagttgagaagccagatactaaagagaagaaacccgaagccaagaaggttgatgctggtggcaaggtgaaaaagggtaacctcaaagctaaaaagcccaagaaggggaagccccattgcagccgcaaccctgtccttgtcagaggaattggcaggtattcccgatctgccatgtattccagaaaggccatgtacaagaggaagtactcagccgctaaatccaaggttgaaaagaaaaagaaggagaaggttctcgcaactgttacaaaaccagttggtggtgacaagaacggcggtacccgggtggttaaacttcgcaaaatgcctagatattatcctactgaagatgtgcctcgaaagctgttgagccacggcaaaaaacccttcagtcagcacgtgagaaaactgcgagccagcattacccccgggaccattctgatcatcctcactggacgccacaggggcaagagggtggttttcctgaagcagctggctagtggcttattacttgtgactggacctctggtcctcaatcgagttcctctacgaagaacacaccagaaatttgtcattgccacttcaaccaaaatcgatatcagcaatgtaaaaatcccaaaacatcttactgatgcttacttcaagaagaagaagctgcggaagcccagacaccaggaaggtgagatcttcgacacagaaaaagagaaatatgagattacggagcagcgcaagattgatcagaaagctgtggactcacaaattttaccaaaaatcaaagctattcctcagctccagggctacctgcgatctgtgtttgctctgacgaatggaatttatcctcacaaattggtgttctaaatgtcttaagaacctaattaaatagctgactacaaaaaaaaaaaaaaaaaaa

SEQ ID NO: 3782 - protein, 288 aa, Homo sapiens [sequence omitted]

SEQ ID NO: 3783 - DNA, 535 bp, Homo sapiens
agttcacccaggccctgaactgccaaacagttactcaactgcttaagctggcccacaaatacagacaagagaccacctgcccttcgagcaggagttaacaccatcaccaccttggtggagaacaagaaagctcagctggtggtgattgcacacgatgtggattccatcgagctggttgtcttcttgcctgccctgtgttgtaaaatgggagtcccttactgcattatcaaggggaaggcaagactgggccgtctagtccacaggaagacctgcaccactgtcgccttcacacaggtgaacttggaagacaaaggcgctttggctaagctggtggaaggtatcaggaccaatgacaatgacagatacgatgagatctgctgtcactggggaggcaatatcttgggtcccaagtctgtggcttgcattgccaagctcgaaaaggcaaaggctaaagaacttgccactaaactgggttaaatgtatactgttgagttttctgtacataaaaataatgaaaataatacaaattttcctt

SEQ ID NO: 3784 - protein, 90 aa, Homo sapiens
MGVPYCIIKGKARLGRLVHRKTCTTVAFTQVNLEDKGALAKLVEGIRTNDNDRYDEICCHWGGNILGPKSVACIAKLEKAKAKELATKLG

SEQ ID NO: 3785 - DNA, 963 bp, Homo sapiens
cggccggcgatatggctgccgctgtgccccgcgccgcatttctctccccgctgcttccccttctcctgggcttcctgctcctctccgctccgcatggcggcagcggcctgcacaccaagggcgcccttcccctggatacggtcactttctacaaggtcattcccaaaagcaagttcgtcttggtgaagttcgacacccagtacccctacggtgagaagcaggatgagttcaagcgtcttgctgaaaactcggcttccagcgatgatctcttggtggcagaggtggggatctcagattatggtgacaagctgaacatggagctgagtgagaaatacaagctggacaaagagagctacccagtcttctacctcttccgggatggggactttgagaacccagtcccatacactggggcagttaaggttggagccatccagcgctggctgaaggggcaaggggtctacctaggtatgcctggttgcctgcctgtatacgacgccctggccggggagttcatcagggcctctggtgtggaggcccgccaggccctcttgaagcaggggcaagataacctctcaagtgtgaaggagactcagaagaagtgggccgagcaatacctgaagatcatggggaagatcttagaccaaggggaggacttcccagcatcagagatgacacggatcgccaggctgattgagaagaacaagatgagtgacggcaagaaggaggagctccagaagagcttaaacatcctgactgccttccagaagaagggggccgagaaagaggagctgtaaaaaggctgtctgtgattttccagggtttggtgggggtagggaggggagagttaacctgctggctgtgagtcccttgtggaatataagggggtagtgggaacagtggtactaacccacgattctgagccctgagtatgcctggacattgatgctaacatgacatgct

SEQ ID NO: 3786 - protein, 261 aa, Homo sapiens
MAAAVPRAAFLSPLLPLLLGFLLLSAPHGGSGLHTKGALPLDTVTFYKVIPKSKFVLVKFDTQYPYGEKQDEFKRLAENSASSDDLLVAEVGISDYGDKLNMELSEKYKLDKESYPVFYLFRDGDFENPVPYTGAVKVGAIQRWLKGQGVYLGMPGCLPVYDALAGEFIRASGVEARQALLKQGQDNLSSVKETQKKWAEQYLKIMGKILDQGEDFPASEMTRIARLIEKNKMSDGKKEELQKSLNILTAFQKKGAEKEEL

SEQ ID NO: 3787 - DNA, 7232 bp, Homo sapiens
atggtcttgcttctttgtctatcttgtctgattttctcctgtctgaccttttcctggttaaaaatctgggggaaaatgacggactccaagccgatcaccaagagtaaatcagaagcaaacctcatcccgagccaggagccctttccagcctctgataactcaggggagacaccgcagagaaatggggagggccacactctgcccaagacacccagccaggccgagccagcctcccacaaaggccccaaagatgccggtcggcggagaaactccctaccaccctcccaccagaagcccccaagaaaccccctttcttccagtgacgcagcaccctccccagagcttcaagccaacgggactgggacacaaggtctggaggccacagataccaatggcctgtcctcctcagccaggccccagggccagcaagctggctccccctccaaagaagacaagaagcaggcaaacatcaagaggcagctgatgaccaacttcatcctgggctcttttgatgactactcctccgacgaggactctgttgctggctcatctcgtgagtctacccggaagggcagccgggccagcttgggggccctgtccctggaggcttatctgaccacaggtgaagctgagacccgcgtccccactatgaggccgagcatgtcgggactccacctggtgaagaggggacgggaacacaagaagctggacctgcacagagactttaccgtggcttctcccgctgagtttgtcacacgctttgggggggatcgggtcatcgagaaggtgcttattgccaacaacgggattgccgccgtgaagtgcatgcgctccatccgcaggtgggcctatgagatgttccgcaacgagcgggccatccggtttgttgtgatggtgacccccgaggaccttaaggccaacgcagagtacatcaagatggcggatcattacgtccccgtcccaggagggcccaataacaacaactatgccaacgtggagctgattgtggacattgccaagagaatccccgtgcaggcggtgtgggctggctggggccatgcttcagaaaaccctaaacttccggagctgctgtgcaagaatggagttgctttcttaggagataagatcgcctccaccgttgtcgcccagacgctacaggtcccaaccctgccctggagtggaagcggcctgacagtggagtggacagaagatgatctgcagcagggaaaaagaatcagtgtcccagaagatgtttatgacaagggttgcgtgaaagacgtagatgagggcttggaggcagcagaaagaattggttttccattgatgatcaaagcttctgaaggtggcggagggaagggaatccggaaggctgagagtgcggaggacttcccgatccttttcagacaagtacagagtgagatcccaggctcgcccatctttctcatgaagctggcccagcacgcccgtcacctggaagttcagatcctcgctgaccagtatgggaatgctgtgtctctgtttggtcgcgactgctccatccagcggcggcatcagaagatcgttgaggaagcaccggccaccatcgccccgctggccatattcgagttcatggagcagtgtgccatccgcctggccaagaccgtgggctatgtgagtgcagggacagtggaatacctctatagtcaggatggcagcttccacttcttggagctgaatcctcgcttgcaggtggaacatccctgcacagaaatgattgctgatgttaatctgccggccgcccagctacaggaactgaatttccggagcagcaagaacgtgtggggttacttcagcgtggccgctactggaggcctgcacgagtttgcggattcccaatttgggcactgcttctcctggggagagaaccgggaagaggccatttcgaacatggtggtggctttgaaggaactgtccatccgaggcgactttaggactaccgtggaatacctcattaacctcctggagaccgagagcttccagaacaacgacatcgacaccgggtggttggactacctcattgctgagaaagtgcaggagaaaccggatatcatgcttggggtggtatgcggggccttgaacgtggccgatgcgatgttcagaacgtgcatgacagatttcttacactccctggaaaggggccaggtcctcccagcggattcactactgaacctcgtagatgtggaattaatttacggaggtgttaagtacattctcaaggtggcccggcagtctctgaccatgttcgttctcatcatgaatggctgccacatcgagattgatgcccaccggctgaatgatggggggctcctgctctcctacaatgggaacagctacaccacctacatgaaggaagaggttgacagcggcaataagacgtgtgtgtttgagaaggagaacgatcctacagtcctgagatccccctcggctgggaagctgacacagtacacagtggaggatgggggccacgttgaggctgggagcagctacgctgagatggaggtgatgaagatgatcatgaccctgaacgttcaggaaagaggccgggtgaagtacatcaagcgtccaggtgccgtgctggaagcaggctgcgtggtggccaggctggagctcgatgacccttctaaagtccacccggctgaaccgttcacaggagaactccctgcccagcagacactgcccatcctcggagagaaactgcaccaggtcttccacagcgtcctggaaaacctcaccaacgtcatgagtggcttttgtctgccagagcccgtttttagcataaagctgaaggagtgggtgcagaagctcatgatgaccctccggcacccgtcactgccgctgctggagctgcaggagatcatgaccagcgtggcaggccgcatccccgcccctgtggagaagtctgtccgcagggtgatggcccagtatgccagcaacatcacctcggtgctgtgccagttccccagccagcagatagccaccatcctggactgccatgcagccaccctgcagcggaaggctgatcgagaggtcttcttcatcaacacccagagcatcgtgcagttggtccagaggtaccgcagcgggatccgcggctatatgaaaacagtggtgttggatctcctgagaagatacttgcgtgttgagcaccattttcagcaaggcaagagatgctgatgccaacaccagtgggatggtggggggcgtgaggagcctgagctttacctctgtgtggtgttttgtctcccccagcccactacgacaagtgtgtgataaacctcagggagcagttcaagccagacatgtcccaggtgctggactgcatcttctcccacgcacaggtggccaagaagaaccagctggtgatcatgttgatcgatgagctgtgtggcccagacccttccctgtcggacgagctgatctccatcctcaacgagctcactcagctgagcaaaagcgagcactgcaaagtggccctcagagcccggcagatcctgattgcctcccacctcccctcctacgagctgcggcataaccaggtggagtccattttcctgtctgccattgacatgtacggccaccagttctgccccgagaacctcaaggtgaagaaattaatactttcggaaacaaccatcttcgacgtcctgcctactttcttctatcacgcaaacaaagtcgtgtgcatggcgtccttggaggtttacgtgcggaggggctacatcgcctatgagttaaacagcctgcagcaccggcagctcccggacggcacctgcgtggtagaattccagttcatgctgccgtcctcccacccaaaccggatgaccgtgcccatcagcatcaccaaccctgacctgctgaggcacagcacagagctcttcatggacagcggcttctccccactgtgccagcgcatgggagccatggtagccttcaggagattcgaggacttcaccagaaattttgatgaagtcatctcttgcttcgccaacgtgcccaaagacacccccctcttcagcgaggcccgcacctccctatactccgaggatgactgcaagagcctcagagaagagcccatccacattctgaatgtgtccatccagtgtgcagaccacctggaggatgaggcactggtgccgattttacggacattcgtacagtccaagaaaaatatccttgtggattatggactccgacgaatcacattcttgattgcccaagagaaagaatttcccaagtttttcacattcagagcaagagatgagtttgcagaagatcgcatttaccgtcacttggaacctgccctggccttccagctggaacttaaccggatgcgtaacttcgatctgaccgccgtgccctgtgccaaccacaagatgcacctttacctgggtgctgccaaggtgaaggaaggtgtggaagtgacggaccataggttcttcatccgcgccatcatcaggcactctgacctgatcacaaaggaagcctccttcgaatacctgcagaacgagggtgagcggctgctcctggaggccatggacgagctggaggtggcgttcaataacaccagcgtgcgcaccgactgcaaccacatcttcctcaacttcgtgcccactgtcatcatggaccccttcaagatcgaggagtccgtgcgctacatggttatgcgctacggcagccggctgtggaaactccgtgtgctacaggctgaggtcaagatcaacatccgccagaccaccaccggcagtgccgttcccatccgcctgttcatcaccaatgagtcgggctactacctggacatcagcctctacaaagaagtgactgactccagatctggaaatatcatgtttcactccttcggcaacaagcaagggccccagcacgggatgctgatcaatactccctacgtcaccaaggatctgctccaggccaagcgattccaggcccagaccctgggaaccacctacatctatgacttcccggaaatgttcaggcaggctctctttaaactgtggggctccccagacaagtatcccaaagacatcctgacatacactgaattagtgttggactctcagggccagctggtggagatgaaccgacttcctggtggaaatgaggtgggcatggtggccttcaaaatgaggtttaagacccaggagtacccggaaggacgggatgtgatcgtcatcggcaatgacatcacctttcgcattggatcctttggccctggagaggaccttctgtacctgcgggcatccgagatggcccgggcagagggcattcccaaaatttacgtggcagccaacagtggcgcccgtattggcatggcagaggagatcaaacacatgttccacgtggcttgggtggacccagaagacccccacaaaggatttaaatacctgtacctgactccccaagactacaccagaatcagctccctgaactccgtccactgtaaacacatcgaggaaggaggagagtccagatacatgatcacggatatcatcgggaaggatgatggcttgggcgtggagaatctgaggggctcaggcatgattgctggggagtcctctctggcttacgaagagatcgtcaccattagcttggtgacctgccgagccattgggattggggcctacttggtgaggctgggccagcgagtgatccaggtggagaattcccacatcatcctcacaggagcaagtgctctcaacaaggtcctgggaagagaggtctacacatccaacaaccagctgggtggcgttcagatcatgcattacaatggtgtctcccacatcaccgtgccagatgactttgagggggtttataccatcctggagtggctgtcctatatgccaaaggataatcacagccctgtccctatcatcacacccactgaccccattgacagagaaattgaattcctcccatccagagctccctacgacccccggtggatgcttgcaggaaggcctcacccaactctgaagggaacgtggcagagcggattctttgaccacggcagtttcaaggaaatcatggcaccctgggcgcagaccgtggtgacaggacgagcaaggcttggggggattcccgtgggagtgattgctgtggagacacggactgtggaggtggcagtccctgcagaccctgccaacctggattctgaggccaagataattcagcaggcaggacaggtgtggttcccagactcagcctacaaaaccgcccaggccgtcaaggacttcaaccgggagaagttgcccctgatgatctttgccaactggagggggttctccggtggcatgaaagacatgtatgaccaggtgctgaagtttggagcctacatcgtggacggccttagacaatacaaacagcccatcctgatctatatcccgccctatgcggagctccggggaggctcctgggtggtcatagatgccaccatcaacccgctgtgcatagaaatgtatgcagacaaagagagcaggggtggtgttctggaaccagaggggacagtggagattaagttccgaaagaaagatctgataaagtccatgagaaggatcgatccagcttacaagaagctcatggaacagctaggggaacctgatctctccgacaaggaccgaaaggacctggagggccggctaaaggctcgcgaggacctgctgctccccatctaccaccaggtggcggtgcagttcgccgacttccatgacacacccggccggatgctggagaagggcgtcatatctgacatcctggagtggaagaccgcacgcaccttcctgtattggcgtctgcgccgcctcctcctggaggaccaggtcaagcaggagatcctgcaggccagcggggagctgagtcacgtgcatatccagtccatgctgcgtcgctggttcgtggagacggagggggctgtcaaggcctacttgtgggacaacaaccaggtggttgtgcagtggctggaacagcactggcaggcaggggatggcccgcgctccaccatccgtgagaacatcacgtacctgaagcacgactctgtcctcaagaccatccgaggcctggttgaagaaaaccccgaggtggccgtggactgtgtgatatacctgagccagcacatcagcccagctgagcgggcgcaggtcgttcacctgctgtctaccatggacagcccggcctccacctga

SEQ ID NO: 3788 - DNA, 3767 bp, Homo sapiens
ggcggtagtgcgtcggctgctgccccgggtctggcagaactcgggtgttttgggctgagacagtggcagctgcggccccgaccccaagtgcggggacctccggcgaataaaggtcggcctgcgggtaggccggtagggcctgcggtccggcctgcgggagaactgggtcgtcagtcctccgagtggtggggctggggactttgagggagttggctctagggcacagtccctgcctggccaggtcggaggaacaagtgctgggatctggcgtgtgtgctccaggggctctttccgcggccctttccacctcttttcactttggggacggtaggcctttataaacggactaatgctgggtgatttgttcctgtggttgttgatgccgaggaaagactctgggccccaggactcacctaaactggagttcgaatactgttcgctcgctgtgtgaccttggaaaaaataacaagcttttctgaagtgagaagctgttctcagccacgagtcctgtgcaagatcactaatgattacctggcatttctgcgacacaggcaggtcctcagggtttgtgcaagtttgcaaacatgttcaccctgtctcagacctcgagagcatggttcatcgatagagcccgtcaggcacgagaagaaaggcttgtgcagaaggaacgggagcgggcagctgttgtgatccaggcccatgtccggagttttctctgtcggagtcgactgcagagagatatcaggagagagattgatgacttttttaaagcagatgaccctgagtccactaaaagaagtgcactttgtattttcaagattgccaggaaactgctgttcctattcagaatcaaagaggataatgagagatttgagaagttgtgtcgcagcatcctgagcagcatggatgctgagaatgagcctaaggtgtggtatgtgtccctggcttgttctaaggacctcaccctcctttggattcaacagatcaagaacattttgtggtactgctgtgattttctcaagcagctcaagcctgaaatcctgcaggactcccgactcatcaccctgtacctcacgatgcttgtcaccttcacagacacttcaacgtggaaaattcttcggggaaaaggtgaaagtcttcgaccagcgatgaaccacatttgtgcaaatataatgggacatctcaaccagcatggattttattctgtgctgcagatattgttaacccgtggcctggcaagaccccgtccttgtctatccaaaggcactttaacagcagctttttctctagcgttacgccctgtgattgctgcacagttctcagacaatctgattcggccgttcctcatccacatcatgtctgtgcctgctctggtgactcatctcagcacagtgacccctgagcgcctcactgttttagaatcccatgacatgcttcgtaaattcatcatatttttaagagaccaagatcgatgccgtgatgtatgtgaaagtttagaaggatgccatacgctttgtctaatgggcaacctcctacacttgggctccctcagccccagagtgttagaggaggagacagatgggttcgtgagtttgctcacccagacgctgtgctactgtcggaagtatgtgtctcagaagaagtccaacctgacccactggcatcctgtccttggctggttctcccaatctgtggattatggccttaacgagtcaatgcacttgatcaccaaacagctgcagttcttgtggggggtgcctctgatccggatcttcttctgtgacatcctgagcaagaagctactggagagccaggagccagcccacgcacagccagcatcccctcagaatgtgctcccagtgaagagtctcctaaagcgtgcttttcaaaagtcggcatcagtccggaatattctcaggcctgtcgggggtaaacgggtcgactctgcagaagtccagaaggtttgcaacatctgtgtcctctaccagacctcgctgacaactctcacacagattcggctgcagatactcacaggtctcacttaccttgatgacctgcttcccaaactgtgggcatttatctgtgagctcgggccccacggagggttaaagctcttcttggaatgcctgaacaatgacactgaagagtccaagcaactcttggccatgctgatgctgttctgtgactgttcgcggcacctcatcacaatccttgatgacattgaagtttatgaagaacagatttcattcaaactggaagagctggtcactatctcctctttcctgaattcttttgtgtttaagatgatctgggatggaattgtagagaacgccaagggtgagaccttggagctgttccagtctgtccacgggtggcttatggtgctgtacgagcgggactgccggcggcgcttcacccccgaggaccactggctgcgaaaggatctcaaacctagcgtgctcttccaagaactcgacagggacagaaaacgggcacagttgatcctgcagtacatcccacatgtcatccctcacaaaaacagagttctactgtttcgaaccatggttaccaaggagaaggagaaactggggctggtggaaaccagctctgcctccccgcatgtcactcacatcaccatccgccggtccaggatgctggagagcttgtttgagtgcccctggccactggtgatcaatgccgagagctgctaggaaggcagtgtgtgctgaacagtggatgtttctgacattcttcaaggacggctacgagcagcttaggcagctctcccagcacgccatgaagggggtcatccgtgtgaagtttgtcaatgacctcggggtggacgaagcagggattgatcaagacggtgtttttaaggagttcttggaagagatcatcaagagagtttttgacccagcactcaatctgttcaagacaaccagtggggatgagaggctgtacccctcacccacatcctacatccatgagaattacctgcagctcttcgagtttgtggggaagatgctggggaaggctgtgtatgagggaattgtggtggacgtgccatttgcatccttcttcctgagccaactgcttgggcaccaccacagcgtcttctatagctcggtggatgaactgccttctctggactccgagttctataaaaacctcacctccatcaagcgctatgatggggacatcactgacctgggcctgacgctgtcttacgacgaggacgtcatgggtcagcttgtttgccatgaactgattcctggagggaagaccattcctgttacaaatgaaaataagcaacagaattagctacatccatctgatggcacattttcgaatgcacactcaaataaaaaaccaaacagctgccctcattagcggattccgttccattatcaaacccgagtggatccgaatgttctcaactcctgaactgcagcgtctcatctctggcgacaatgctgagattgatctggaagatttaaagaagcacacagtctactacggtggtttccatggaagtcacagagtcatcatctggctctgggatattctggcctccgacttcacaccggatgagagagctatgtttctgaagttcgtgaccagctgctccagacccccgctcctgggattcgcctacctcaagcctccattctccatccgctgcgtggaggtgtcggacgatcaggacaccggggacactctgggcagcgtcctccggggcttcttcaccatccgcaagcgggagccag

SEQ ID NO: 3789 - protein, 1068 aa, Homo sapiens
MFTLSQTSRAWFIDRARQAREERLVQKERERAAVVIQAHVRSFLCRSRLQRDIRREIDDFFKADDPESTKRSALCIFKIARKLLFLFRIKEDNERFEKLCRSILSSMDAENEPKVWYVSLACSKDLTLLWIQQIKNILWYCCDFLKQLKPEILQDSRLITLYLTMLVTFTDTSTWKILRGKGESLRPAMNHICANIMGHLNQHGFYSVLQILLTRGLARPRPCLSKGTLTAAFSLALRPVIAAQFSDNLIRPFLIHIMSVPALVTHLSTVTPERLTVLESHDMLRKFIIFLRDQDRCRDVCESLEGCHTLCLMGNLLHLGSLSPRVLEEETDGFVSLLTQTLCYCRKYVSQKKSNLTHWHPVLGWFSQSVDYGLNESMHLITKQLQFLWGVPLIRIFFCDILSKKLLESQEPAHAQPASPQNVLPVKSLLKRAFQKSASVRNILRPVGGKRVDSAEVQKVCNICVLYQTSLTTLTQIRLQILTGLTYLDDLLPKLWAFICELGPHGGLKLFLECLNNDTEESKQLLAMLMLFCDCSRHLITILDDIEVYEEQISFKLEELVTISSFLNSFVFKMIWDGIVENAKGETLELFQSVHGWLMVLYERDCRRRFTPEDHWLRKDLKPSVLFQELDRDRKRAQLILQYIPHVIPHKNRVLLFRTMVTKEKEKLGLVETSSASPHVTHITIRRSRMLEDGYEQLRQLSQHAMKGVIRVKFVNDLGVDEAGIDQDGVFKEFLEEIIKRVFDPALNLFKTTSGDERLYPSPTSYIHENYLQLFEFVGKMLGKAVYEGIVVDVPFASFFLSQLLGHHHSVFYSSVDELPSLDSEFYKNLTSIKRYDGDITDLGLTLSYDEDVMGQLVCHELIPGGKTIPVTNENKISYIHLMAHFRMHTQIKNQTAALISGFRSIIKPEWIRMFSTPELQRLISGDNAEIDLEDLKKHTVYYGGFHGSHRVIIWLWDILASDFTPDERAMFLKFVTSCSRPPLLGFAYLKPPFSIRCVEVSDDQDTGDTLGSVLRGFFTIRKREPGGRLPTSSTCFNLLKLPNYSKKSVLREKLRYAISMNTGFELS

SEQ ID NO: 3790 - DNA, 5525 bp, Homo sapiens
gaagcgccgccgccaccgccgcctttgctgtcccccggcctctagttccccgcaggtgggaggtgggagccatgtcgaaacggctccggagcagcgaggtgtgcgctgactgcagcgggccggatccttcctgggcatcagtaaataggggaacgtttttatgtgatgagtgctgcagtgtccatcggagtctagggcgccatatctcccaagtgaggcatctgaaacacacaccgtggcctccaacactgcttcagatggttgagaccttgtataataacggtgctaactctatatgggagcattctttgctggaccctgcgtctattatgagtggaagacgtaaagctaatccacaggataaagtacatcccaataaagcggaattcatcagagccaagtatcagatgttagcgttcgtccatcgcttgccctgccgggatgacgatagtgtgactgccaaagatcttagcaagcaactccattcgagcgtgagaacagggaatcttgaaacctgtttgagactgttatctttaggagcacaagccaacttctttcatcctgaaaaaggaaacaccccactccatgttgcctccaaagcagggcagattttacaggctgaattattggcagtatatggagcagacccaggcacacaggattctagtgggaaaactcccgttgattatgcaaggcaaggagggcaccatgagctggcagagcgcctcgtggaaatacagtatgagctaacggacagactagccttctatctctgtggcaggaaaccagatcacaaaaatggacagcactttataatacctcaaatggcagacagcagcctggatttgtctgaattggcaaaagctgctaagaagaaacttcaatctctaagtaatcatttgtttgaagaacttgccatggatgtgtacgatgaagttgacaggcgagagacggatgcagtctggcttgccacgcaaaaccacagcgccctggtaaccgagacaacggtcgtcccctttcttccggtcaatcctgagtactcatcaacacgaaatcagggcagacagaagttagctcggttcaacgcccatgagtttgccacgctggtcattgacattctcagtgacgccaagaggagacagcagggcagttctctctcgggttcaaaagacaatgtggagctcatactgaaaaccatcaataaccagcacagcgttgagagtcaagacaacgatcagcccgactatgacagcgtggcatcagacgaagacacagatttggaaaccactgcaagcaaaacaaaccggcagaagagcctagattcagatttatcagatggaccagtcactgtacaggaatttatggaggtcaaaaacgctctagtggcttctgaggccaagatacagcagctaatgaaggtgaataacaacttgagtgacgagctgagaattatgcagaaaaagcttcaaacactccagagtgaaaattcgaacctcaggaaacaggccacaaccaatgtatatcaggtgcaaactggttctgagtacacagacacttccaaccactcttccttaaagagacgtccgtctgcccggggcagtaggcccatgtccatgtacgagaccggatcaggtcagaaaccatatctcccaatgggagaagcgagccgccccgaagagagcaggatgagactccagcccttccccgcgcacatcgggaggagtgcacttgtgacctcctcttcatctctgccttccttcccctccacactttcctggtcgagggacgaaagcgcccgaagggcatccaggctggagaagcagaacagcacacctgagagtgactacgacaacactcccaacgacatggagccagatggcatggggtcaagccgaaagggacggcaaagaagtatggtgtggccaggggatggcttggtaccagacacagcagaaccccatgtggccccaagccccactctccctagcaccgaagatgtcatcaggaagactgaacagatcaccaaaaacatacaggagctcttaagagcagcccaagaaaataaacatgacagttatattccctgctcagagaggatacacgtagctgttacagaaatggcagcattattccccaaaaaacccaagtctgatatggtgaggacttcccttcgtttactgacgtccagtgcctaccgactgcagtcagagtgcaagaagaccctcccaggggaccccggctcacccacagacgttcagctggtcacgcagcaggtcatccagtgtgcgtacgacatcgccaaggctgccaagcagctggttaccatcaccaccaaagagaacaacaactgacaagggcagggcaccgcctcctctgttttctaggctttataaagtccaatttcaaattcagacgcagaactcttcagatttctacaaaaagaaacatttaatgacggtttaaaactttttaaaagaaaactcagtattatttttgcatgttttctaaccaattttcaactatttaacccacttgccttattttgtgcctatttgctggtttagtttctgatgttcggttgtgttgtcaacaactgttgagttgatcacatacatccaaaagtatagtttcattgtctaaagtttgtgaaaacttttccatcccttaaaactccctgcctatggctgaaactataaatgaaatttttcataaaacattttcttgagagagttcagttaaaaaagaaaaaatcagcgtcatttgttccctgccaagcatcgtgcaataagtgaatttcctggcctacttcataatctctaagtttggggtatctccaagcatgtatgtagagaaaggactttgccgctttttaaaactagtgtcacagtctctcttgggaggaaacaatgaattggttcatttcttctcagtgttttaccctgttacatgttctgttatttaatgttgttatctcaagctcctatctcttgatgttttcttgtcatcttgaaggctccatggaatgagataaagcattgacccaccacaggacatctcatgaagccatgttcagggtaggagctccacgcacatcaccacccattgtcaggtgctctccctcacccctgtaagccagacagtttgttcaaaacctgcagcaaagagaagcatcagtctaacaagccagaactcattttgtgccacccatttaggtatcactaccatgaactatagggaaaagaaatcacctactccctgacactgtgttgtacccttcatccaaaagtcagcttgcttctctgaccacttacagctttctcacatgagttgcttcacatttttcatcatctttaaggacttcttataaggaaagatgtatcgtatcgcagtcatctgagttagtttctcctccatcacctcatgagtacttaaaaattagacatcaactttcaagagttccttagagagtgtgctctagctggctgcctgctaccccaaagctctgaaagagtaaggttgaagtgctggaacatgctcagattgttttttagttactcaaaagccccttcttgttctgaatgtgaaagctcttcccgttcctgcttactgcagccattctgtgtgtgtggttcagaccctggcctagggccggtgatgtggatgagtgaagggagccaggtacacggcagcagggcagaggagactatggggagcccaccgcctacacagtaggggcagtagcccccagctccacgcctgttgccatgtggaaaagtgggcctagggtggccacagctttgatttttcaagagacaagaaacctagatgttttttggtgccatctctccatttataaatgttggcaaccaatttgaacactttcagagaccatgtgcaggtgagctgtgtcctctaggctgccagctcacagcccccaccccagggccctgtaagctgtgcagtgtgagggcctggcttccccggacacacctggagcagcctctgagtcttacccgtaatggagccggccaaccctgtgtgttatgttgctgtcgctcctgtttttaaccatatgttctgtcccatagcagtcattcacacatgtgaagaagacacaagaatcaaagtacaagttgcctcaatacatgctaataactaagcttctattttcacaggactgatcgatgcacacctttatagcttgaccatatgctgtcatgaaagtagcaccccgacggtgcttgctttactaagtcaccgtgtgtggatgcttttgtcgcattttgcttcactgtgagtagcatgggaaaagggtccacgtctccaaaagactcttccacttgtttgtcccacagccctaagtgccacattgctgttggatgctcccgggatgccttctagaagggggcctcccaccttaagttcaggcgccatctgatagccttttctgcaggcttcatgtccttagctgaccctcctttatcttgcaaacccctgcccctgctgtcccagggaggacgggcttctgtagaggcttctgggaaatgagctgtctgcaggaggtgaagcagtgttttccttggaatgtttgaggacctgcaatagaagatgttgcctttatggccctagagaaagtcaaggaacatggggaccaacaaagcatttccagttgtaagaatatgtcagaagagtgctcggttagcccacggtgccaaaactccaaacaagttccccggtggaatgacgtggccattggagggctgcaggtcgtcctctctgtatgtgccccgcgcatttccttggcctcatctgagatctggtgtcagagttctctgctcctgttggcaaatcgcaccttatctgaacatttgttccagccaccttttgcacatggattccgtaccttgcactagcaatgtctaccttcagtaacgtcgttctttttcaccctgtattctcaatgatcccttcctccccatatgccacccttcccccaaagctgatagggcagaggtgcactttatgaaactggcacttgactgaacagaaggaaacagctgtacctctaagctcctttcacagaaatcgtcatctgccttggaatgcaaatagttcttatttgccaaagaacagtgaattgggcccaaagatcaaacacagcatttcatgtaatcagaattctaaacgcacaactcgggagctgtgcacggcttctcaagtgattcagttgcagaaccaagagcaaaactcgcctgtttttgtcctcaatggcacccatgagctttccaatagtatagttttctttctttccttgtcctggttgaaggtaacgtgttcctagaaaagaaaatgctgcataggaaaactgagatgccttttattccaacgtgtttgatccctgtcactcattattctgtactttttattgtacattctattcctgtaattattgtgccctttaagtgttgtaaaatcgttttggaatttgtgcctgctagttatgcaataaacaggctctacaagtg

SEQ ID NO: 3791 - protein, 759 aa, Homo sapiens
MSKRLRSSEVCADCSGPDPSWASVNRGTFLCDECCSVHRSLGRHISQVRHLKHTPWPPTLLQMVETLYNNGANSIWEHSLLDPASIMSGRRKANPQDKVHPNKAEFIRAKYQMLAFVHRLPCRDDDSVTAKDLSKQLHSSVRTGNLETCLRLLSLGAQANFFHPEKGNTPLHVASKAGQILQAELLAVYGADPGTQDSSGKTPVDYARQGGHHELAERLVEIQYELTDRLAFYLCGRKPDHKNGQHFIIPQMADSSLDLSELAKAAKKKLQSLSNHLFEELAMDVYDEVDRRETDAVWLATQNHSALVTETTVVPFLPVNPEYSSTRNQGRQKLARFNAHEFATLVIDILSDAKRRQQGSSLSGSKDNVELILKTINNQHSVESQDNDQPDYDSVASDEDTDLETTASKTNRQKSLDSDLSDGPVTVQEFMEVKNALVASEAKIQQLMKVNNNLSDELRIMQKKLQTLQSENSNLRKQATTNVYQVQTGSEYTDTSNHSSLKRRPSARGSRPMSMYETGSGQKPYLPMGEASRPEESRMRLQPFPAHIGRSALVTSSSSLPSFPSTLSWSRDESARRASRLEKQNSTPESDYDNTPNDMEPDGMGSSRKGRQRSMVWPGDGLVPDTAEPHVAPSPTLPSTEDVIRKTEQITKNIQELLRAAQENKHDSYIPCSERIHVAVTEMAALFPKKPKSDMVRTSLRLLTSSAYRLQSECKKTLPGDPGSPTDVQLVTQQVIQCAYDIAKAAKQLVTITTKENNN

SEQ ID NO: 3792 - DNA, 5285 bp, Homo sapiens
gaagcgccgccgccaccgccgcctttgctgtcccccggcctctagttccccgcaggtgggaggtgggagccatgtcgaaacggctccggagcagcgaggtgtgcgctgactgcagcgggccggatccttcctgggcatcagtaaataggggaacgtttttatgtgatgagtgctgcagtgtccatcggagtctagggcgccatatctcccaagtgaggcatctgaaacacacaccgtggcctccaacactgcttcagatggttgagaccttgtataataacggtgctaactctatatgggagcattctttgctggaccctgcgtctattatgagtggaagacgtaaagctaatccacaggataaagtacatcccaataaagcggaattcatcagagccaagtatcagatgttagcgttcgtccatcgcttgccctgccgggatgacgatagtgtgactgccaaagatcttagcaagcaactccattcgagcgtgagaacagggaatcttgaaacctgtttgagactgttatctttaggagcacaagccaacttctttcatcctgaaaaaggaaacaccccactccatgttgcctccaaagcagggcagattttacaggctgaattattggcagtatatggagcagacccaggcacacaggattctagtgggaaaactcccgttgattatgcaaggcaaggagggcaccatgagctggcagagcgcctcgtggaaatacagtatgagctaacggacagactagccttctatctctgtggcaggaaaccagatcacaaaaatggacagcactttataatacctcaaatggcagacagcagcctggatttgtctgaattggcaaaagctgctaagaagaaacttcaatctctaagtaatcatttgtttgaagaacttgccatggatgtgtacgatgaagttgacaggcgagagacggatgcagtctggcttgccacgcaaaaccacagcgccctggtaaccgagacaacggtcgtcccctttcttccggtcaatcctgagtactcatcaacacgaaatcagggcagacagaagttagctcggttcaacgcccatgagtttgccacgctggtcattgacattctcagtgacgccaagaggagacagcagggcagttctctctcgggttcaaaagacaatgtggagctcatactgaaaaccatcaataaccagcacagcgttgagagtcaagacaacgatcagcccgactatgacagcgtggcatcagacgaagacacagatttggaaaccactgcaagcaaaacaaaccggcagaagcttcaaacactccagagtgaaaattcgaacctcaggaaacaggccacaaccaatgtatatcaggtgcaaactggttctgagtacacagacacttccaaccactcttccttaaagagacgtccgtctgcccggggcagtaggcccatgtccatgtacgagaccggatcaggtcagaaaccatatctcccaatgggagaagcgagccgccccgaagagagcaggatgagactccagcccttccccgcgcacgcatccaggctggagaagcagaacagcacacctgagagtgactacgacaacactcccaacgacatggagccagatggcatggggtcaagccgaaagggacggcaaagaagtatggtgtggccaggggatggcttggtaccagacacagcagaaccccatgtggccccaagccccactctccctagcaccgaagatgtcatcaggaagactgaacagatcaccaaaaacatacaggagctcttaagagcagcccaagaaaataaacatgacagttatattccctgctcagagaggatacacgtagctgttacagaaatggcagcattattccccaaaaaacccaagtctgatatggtgaggacttcccttcgtttactgacgtccagtgcctaccgactgcagtcagagtgcaagaagaccctcccaggggaccccggctcacccacagacgttcagctggtcacgcagcaggtcatccagtgtgcgtacgacatcgccaaggctgccaagcagctggttaccatcaccaccaaagagaacaacaactgacaagggcagggcaccgcctcctctgttttctaggctttataaagtccaatttcaaattcagacgcagaactcttcagatttctacaaaaagaaacatttaatgacggtttaaaactttttaaaagaaaactcagtattatttttgcatgttttctaaccaattttcaactatttaacccacttgccttattttgtgcctatttgctggtttagtttctgatgttcggttgtgttgtcaacaactgttgagttgatcacatacatccaaaagtatagtttcattgtctaaagtttgtgaaaacttttccatcccttaaaactccctgcctatggctgaaactataaatgaaatttttcataaaacattttcttgagagagttcagttaaaaaagaaaaaatcagcgtcatttgttccctgccaagcatcgtgcaataagtgaatttcctggcctacttcataatctctaagtttggggtatctccaagcatgtatgtagagaaaggactttgccgctttttaaaactagtgtcacagtctctcttgggaggaaacaatgaattggttcatttcttctcagtgttttaccctgttacatgttctgttatttaatgttgttatctcaagctcctatctcttgatgttttcttgtcatcttgaaggctccatggaatgagataaagcattgacccaccacaggacatctcatgaagccatgttcagggtaggagctccacgcacatcaccacccattgtcaggtgctctccctcacccctgtaagccagacagtttgttcaaaacctgcagcaaagagaagcatcagtctaacaagccagaactcattttgtgccacccatttaggtatcactaccatgaactatagggaaaagaaatcacctactccctgacactgtgttgtacccttcatccaaaagtcagcttgcttctctgaccacttacagctttctcacatgagttgcttcacatttttcatcatctttaaggacttcttataaggaaagatgtatcgtatcgcagtcatctgagttagtttctcctccatcacctcatgagtacttaaaaattagacatcaactttcaagagttccttagagagtgtgctctagctggctgcctgctaccccaaagctctgaaagagtaaggttgaagtgctggaacatgctcagattgttttttagttactcaaaagccccttcttgttctgaatgtgaaagctcttcccgttcctgcttactgcagccattctgtgtgtgtggttcagaccctggcctagggccggtgatgtggatgagtgaagggagccaggtacacggcagcagggcagaggagactatggggagcccaccgcctacacagtaggggcagtagcccccagctccacgcctgttgccatgtggaaaagtgggcctagggtggccacagctttgatttttcaagagacaagaaacctagatgttttttggtgccatctctccatttataaatgttggcaaccaatttgaacactttcagagaccatgtgcaggtgagctgtgtcctctaggctgccagctcacagcccccaccccagggccctgtaagctgtgcagtgtgagggcctggcttccccggacacacctggagcagcctctgagtcttacccgtaatggagccggccaaccctgtgtgttatgttgctgtcgctcctgtttttaaccatatgttctgtcccatagcagtcattcacacatgtgaagaagacacaagaatcaaagtacaagttgcctcaatacatgctaataactaagcttctattttcacaggactgatcgatgcacacctttatagcttgaccatatgctgtcatgaaagtagcaccccgacggtgcttgctttactaagtcaccgtgtgtggatgcttttgtcgcattttgcttcactgtgagtagcatgggaaaagggtccacgtctccaaaagactcttccacttgtttgtcccacagccctaagtgccacattgctgttggatgctcccgggatgccttctagaagggggcctcccaccttaagttcaggcgccatctgatagccttttctgcaggcttcatgtccttagctgaccctcctttatcttgcaaacccctgcccctgctgtcccagggaggacgggcttctgtagaggcttctgggaaatgagctgtctgcaggaggtgaagcagtgttttccttggaatgtttgaggacctgcaatagaagatgttgcctttatggccctagagaaagtcaaggaacatggggaccaacaaagcatttccagttgtaagaatatgtcagaagagtgctcggttagcccacggtgccaaaactccaaacaagttccccggtggaatgacgtggccattggagggctgcaggtcgtcctctctgtatgtgccccgcgcatttccttggcctcatctgagatctggtgtcagagttctctgctcctgttggcaaatcgcaccttatctgaacatttgttccagccaccttttgcacatggattccgtaccttgcactagcaatgtctaccttcagtaacgtcgttctttttcaccctgtattctcaatgatcccttcctccccatatgccacccttcccccaaagctgatagggcagaggtgcactttatgaaactggcacttgactgaacagaaggaaacagctgtacctctaagctcctttcacagaaatcgtcatctgccttggaatgcaaatagttcttatttgccaaagaacagtgaattgggcccaaagatcaaacacagcatttcatgtaatcagaattctaaacgcacaactcgggagctgtgcacggcttctcaagtgattcagttgcagaaccaagagcaaaactcgcctgtttttgtcctcaatggcacccatgagctttccaatagtatagttttctttctttccttgtcctggttgaaggtaacgtgttcctagaaaagaaaatgctgcataggaaaactgagatgccttttattccaacgtgtttgatccctgtcactcattattctgtactttttattgtacattctattcctgtaattattgtgccctttaagtgttgtaaaatcgttttggaatttgtgcctgctagttatgcaataaacaggctctacaagtg

SEQ ID NO: 3793 - protein, 679 aa, Homo sapiens
MSKRLRSSEVCADCSGPDPSWASVNRGTFLCDECCSVHRSLGRHISQVRHLKHTPWPPTLLQMVETLYNNGANSIWEHSLLDPASIMSGRRKANPQDKVHPNKAEFIRAKYQMLAFVHRLPCRDDDSVTAKDLSKQLHSSVRTGNLETCLRLLSLGAQANFFHPEKGNTPLHVASKAGQILQAELLAVYGADPGTQDSSGKTPVDYARQGGHHELAERLVEIQYELTDRLAFYLCGRKPDHKNGQHFIIPQMADSSLDLSELAKAAKKKLQSLSNHLFEELAMDVYDEVDRRETDAVWLATQNHSALVTETTVVPFLPVNPEYSSTRNQGRQKLARFNAHEFATLVIDILSDAKRRQQGSSLSGSKDNVELILKTINNQHSVESQDNDQPDYDSVASDEDTDLETTASKTNRQKLQTLQSENSNLRKQATTNVYQVQTGSEYTDTSNHSSLKRRPSARGSRPMSMYETGSGQKPYLPMGEASRPEESRMRLQPFPAHASRLEKQNSTPESDYDNTPNDMEPDGMGSSRKGRQRSMVWPGDGLVPDTAEPHVAPSPTLPSTEDVIRKTEQITKNIQELLRAAQENKHDSYIPCSERIHVAVTEMAALFPKKPKSDMVRTSLRLLTSSAYRLQSECKKTLPGDPGSPTDVQLVTQQVIQCAYDIAKAAKQLVTITTKENNN

SEQ ID NO: 3794 - DNA, 1797 bp, Homo sapiens
ggcacgagggttgcttttatactcagaatggaaatacctgatcttggctagttttgttataagatattgatttcatttagatttccctccacgaggtcagcaaactatcatgttcttatgtaaacttaggccaaggccagagttatcatagtccctaggttgctacggcttatcatgtgcttggtaaaaggtgatcgcaggttctcagacgagtttactttacatgagatggaatcaggcagagaggctgggatgatggagaaagctcgaggtgaagttttaaaaaaaaagttgtggaaaggaaagttccaaagaggtggtttctgaggaagtcagagcgcccagggccagagcagtcagtaatgggtgaatgaggttgtttggaaagtcggtgtgacagacacatggatgccatctacttctaggttgctggtgggtattaaatatgcacaatattccatagctcactgaggattttaaaattataagcataggattttatattttggggtgaaagaattatctggcacattaggtattggagtttaaaaaaaaagccaaatttcacagtcttaataactttttttaaaaaaaactaaaaggcgcttcatgtccagtgtgtggcccttctgaaacttatggtcatctctcccactgaaaccaaggtcttttcaaatgtggctaaatggggatgaggagacacgggtaggactttcttggtgtgtgtgcattctttaaagagccaagttgcttcggggaaacagccaggaaaatggtcaagattatttttagaggttattttattggggattttaagaactaataacatcttgagttatttttaattcagggggatgtggaaaggtttgcaattgtcaagtgttttgttgtagcttagtatccataagggaaacttagactatagacataactacaaagccagtgcagcttttgttttctgtatgttgttgggggatcaactttcacacatagcaagcacatggcctccctgatgtcaggatgcctttgttaggatctgtatttgcccttaattttgttgaaatcttttttccttcttcctcttgaaaagttccaaaatatagtttattgtatctttcatcactaaaaatttgttcctttttcactatgggcagttcacacaaggcaaaaactattgaacagttggttttagtgtgttgtataactttgctgtatatcaaactaattttgacaagttttcatcctaagcctcaaatcatgtaattaataatttgcctgtttatttatgacctaattgtgattcttttattaataaaagctaatgggaaaaggatccctgattaagctgatgactagacctacaattaattttcctgcagtatatgaagtattgtaccagagtattaaaagatatgtaatattttattgataaatctatcctttaaaaggaatacgttttaggatgtcatcattttgatgtgaatcatgtaaatgttgataatatgctgtttattatacatttagtgtttcaagagattcacttaattgcctttttgcccacgtatattatgtagtctatttgcaactgttcttaaaaaaatgacattaaaagaatagtttatgtagagaaacattagtggatgttaattgtctccccacctatatttatgggtgttagcgcaactgctttgctagttgcaaagctgtattatcagagtaaaagtgtatttgtaaactgtatgggaactaaaaattaggaataaaaccattttcttataaaaaaaaaaaaaaaaaaaa

SEQ ID NO: 3795 - protein, 50 aa, Homo sapiens
MCLVKGDRRFSDEFTLHEMESGREAGMMEKARGEVLKKKLWKGKFQRGGF

SEQ ID NO: 3796 - DNA, 6261 bp, Homo sapiens
gccctgcttccccttgcacctgcgccgggcggccatggacttgtacagcaccccggccgctgcgctggacaggttcgtggccagaaggctgcagccgcggaaggagttcgtagagaaggcgcggcgcgctctgggcgccctggccgctgccctgagggagcgcgggggccgcctcggtgctgctgccccgcgggtgctgaaaactgtcaagggaggctcctcgggccggggcacagctctcaagggtggctgtgattctgaacttgtcatcttcctcgactgcttcaagagctatgtggaccagagggcccgccgtgcagagatcctcagtgagatgcgggcatcgctggaatcctggtggcagaacccagtccctggtctgagactcacgtttcctgagcagagcgtgcctggggccctgcagttccgcctgacatccgtagatcttgaggactggatggatgttagcctggtgcctgccttcaatgtcctgggtcaggccggctccggcgtcaaacccaagccacaagtctactctaccctcctcaacagtggctgccaagggggcgagcatgcggcctgcttcacagagctgcggaggaactttgtgaacattcgcccagccaagttgaagaacctaatcttgctggtgaagcactggtaccaccaggtgtgcctacaggggttgtggaaggagacgctgcccccggtctatgccctggaattgctgaccatcttcgcctgggagcagggctgtaagaaggatgctttcagcctagccgaaggcctccgaactgtcctgggcctgatccaacagcatcagcacctgtgtgttttctggactgtcaactatggcttcgaggaccctgcagttgggcagttcttgcagcggcagcttaagagacccaggcctgtgatcctggacccagctgaccccacatgggacctggggaatggggcagcctggcactgggatttgctagcccaggaggcagcatcctgctatgaccacccatgctttctgagggggatgggggacccagtgcagtcttggaaggggccgggccttccacgtgctggatgctcaggtttgggccaccccatccagctagaccctaaccagaagacccctgaaaacagcaagagcctcaatgctgtgtacccaagagcagggagcaaacctccctcatgcccagctcctggccccactggggcagccagcatcgtcccctctgtgccgggaatggccttggacctgtctcagatccccaccaaggagctggaccgcttcatccaggaccacctgaagccgagcccccagttccaggagcaggtgaaaaaggccattgacatcatcttgcgctgcctccatgagaactgtgttcacaaggcctcaagagtcagtaaagggggctcatttggccggggcacagacctaagggatggctgtgatgttgaactcatcatcttcctcaactgcttcacggactacaaggaccaggggccccgccgcgcagagatccttgatgagatgcgagcgcagctagaatcctggtggcaggaccaggtgcccagcctgagccttcagtttcctgagcagaatgtgcctgaggctctgcagttccagctggtgtccacagccctgaagagctggacggatgttagcctgctgcctgccttcgatgctgtggggcagctcagttctggcaccaaaccaaatccccaggtctactcgaggctcctcaccagtggctgccaggagggcgagcataaggcctgcttcgcagagctgcggaggaacttcatgaacattcgccctgtcaagctgaagaacctgattctgctggtgaagcactggtaccgccaggttgcggctcagaacaaaggaaaaggaccagcccctgcctctctgcccccagcctatgccctggagctcctcaccatctttgcctgggagcagggctgcaggcaggattgtttcaacatggcccaaggcttccggacggtgctggggctcgtgcaacagcatcagcagctctgtgtctactggacggtcaactatagcactgaggacccagccatgagaatgcaccttcttggccagcttcgaaaacccagacccctggtcctggaccccgctgatcccacctggaacgtgggccacggtagctgggagctgttggcccaggaagcagcagcgctggggatgcaggcctgctttctgagtagagacgggacatctgtgcagccctgggatgtgatgccagccctcctttaccaaaccccagctggggaccttgacaagttcatcagtgaatttctccagcccaaccgccagttcctggcccaggtgaacaaggccgttgataccatctgttcatttttgaaggaaaactgcttccggaattctcccatcaaagtgatcaaggtggtcaagggtggctcttcagccaaaggcacagctctgcgaggccgctcagatgccgacctcgtggtgttcctcagctgcttcagccagttcactgagcagggcaacaagcgggccgagatcatctccgagatccgagcccagctggaggcatgtcaacaggagcggcagttcgaggtcaagtttgaagtctccaaatgggagaatccccgcgtgctgagcttctcactgacatcccagacgatgctggaccagagtgtggactttgatgtgctgccagcctttgacgccctaggccagctggtctctggctccaggcccagctctcaagtctacgtcgacctcatccacagctacagcaatgcgggcgagtactccacctgcttcacagagctacaacgggacttcatcatctctcgccctaccaagctgaagagcctgatccggctggtgaagcactggtaccagcagtgtaccaagatctccaaggggagaggctccctacccccacagcacgggctggaactcctgactgtgtatgcctgggagcagggcgggaaggactcccagttcaacatggctgagggcttccgcacggtcctggagctggtcacccagtaccgccagctctgtatctactggaccatcaactacaacgccaaggacaagactgttggagacttcctgaaacagcagcttcagaagcccaggcctatcatcctggatccggctgacccgacaggcaacctgggccacaatgcccgctgggacctgctggccaaggaagctgcagcctgcacatctgccctgtgctgcatgggacggaatggcatccccatccagccatggccagtgaaggctgctgtgtgaagttgagaaaatcagcggtcctactggatgaagagaagatggacaccagccctcagcatgaggaaattcagggtcccctaccagatgagagagattgtgtacatgtgtgtgtgagcacatgtgtgcatgtgtgtgcacacgtgtgcatgtgtgtgttttagtgaatctgctctcccagctcacacactcccctgcctcccatggcttacacactaggatccagactccatggtttgacaccagcctgcgtttgcagcttctctgtcacttccatgactctatcctcataccaccactgctgcttcccacccagctgagaatgccccctcctccctgactcctctctgcccatgcaaattagctcacatctttcctcctgctgcaatccatcccttcctcccattggcctctccttgccaaatctaaatagtttatatagggatggcagagagttcccatctcatctgtcagccacagtcatttggtactggctacctggagccttatcttctgaagggttttaaagaatggccaattagctgagaagaattatctaatcaattagtgatgtctgccatggatgcagtagaggaaagtggtggtacaagtgccatgattgattagcaatgtctgcactggatacggaaaaaagaaggtgcttgcaggtttacagtgtatatgtgggctattgaagagccctctgagctcggttgctagcaggagagcatgcccatattggcttactttgtctgccacagacacagacagagggagttgggacatgcatgctatggggaccctcttgttggacacctaattggatgcctcttcatgagaggcctccttttcttcaccttttatgctgcactcctcccctagtttacacatcttgatgctgtggctcagtttgccttcctgaatttttattgggtccctgttttctctcctaacatgctgagattctgcatccccacagcctaaactgagccagtggccaaacaaccgtgctcagcctgtttctctctgccctctagagcaaggcccaccaggtccatccaggaggctctcctgacctcaagtccaacaacagtgtccacactagtcaaggttcagcccagaaaacagaaagcactctaggaatcttaggcagaaagggattttatctaaatcactggaaaggctggaggagcagaaggcagaggccaccactggactattggtttcaatattagaccactgtagccgaatcagaggccagagagcagccactgctactgctaatgccaccactacccctgccatcactgccccacatggacaaaactggagtcgagacctaggttagattcctgcaaccacaaacatccatcagggatggccagctgccagagctgcgggaagacggatcccacctccctttcttagcagaatctaaattacagccagacctctggctgcagaggagtctgagacatgtatgattgaatgggtgccaagtgccagggggcggagtccccagcagatgcatcctggccatctgttgcgtggatgagggagtgggtctatctcagaggaaggaacaggaaacaaagaaaggaagccactgaacatcccttctctgctccacaggagtgccttagacagcctgactctccacaaaccactgttaaaacttacctgctaggaatgctagattgaatgggatgggaagagccttccctcattattgtcattcttggagagaggtgagcaaccaagggaagctcctctgattcacctagaacctgttctctgccgtctttggctcagcctacagagactagagtaggtgaagggacagaggacagggcttctaatacctgtgccatattgacagcctccatccctgtcccccatcttggtgctgaaccaacgctaagggcaccttcttagactcacctcatcgatactgcctggtaatccaaagctagaactctcaggaccccaaactccacctcttggattggccctggctgctgccacacacatatccaagagctcagggccagttctggtgggcagcagagacctgctctgccaagttgtccagcagcagagtggccctggcctgggcatcacaagccagtgatgctcctgggaagaccaggtggcaggtcgcagttgggtaccttccattcccaccacacagactctgggcctccccgcaaaatggctccagaattagagtaattatgagatggtgggaaccagagcaactcaggtgcatgatacaaggagaggttgtcatctgggtagggcagagaggagggcttgctcatctgaacaggggtgtatttcattccaggccctcagtctttggcaatggccaccctggtgttggcatattggccccactgtaacttttgggggcttcccggtctagccacaccctcggatggaaagacttgactgcataaagatgtcagttctccctgagttgattgataggcttaatggtcaccctaaaaacacccacatatgcttttcgatggaaccaggtaagttgacgctaaagttcttatggaaaaatacacacgcaatagctaggaaaacacagggaaagaagagttctgagcagggcctagtcttagccaatattaaaacatactatgaagcctctgatacttaaacagcatggcgctggtacgtaaatagaccaatgcagttaggtggctctttccaagactctggggaaaaaagtagtaaaaagctaaatgcaatcaatcagcaattgaaagctaagtgagagagccagagggcctccttggtggtaaaagagggttgcatttcttgcagccagaaggcagagaaagtgaagaccaagtccagaactgaatcctaagaaatgcaggactgcaaagaaattggtgtgtgtgtgtgtgtgtgtgtgtgtgtgtgtgtttaatttttaaaaagtttttatt

SEQ ID NO: 3797 - DNA, 2911 bp, Homo sapiens
cggcagccagctgagagcaatgggaaatggggagtcccagctgtcctcggtgcctgctcagaagctgggttggtttatccaggaatacctgaagccctacgaagaatgtcagacactgatcgacgagatggtgaacaccatctgtgacgtcctgcaggaacccgaacagttccccctggtgcagggagtggccataggtggctcctatggacggaaaacagtcttaagaggcaactccgatggtacccttgtcctcttcttcagtgacttaaaacaattccaggatcagaagagaagccaacgtgacatcctcgataaaactggggataagctgaagttctgtctgttcacgaagtggttgaaaaacaatttcgagatccagaagtcccttgatgggttcaccatccaggtgttcacaaaaaatcagagaatctctttcgaggtgctggccgccttcaacgctctgagcttaaatgataatcccagcccctggatctatcgagagctcaaaagatccttggataagacaaatgccagtcctggtgagtttgcagtctgcttcactgaactccagcagaagttttttgacaaccgtcctggaaaactaaaggatttgatcctcttgataaagcactggcatcaacagtgccagaaaaaaatcaaggatttaccctcgctgtctccgtatgccctggagctgcttacggtgtatgcctgggaacaggggtgcagaaaagacaactttgacattgctgaaggcgtcagaaccgtactggagctgatcaaatgccaggagaagctgtgtatctattggatggtcaactacaactttgaagatgagaccatcaggaacatcctgctgcaccagctccaatcagcgaggccagtaatcttggatccagttgacccaaccaataatgtgagtggagataaaatatgctggcaatggctgaaaaaagaagctcaaacctggttgacttctcccaacctggataatgagttacctgcaccatcttggaatgttctgcctgcaccactcttcacgaccccaggccaccttctggataagttcatcaaggagtttctccagcccaacaaatgcttcctagagcagattgacagtgctgttaacatcatccgtacattccttaaagaaaactgcttccgacaatcaacagccaagatccagattgtccggggaggatcaaccgccaaaggcacagctctgaagactggctctgatgccgatctcgtcgtgttccataactcacttaaaagctacacctcccaaaaaaacgagcggcacaaaatcgtcaaggaaatccatgaacagctgaaagccttttggagggagaaggaggaggagcttgaagtcagctttgagcctcccaagtggaaggctcccagggtgctgagcttctctctgaaatccaaagtcctcaacgaaagtgtcagctttgatgtgcttcctgcctttaatgcactgggtcagctgagttctggctccacacccagccccgaggtttatgcagggctcattgatctgtataaatcctcggacctcccgggaggagagttttctacctgtttcacagtcctgcagcgaaacttcattcgctcccggcccaccaaactaaaggatttaattcgcctggtgaagcactggtacaaagagtgtgaaaggaaactgaagccaaaggggtctttgcccccaaagtatgccttggagctgctcaccatctatgcctgggagcaggggagtggagtgccggattttgacactgcagaaggtttccggacagtcctggagctggtcacacaatatcagcagctctgcatcttctggaaggtcaattacaactttgaagatgagaccgtgaggaagtttctactgagccagttgcagaaaaccaggcctgtgatcttggacccagccgaacccacaggtgacgtgggtggaggggaccgttggtgttggcatcttctggcaaaagaagcaaaggaatggttatcctctccctgcttcaaggatgggactggaaacccaataccaccttggaaagtgccgacaatgcagacaccaggaagttgtggagctaggatccatcctattgtcaatgagatgttctcatccagaagccatagaatcctgaataataattctaaaagaaacttctagagatcatctggcaatcgcttttaaagactcggctcaccgtgagaaagagtcactcacatccattcttcccttgatggtccctattcctccttcccttgcttcttggacttcttgaaatcaatcaagactgcaaaccctttcataaagtcttgccttgctgaactccctctctgcaggcagcctgcctttaaaaatagttgctgtcatccactttatgtgcatcttatttctgtcaacttgtattttttttcttgtatttttccaattagctcctcctttttccttccagtctaaaaaaggaatcctctgtgtcttcaaagcaaagctctttactttccccttggttctcataactctgtgatcttgctctcggtgcttccaactcatccacgtcctgtctgtttcctctgtatacaaaaccctttctgcccctgctgacacagacatcctctatgccagcagccagccaaccctttcattagaacttcaagctctccaaaggctcagattataactgttgtcatatttatatgaggctgttgtcttttccttctgagcctgcctttctcccccccacccaggagtatcctcttgccaaatcaaaagactttttccttgggctttagccttaaagatacttgaaggtctaggtgctttaacctcacataccctcacttaaacttttatcactgttgcatataccagttgtgatacaataaagaatgtatctgg

SEQ ID NO: 3798 - DNA, 1187 bp, Homo sapiens
agtgagagggtccaagcctggtaagaatgtccagcttcaggagaatgaaatcagaggactgtgcttaaagtctcgtgaaatctttctcagtcagcctatcctactagaacttgaagcaccactcaaaatatgtggtgacatccatggacaatactatgatttgctgcgactttttgagtacggtggtttcccaccagaaagcaactacctgtttcttggggactatgtggacaggggaaagcagtcattggagacgatctgcctcttactggcctacaaaataaaatatcctgagaatttttttcttctcagagggaaccatgaatgtgccagcatcaacagaatttatggattttatgatgaatgtaaaagaagatacaacattaaactatggaaaactttcacagactgttttaactgtttaccgatagcagccatcgtggatgagaagatattctgctgtcatggaggtttatcaccagatcttcaatctatggagcagattcggcgaattatgcgaccaactgatgtaccagatcaaggtcttctttgtgatcttttgtggtctgaccccgataaagatgtcttaggctggggtgaaaatgacagaggagtgtccttcacatttggtgcagaagtggttgcaaaatttctccataagcatgatttggatcttatatgtagagcccatcaggtggttgaagatggatatgaattttttgcaaagaggcagttggtcactctgttttctgcgcccaattattgcggagagtttgacaatgcaggtgccatgatgagtgtggatgaaacactaatgtgttcttttcagattttaaagcctgcagagaaaaagaagccaaatgccacgagacctgtaacgcctccaagggttgcatcaggcctgaacccgtccattcagaaagcttcaaattatagaaacaatactgttctatacgagtgaccgattatgctttctttggcctacattctttattctgcggtgaagttgaggcttataagttaaaacaaaggaactaacttactgtccaccagtttatacagaactcacagtacctatgacttttttaaactaagatctgttaaaaaagaaatctgtttcaacagatgaccgtgtacaataccgtgtggtgaaaatgaattcagacttattaaatgatgaacttgtt

SEQ ID NO: 3799 - protein, 155 aa, Homo sapiens
MEQIRRIMRPTDVPDQGLLCDLLWSDPDKDVLGWGENDRGVSFTFGAEVVAKFLHKHDLDLICRAHQVVEDGYEFFAKRQLVTLFSAPNYCGEFDNAGAMMSVDETLMCSFQILKPAEKKKPNATRPVTPPRVASGLNPSIQKASNYRNNTVLYE

SEQ ID NO: 3800 - DNA, 1769 bp, Homo sapiens
tcctctaattgggactccgagccagggctatttctcgcgctggcgcggttccaagaagcatcccagccatcactctttcacctgctccttagagaagggaagatgagcgagtcgagctcgaagtccagccagcccttggcctccaagcaggaaaaggagggcactgagaagcggggccggggcaggccgcgcaagcagcctccgatgagtcctgggacagcgcttgtagggagtcagaaggagcccagcgaagtgccaacacctaagagacctcggggccaaccaaagggaagcaaaaacaagggtgccgccaagacccggaaaaccaccataactccaggaaggaaaccaaggggcagacccaaaaaactggagaagtaggaagaggagggcatctcgcaagagtcctcggaggaggagcagtgaaccgtgcgtgccgcctgctcctcactggaggagcagctgccttctgggactggacagctttgctccgctcccaccgccctcgccccttccgcaggcccaccatcaccaccgcctctggccgccacccccatcttccacctgtgcccacaccaccacactacgcagcacaccagccactgcagggctcccatgggctgagtggggagcagttttcccctggcctcagttcccagctccccccgcccacccacgcatacacacatgccctcctggacaaggctagcatctcacttagccgcaccctgcacctgctgcgtccccactccgttggtggtggggacattgctctctgggcttttggtttgggggcgccctctctgcttcactgttccctctggcctcccatagtggggcctgggagggttcccctggccttaaaaggggcccaagccccatctcatcctggcacgccctactccactgccctggcagcagcaggtgtggccaatggaggggggtgctggcccccaggattcccccagccaaactgtctttgtcaccacgtggggctcacacttttcatccttccccaccttccctagtccctgcactaggttggacagcccccttcggctacaggaaggcaggaggggtgagtcccctactccctcttcactgtggccgcagcccccttgccctccgcctgggatcgagtacatattgtggtgatggagatgcagtcacttattgtccaggtgaggcccacgagccctgtgtccgccgcctgaggtgggctggggctgctcccctaaccctactttgcttccgccactcagccatttccccctcctcagatggggcaccaatagcaaggagctcaccctgcccgctcccaaccccgctcctgctcttccctgcccctcaaggttctggttccatttttcctctgtccacaaactacctctgaacagttgtgttgttttttgttcaatgttccattcttccacatccgtcattgctgctgctaccagcgccaaatattcatcctcactgcctcctgttctgcccacgatcccctcccgcaagatactctttgtagggaagaggggctggggcatggcaggctgggtgaccgcctaccccagtcccagggaaggtggggccctgcccctaggatgctgcagcagagtgagcaaggggtcccgaatcaaccataaagggcgtaggggccacctcctccccctgttctgttggggaggggtgaccatgatttgtcccagcctggggctccccctctggtttcctatttgcagttacttgaataaaaaaaaatccttttctgg

SEQ ID NO: 3801 - protein, 203 aa, Homo sapiens
MSESSSKSSQPLASKQEKDGTEKRGRGRPRKQPPVSPGTALVGSQKEPSEVPTPKRPRGRPKGSKNKGAAKTRKTTTTPGRKPRGRPKKLHRRRRKRRASRRSPRRRSSDPCVPPAPHWRSSFLLGLDSFAPLPPPPPLPQAHHHHRLWPPPPSSTCALTTTLHSTPAAAGLPWAEWGAVFPWPQFPAPPAHPRIHTCPPGQG

SEQ ID NO: 3802 - DNA, 636 bp, Homo sapiens
gcgctggcgcggttccaagaagcatcccagccatcactctttcacctgctccttagagaagggaagatgagcgagtcgagctcgaagtccagccagcccttggcctccaagcaggaaaaggagggcactgagaagcggggccggggcaggccgcgcaagcagcctccgatgagtcctgggacagcgcttgtagggagtcagaaggagcccagcgaagtgccaacacctaagagacctcggggccaaccaaagggaagcaaaaaaaactggagaagtaggaagaggagggcatctcgcaagagtcctcggaggaggagcagtgaaccgtgcgtgccgcctgctcctcactggaggagcagctgccttctgggactggacagctttgctccgctcccaccgccctcgccccttccgcaggcccaccatcaccaccgcctctggccgccacccccatcttccacctgtgcccacaccaccacactacgcagcacaccagccactgcagggctcccatgggctgagtggggagcagttttcccctggcctcagttcccagctccccccgcccacccacgcatacacacatgccctcctggacaaggctagcatctcacttagccgcaccctgcacctgct

SEQ ID NO: 3803 - protein, 179 aa, Homo sapiens
MSESSSKSSQPLASKQEKEGTEKRGRGRPRKQPPMSPGTALVGSQKEPSEVPTPKRPRGQPKGSKKNWRSRKRRASRKSPRRRSSEPCVPPAPHWRSSCLLGLDSFAPLPPPSPLPQAHHHHRLWPPPPSSTCAHTTTLRSTPATAGLPWAEWGAVFPWPQFPAPPAHPRIHTCPPGQG

SEQ ID NO: 3804 - DNA, 400 bp, Homo sapiens
gcatcccagccatcactctttcacctgctccttagagaagggaagatgagcgagtcgagctcgaagtccagccagcccttggcctccaagcaggaaaaggagggcactgagaagcggggccggggcaggccgcgcaagcagcctccgatgagtcctgggacagcgcttgtagggagtcagaaggagcccagcgaagtgccaacacctaagagacctcggggccaaccaaagggaagcaaaaacaagggtgccgccaagacccggaaaaccaccataactccaggaaggaaaccaaggggcagacccaaaaaactggagaagtaggaagaggagggcatctcgcaagagtcctcggaggaggagcagtgacttctgggactggacagctttgctccgctcc

SEQ ID NO: 3805 - DNA, 1853 bp, Homo sapiens
gatccctgagcgtgtggcagcagtgcggtcgtggtccctccctatgcagcctggtttctagcgtgacacgcccttgacttgaggaccatgaaccgcagccgccaggtgacgtgcgtggcctgggtccgctgcggcgtggccaaagagacaccagacaaggtagagctgagtaaagaagaagtaaaacgcctcattgctgaggcaaaggagaaattgcaagaagaaggtggtggcagtgatgaagaggagacaggcagtccttcagaagatggcatgcagagtgcacgcacccaggcacgcccaagagagcccctggaggatggtgacccagaggatgacaggacgcttgatgatgatgagctggctgagtacgacttagataaatatgatgaggaaggtgacccagatgctgagactcttggtgaatctctcttgggtcttacggtctacgggagtaatgatcaagatccttacgttactctgaaagatacagaacaatatgaacgtgaagatttcttgattaagcccagtgataatcttatagtttgtggccgagctgaacaggaccagtgcaatttagaggtgcatgtttataatcaagaagaagactctttttatgtacaccatgatatactcttgtctgcatatcctctgagtgtggaatggctgaattttgatcctagcccagatgattctactggaaattacattgctgtaggaaacatgacccctgttattgaagtgtgggaccttgatatagtggactctttagagccagtcttcacactcggaagtaaactttcaaaaaagaagaaaaagaaaggaaagaagagttcctcagcagaagggcataccgatgctgtccttgacctttcatggaataagctaatcagaaatgttttagcaagtgcatcagctgacaacactgtaattctgtgggatatgtccttggggaaaccagcagctagcctcgctgtacacacagacaaggtccaaacactgcagtttcatccatttgaagcacagactctgatttctggctcatatgataagtcagtggctttgtatgactgccgaagtccagatgaaagccatcgaatgtggcgattcagtgggcagatagagagagtgacttggaatcacttttcaccttgtcatttcttggccagtacagatgacggctttgtatataatttggatgcacgttcagataagccaatttttacacttaatgcacacaatgatgaaatctctggtcttgatcttagcagtcaaatcaagggctgtctcgtgactgcttcagctgacaaatacgtgaagatctgggacatcttaggagataggccaagtctagttcattctagggacatgaaaatgggagttctcttctgttcttcatgttgccctgatttgccatttatttatgcctttggaggtcaaaaagaagggcttcgggtctgggatataagcacagtctcttcagtaaatgaagcatttggaagacgagagaggcttgttcttgggagtgcaagaaattcatctattagtggcccttttggcagcaggagctcagatacacccatggagtcttaatgaagatcatctaatttcctgcttaccttaactgggaattttaaaaagttggcctaaaaatgttccatgcgtggcagcaaccatgcagagtgactgaaacacaattcatttctgactgacattcctttctgcaactgcggtggcaccacaaatatccggtctttgtgcttgctcttcagatggatggtttgtaaggctcttgttgcatttcttaaaaaagagtaataaaaaggatttttaaaaagtaattccttaaacat

SEQ ID NO: 3806 - protein, 501 aa, Homo sapiens
MNRSRQVTCVAWVRCGVAKETPDKVELSKEEVKRLIAEAKEKLQEEGGGSDEEETGSPSEDGMQSARTQARPREPLEDGDPEDDRTLDDDELAEYDLDKYDEEGDPDAETLGESLLGLTVYGSNDQDPYVTLKDTEQYEREDFLIKPSDNLIVCGRAEQDQCNLEVHVYNQEEDSFYVHHDILLSAYPLSVEWLNFDPSPDDSTGNYIAVGNMTPVIEVWDLDIVDSLEPVFTLGSKLSKKKKKKGKKSSSAEGHTDAVLDLSWNKLIRNVLASASADNTVILWDMSLGKPAASLAVHTDKVQTLQFHPFEAQTLISGSYDKSVALYDCRSPDESHRMWRFSGQIERVTWNHFSPCHFLASTDDGFVYNLDARSDKPIFTLNAHNDEISGLDLSSQIKGCLVTASADKYVKIWDILGDRPSLVHSRDMKMGVLFCSSCCPDLPFIYAFGGQKEGLRVWDISTVSSVNEAFGRRERLVLGSARNSSISGPFGSRSSDTPMES

SEQ ID NO: 3807 - DNA, 2913 bp, Homo sapiens
gggggagcccctgcaagtttcccgggccgcgcgccgcgctcgctcgcctcccagcccgcggcccgagccgccgccgcgcccgccatgccctcggccaaacaaaggggctccaagggcggccacggcgccgcgagcccctcggagaagggtgcccacccgtcgggcggcgcggatgacgtggcgaagaagccgccgccggcgccgcagcagccgccgccgccgcccgcgccgcacccgcagcagcacccgcagcagcacccgcagaaccaggcgcacggcaagggcggccaccgcggcggcggcggcggcggcggcaagtcctcctcctcctcctccgcctccgccgccgctgccgccgccgccgcctcgtcctcggcgtcctgctcgcgcaggctcggcagggcgctcaactttctcttctacctcgccctggtggcggcggccgctttctcgggctggtgcgtccaccacgtcctggaggaggtccagcaggtccggcgcagccaccaggacttctcccggcagagggaggagctgggccagggcttgcagggcgtcgagcagaaggtgcagtctttgcaagccacatttggaacttttgagtccatcttgagaagctcccaacataaacaagacctcacagagaaagctgtgaagcaaggggagagtgaggtcagccggatcagcgaagtgctgcagaaactccagaatgagattctcaaagacctctcggatgggatccatgtggtgaaggacgcccgggagcgggacttcacgtccctggagaacacggtggaggagcggctgacggagctcaccaaatccatcaacgacaacatcgccatcttcacagaagtccagaagaggagccagaaggagatcaatgacatgaaggcaaaggttgcctccctggaagaatctgaggggaacaagcaggatttgaaagccttaaaggaagctgtgaaggagatacagacctcagccaagtccagagagtgggacatggaggccctgagaagtacccttcagactatggagtctgacatctacaccgaggttcgcgagctggtgagcctcaagcaggagcagcaggctttcaaggaggcggccgacacggagcggctcgccctgcaggccctcacggagaagcttctcaggtctgaggagtccgtctcccgcctcccggaggagatccggagactggaggaagagctccgccagctgaagtccgattcccacgggccgaaggaggacggaggcttcagacactcggaagcctttgaggcactccagcaaaagagtcagggactggactccaggctccagcacgtggaggatggggtgctctccatgcaggtggcttctgcgcgccagaccgagagcctggagtccctcctgtccaagagccaggagcacgagcagcgcctggccgccctgcaggggcgcctggaaggcctcgggtcctcagaggcagaccaggatggcctggccagcacggtgaggagcctgggcgagacccagctggtgctctacggtgacgtggaggagctgaagaggagtgtgggcgagctccccagcaccgtggaatcactccagaaggtgcaggagcaggtgcacacgctgctcagtcaggaccaagcccaggccgcccgtctgcctcctcaggacttcctggacagactttcttctctagacaacctgaaagcctcagtcagccaagtggaggcggacttgaaaatgctcaggactgctgtggacagtttggttgcatactcggtcaaaatagaaaccaacgagaacaatctggaatcagccaagggtttactagatgacctgaggaatgatctggataggttgtttgtgaaagtggagaagattcacgaaaaggtctaaatgaattgcgtgtgcagggcgcggatttaaagtccaatttctcatgaccaaaaaatgtgtggttttttcccatgtgtcccctaccccccaatttcttgtcccctcttaaagagcagttgtcaccacctgaacaccaaggcattgtattttcatgcccagttaacttatttacaatatttaagttctctgcttctgcatttggttggtttcctgaagcgcagcccctgtgaataacaggtggcttttcatggatgtctctagtcagagaaaaatgataaaggcttaaattgaggattaacagaagcagattaacctcagaaatcctgtctggctggcagatttcaagtaaaaaaaaaaaaaaggtgggttggggggacccttttctttctagttgtctttaaggaaaattaattttacttttttttttgttctggccgaaatttttatgagatatctctcacttgtcttccactttgaaccggttaaagctcatagctgtcagctctgaatgaggaggggagaagcccctgggtctttctttgaaaggaatccgctgcttgagggctgcctccctcatggtgtgcgtgtcgttctcttcctgacgcatctgtgatatcagaggtaactatgcaaagcatccaggcggttctgaatgtgaagcactacacccagcagagtcccggtgccctctgtccccactgccggcccatgtcctctctccggaggtcaccaaggaatgcacaggtttcgactaccagaaaggggagtccttgggttctttcaaaaaattcgtgaggagagctgtctacagtggaatagggggtctccctggggaatgcaggccaagtccttttattttaacatgatgtccatgaagaggtttgccgtctgggcagccctgtcggcaaggagcgtgcatactgcgtttgtgtaattgtttgctgtatctcccttccctctgagctgtattgttctttaatggctgtcttgcccttccaaaaaaaattgaaaaaaaaaaaa

SEQ ID NO: 3808 - protein, 602 aa, Homo sapiens
MPSAKQRGSKGGHGAASPSEKGAHPSGGADDVAKKPPPAPQQPPPPPAPHPQQHPQQHPQNQAHGKGGHRGGGGGGGKSSSSSSASAAAAAAAASSSASCSRRLGRALNFLFYLALVAAAAFSGWCVHHVLEEVQQVRRSHQDFSRQREELGQGLQGVEQKVQSLQATFGTFESILRSSQHKQDLTEKAVKQGESEVSRISEVLQKLQNEILKDLSDGIHVVKDARERDFTSLENTVEERLTELTKSINDNIAIFTEVQKRSQKEINDMKAKVASLEESEGNKQDLKALKEAVKEIQTSAKSREWDMEALRSTLQTMESDIYTEVRELVSLKQEQQAFKEAADTERLALQALTEKLLRSEESVSRLPEEIRRLEEELRQLKSDSHGPKEDGGFRHSEAFEALQQKSQGLDSRLQHVEDGVLSMQVASARQTESLESLLSKSQEHEQRLAALQGRLEGLGSSEADQDGLASTVRSLGETQLVLYGDVEELKRSVGELPSTVESLQKVQEQVHTLLSQDQAQAARLPPQDFLDRLSSLDNLKASVSQVEADLKMLRTAVDSLVAYSVKIETNENNLESAKGLLDDLRNDLDRLFVKVEKIHEKV

SEQ ID NO: 3809 - DNA, 381 bp, Homo sapiens
atggaggaagtggaacttgatttgggtttgaagaatagcgtggaggaagtggaactttatttggctttgaagaatagaaactatggaggagtatatgttggcctaccatctgaagctgtcaatatggtgtccagtcaaacaaagacggttcggaaaacttgctcatcagtttggaaggaatttggctccgtgggacgttgtaatgtgcacagacatttccaaggaaattctaaacagtcacccttcccttttgcattcccccaaatcttaagtgtatacataaaaccctgggtacatattgttgtggtaatagaagggaattggttaaacagtacacttgtttatggaactttctgtggccacctacgaaagacaagttaa

SEQ ID NO: 3810 - DNA, 2771 bp, Homo sapiens
ggcacgaggctctgtcacctgggctggagtccagtggcgtgatcatagctcactgtagcctccaacccctgggctcaagtgatcctccccactcagcctacccaagcagctggaactacaggagtggtatgaggagcatgccagggagcaagagcagcagcgacaactcagcagcagtgcagcccccgccgcccagcagcccccaggcagccgccagcgctcccagaccgttacctagcccagcgcccgaaagccgtctcttctatgcaataacacaatagtattactctactgcgatgtacggaactgcggtgtgtgtacacatactcacgtatatgcacatatttatatacaggaagaaaaaagacagacaagatggggcttggtttataaccaccttgccctgtcttccttaactccagaagccagtttggtgaggggtgggggtgcggccaccaggtctgagctcttcctactgtggaaggctccagaaggcccttcacaaggagacccctcacctggatccagtcgactgcggggcttgcccctcatgtgggctggcctccatcggccacgtccaaagctgtcactgctactgcttcaggctcacatccccccgacctgatggcgtgcccgccccctctccctgcggcccatgccacaggtttctgtgttttgctttagggacagaaccacttaggaaggaaagaactcccggtctccagggtggtatttcagtgtctgtgataatgtcacgcaacacctcttcggggaccagtgcccaggatctaatggaagcggaattggggcaactgggcccatgtggccagagctcagttagccagtgccgggcggccacagattacactgaccaatctcctcccttggctctgcaagcctcccacccagccttctctggcttaacccttgttggcgaaaactcttccacagtggcctccttggggacccagaacccggaggaaggggcatgaggcaggaagtggggccgatgtctgcaacccagaccacttcgtggaatgggctcttgaccaaatccctttttttgcgatttacccgttcaagcaaaacaacgttttggttaactaaggattgtgctaaagccgataccaggtccttcacacgtgtgcactaggaacaggagcgaacagcacagagagacgctccctgtgggacgcagcagccccgtggccccggcccagttcccagccaccctccctggctctgctcacaccagagatttccatagcaggagcggttggtgcagaagtaggttcagatgaacctcagttaacgtcgccacccctcctcccaccatggtaccctgtaggagccctgtatgacatctgagcgtggtggaggtaggagggttgccagctgcagtgaccctgccacagaggcagggtcagtgcagaggtcgctttggttccgcttccctgggccacagaacggaacacagcataggttctgcagcaggagccgcagtggcaggatggagggtgcgaagggcaaggagtgcactgctgggcattcctggccagccccggccctctggtgcctgcttcctgtgacttcagaaggcaggtggacagagcctccctctggccttgtcctcttcccagccacagaacgggcagggtggcacccgaccccaggggagcagtacctggtcccccaccccctcctcccaaccacctccaaggccaagctgggtcccatagccagcacggcatggttctccccttccccccttcccaggtcaggggagttggacaagtagcaggtgtttgtttttaaagcacagccctttgggaaagcaacacattattgagactcactgtgattcccccgggagtcagactggctttgtcctcttcctctctggagggccatgggccatcagcaggagctccacatcgagccccaggccagaaccccctccctttcacagagagggaactttattgcacaattgggtgccttttagcttttgtgtgttgaaatgggcgttttggaagcaagggtcaggggacagcttctaaaggtgtgagtctctgacctgagcatctgggcctcgcctgggcccttcttcctccccaggggtggaaacgtggaggggccagcagcaccccggggtctgcccaggggagtcaaggccccgaggtgggggggcctattccaggaggagtgggatctcggccctgtccagagcgagttaatgtgtccatctgcccaaccctgtcctgagaaaggacctggttttggccaggacctgacaaatacccaatggcagcagtgtcaacagacgggagtccagccagggtgggtgcccttgtcattgaggttagggacagctatccccaggttatgcctggccccacccagcagggagttggggtccccccacaggctgtgagctctgtgggccctgggatgtgatctagctcagatgccctctcatccttgatgtcatagttgagtgcacccaagtggcacccactggcggccaggggcacagcctggtggtggtggcaatagaactgtgcccctcctcagctcctcgcttcccctcccacagccccagccttactccaccatgcggacaatcattttgtacggatcacgggagcaatgctgtacggttttgtacactggtggtttgtttcctagaaaacccattgtgtctctggatttctagcacattactaaaagagcctctgctttgtaaaaaaaaaaaaaaaaaaaaaaaaaaa

SEQ ID NO: 3811 - protein, 146 aa, Homo sapiens
MTSERGGGRRVASCSDPATEAGSVQRSLWFRFPGPQNGTQHRFCSRSRSGRMEGAKGKECTAGHSWPAPALWCLLPVTSEGRWTEPPSGLVLFPATERAGWHPTPGEQYLVPHPLLPTTSKAKLGPIASTAWFSPSPLPRSGELDK

SEQ ID NO: 3812 - DNA, 1763 bp, Homo sapiens
gatgcggctgtgattgctgaattgtctgggcaggtttggagtctctggcaagctcccctgactgtgcatccctctggagacgaagaggagggggaggcctgtcctctctgggatccattggtcacatccccctgaggattcccgaatgcctacctccagtgtcgtcaacatggagttctgaagtccatgtggctcttcacagtgaatcaggtgttaaggaagatgcagagacgccacagcagcaacacggataacattccacctgaaagctgtgaccaaggctggcccctctggggaactgggggccattgaacttgaagactgcagagccagcggtccttgggatcccgagaaaccgcagccaggcgctcagctccgaggcgagtgtggatgaaggtggcgtctttgagagtctgaaggcagaggcagcctccccaccagcgctcttctcgggcttatcaggcagcctccccaccagctcgttcccctccagcctggtgctgggctcctcggctggcggcggggacgtgttcatccagatgcccgcgtccagggaggaaggagggggccggggcgaggggggcgcctaccaccaccgccagccccaccaccatttccaccatggcggccaccgcgggggctccctgctgcagcacgtgggtggggaccaccgggggcactcggaggagggaggcgacgagcagcctgggacgcccgcccccgccctgtccgagctgaaggctgtgatctgctggctccagaaaggactccccttcatcctgatcctcctggccaaactgtgctttcagcataagctcggcattgctgtgtgcatcgggatggccagcaccttcgcctatgccaactccacgcttcgagaacaggtctcactgaaggagaagaggtcagtgctggtcatcttgtggatcctggcctttctggcggggaacaccctctatgtgctttatacattcagctcccagcagctgtacaacagcctcatattcctgaagcccaacctggagatgctggacttctttgacctgctatggattgtggggatcgcagactttgttctgaagtacatcaccatcgccctcaagtgcctcatcgtggccctgcccaagatcatcctggccgtcaagtccaagggaaagttctatctggtcatcgaggagctgagccagctgttccgatcccttgtccccatccagctgtggtacaaatacatcatgggtgacgactcctccaacagctacttcctgggcggggtcctgatcgttctctacagcctctgcaagtccttcgacatctgtggacgtgtgggcggagttaggaaagccctgaagcttctctgtacctctcagaactatggagtccgagccaccgggcagcagtgcacagaagctggtgacatctgcgccatctgtcaggccgagttccgagagcctctgattctcctgtgccagatgctgttgaaggggcacaagaaattggagctggagaagattgatgaaagtgcaggtgtgtaaggaaatagaacagtctgctgggagtcagacctggaattctgattccaaactctttattactttgggaagtcactcagcctccccgtagccatctccagggtgacggaacccagtgtattacctgctggaaccaaggaaactaacaatgtaggttactagtgaataccccaatggtttctccaattatgcccatgccaccaaaacaataaaacaaaattctctaacactgat

SEQ ID NO: 3813 - protein, 330 aa, Homo sapiens
MPASREEGGGRGEGGAYHHRQPHHHFHHGGHRGGSLLQHVGGDHRGHSEEGGDEQPGTPAPALSELKAVICWLQKGLPFILILLAKLCFQHKLGIAVCIGMASTFAYANSTLREQVSLKEKRSVLVILWILAFLAGNTLYVLYTFSSQQLYNSLIFLKPNLEMLDFFDLLWIVGIADFVLKYITIALKCLIVALPKIILAVKSKGKFYLVIEELSQLFRSLVPIQLWYKYIMGDDSSNSYFLGGVLIVLYSLCKSFDICGRVGGVRKALKLLCTSQNYGVRATGQQCTEAGDICAICQAEFREPLILLCQMLLKGHKKLELEKIDESAGV

SEQ ID NO: 3814 - DNA, 552 bp, Homo sapiens
gaactgccatcttctagtaattcgccaaaatgacgaacacaaagggaaagaggagaggcacccgatatatgttctctaggccttttagaaaacatggagttgttcctttggccatgtatatgtgaatctataagaaaggtgatatcgtagacatcaagggaatgggtactgttcaaaaaggaatgccccgtaagtgttaccatggcaaaactggaagagtctacaatgttacccagcatgctgttggcattgttgtaaacaaacaagttaagggcaagattcttgccgagagaattaatgtgcatattgagcacattaagcactctgagagccgagatagcttcctgaaatgcatgaaggaaaatgatcagaaaaagaaagaagcggaagagaaaggtacctgggttcaactcaagcgccagcctgctccacccagagaagcacactttgtgagagccaatgggaaggagcctgagctgctggaacctattccctgtgaattcatggcataataggtgttaaaaaaaaaaaaaaaaaagacctctgggctat

SEQ ID NO: 3815 - protein, 160 aa, Homo sapiens
MRTQRERGEAPDICSLGLLENMELFLWPCICEIYKKGDIVDIKGMGTVQKGMPRKCYHGKTGRVYNVTQHAVGIVVNKQVKGKILAERINVHIEHIKHSESRDSFLKCMKENDQKKKEAEEKGTWVQLKRQPAPPREAHFVRANGKEPELLEPIPCEFMA

SEQ ID NO: 3816 - DNA, 1444 bp, Homo sapiens
ggggggtctgcgtcttcccgagccagtgtgctgagctctccgcgtcgcctctgtcgcccgcgcctggcctaccgcggcactcccggctgcacgctctgcttggcctcgccatgccggtggacctcagcaagtggtccgggcccttgagcctgcaagaagtggacgagcagccgcagcacccgctgcatgtcacctacgccggggcggcggtggacgagctgggcaaagtgctgacgcccacccaggttaagaatagacccaccagcatttcgtgggatggtcttgattcagggaagctctacaccttggtcctgacagacccggatgctcccagcaggaaggatcccaaatacagagaatggcatcatttcctggtggtcaacatgaagggcaatgacatcagcagtggcacagtcctctccgattatgtgggctcggggcctcccaagggcacaggcctccaccgctatgtctggctggtttacgagcaggacaggccgctaaagtgtgacgagcccatcctcagcaaccgatctggagaccaccgtggcaaattcaaggtggcgtccttccgtaaaaagtatgagctcagggccccggtggctggcacgtgttaccaggccgagtgggatgactatgtgcccaaactgtacgagcagctgtctgggaagtagggggttagcttggggacctgaactgtcctggaggccccaagccatgttccccagttcagtgttgcatgtataatagatttctcctcttcctgccccccttggcatgggtgagacctgaccagtcagatggtagttgagggtgacttttcctgctgcctggcctttataattttactcactcactctgatttatgttttgatcaaatttgaacttcattttggggggtattttggtactgtgatggggtcatcaaattattaatctgaaaatagcaacccagaatgtaaaaaagaaaaaactggggggaaaaagaccaggtctacagtgatagagcaaagcatcaaagaatctttaagggaggtttaaaaaaaaaaaaaaaaaaaaagattggttgcctctgcctttgtgatcctgagtccagaatggtacacaatgtgattttatggtgatgtcactcacctagacaaccagaggctggcattgaggctaacctccaacacagtgcatctcagatgcctcagtaggcatcagtatgtcactctggtccctttaaagagcaatcctggaagaagcaggagggagggtggctttgctgttgttgggacatggcaatctagaccggtagcagcgcctcgctgacagcttgggaggaaacctgagatctgtgttttttaaattgatcgttcttcatgggggtaagaaaagctggtctggagttgctgaatgttgcattaattgtgctgtttgcttgtagttgaataaaaacccg

SEQ ID NO: 3817 - protein, 187 aa, Homo sapiens
MPVDLSKWSGPLSLQEVDEQPQHPLHVTYAGAAVDELGKVLTPTQVKNRPTSISWDGLDSGKLYTLVLTDPDAPSRKDPKYREWHHFLVVNMKGNDISSGTVLSDYVGSGPPKGTGLHRYVWLVYEQDRPLKCDEPILSNRSGDHRGKFKVASFRKKYELRAPVAGTCYQAEWDDYVPKLYEQLSGK

SEQ ID NO: 3818 - DNA, 621 bp, Homo sapiens
gctctccgcgtcgcctctgtcgcccgcgcctggcctaccgcggcactcccggctgcacgctctgcttggcctcgccatgccggtggacctcagcaagtggtccgggcccttgagcctgcaagaagtggacgagcagccgcagcacccgctgcatgtcacctacgccggggcggcggtggacgagctgggcaaagtgctgacgccctgtgccggcctcctgggtgggacccagcggagacagggccaggggcggtggggaggttcagcctgcgtgtgtcgaggcccccccaggccagaggtcccggggtccatgtcccatgcctgggggccaccccgagcaccgggaacccggcctgtggcgtggccaggcaggttcggcctgcggcagaaattcattcacttttcccgggcttcagacccaagagggacctaggttcggaaacaggccggatccccctctccccccacaggccagggcgctggagagggacgtcgccgggacagagtaggctgtggctgcccggacgcccccagagcttcccctagggcctcagcattttaggcctggttttggagggctgaagcctcacccgagagcctgtgacgcattatgtaactggc

SEQ ID NO: 3819 - DNA, 1863 bp, Homo sapiens
cgggagcggggacccgagcctgcagccgagctccgctgccggccctggacactcggctcagccaagcatccttcctgggggccgaggaagtggggccactctgccgttccgaggacctgggaggagccctcggtaccccgggccccggggccctggggcacacacgtccagcccagcccgagcctgcgtttcctgagccgggatctggggcgagatggccgcaggcggcagtgcgcccgagccccgcgtcctcgtctgcctcggggcgctcctggccggctgggtcgccgtagcccaaggttgaactcgccttacacctgtaaccggtggacttccctacacacctttgcaagtcttcctgtgccgaccagcgccttcaaagcggggtcttccgcctttacttttggaaaagctttttattttgaaatacttggctgacttacaaaagacttcccctcacacttgacatgattgacaaaaggtctgaaatgcttcatctatggtctgctttgctacgaaaaaagaattggaggggtgcttacaaaaatatgtagaatgtaaaaagattgaactatttatatatatttgaatttaattcaccagcatgcctactgtgcatgcctactgtgtgctgggagtgtgacaagctgggaggaggctggggtgcagggagaggagatggagccaggaggtggtgaagtttgccaggatgcaggcagagcgctactttttgtgttcccgggtctgctccacccaacgggtctcctcttgcacgtttctggagatgggttgtaaagtatgctggagcttcttagcagcaagtgccaagagttcctaattattaggctcatacaattttattttgcttttttttttttaaccaaccatttaaaaacaataacatctctagatttccagtttatctggaaaaatctgaaggtctggcaacacggggcctgctttcccagttggaattgggcagtggtcatcctcttatctagggcatatgagcccaaatttgttccacctctccctgttgtaatatttgccccgccaccttcagtcatgggtgttacctgctggccctgcaggcatttggctgagtaatcactgtgctggggtgtgggtgatgggggaggacagttcctagttggtcatctctggacgtgaaaggtggttgtcaagtattcccatctccccagctgtttgcagtgtttcctgcacgatgaacaccaggaacctgggaagtgagaagaaccctgggatgaagtcatcctgctggaatgacctggctttcaggctgactgccacccgccccatggggaacctatctccactgctatggccagctatttttttcgagccaggctctcgctctgttgcccaggctggagtgcagtggtgcaatcactgcactgatcctcccacctcagcctacaagtagctgggactacaggcgtgcaccaccacgcctagctaatttctaaaatttttttgtagagacggtctctacaatcgcttgagcccaggctggtcttaaactcctggacccaagcgatcctcctgtctcggcctcccaaagtgttgggattatgggtgtgagccaccgtgttgggcctttgcccagctattttgatgcccagacctgcttcacctttgtgtatgatgccagggggcttcctgagcttggtgtatttttgttgtgtgtttgttttttaagttgggagtttttggggaaaaaaatttttctcctgacattcaatgccagacaacttatatgcatccactagctaccccggattgtaaatcctaggttattcttgggaaaagttgctttaaaaaaataaataaatgtttgggtat

SEQ ID NO: 3820 - protein, 29 aa, Homo sapiens
MAAGGSAPEPRVLVCLGALLAGWVAVAQG

SEQ ID NO: 3821 - DNA, 929 bp, Homo sapiens
aaaacaacaaatggcggatgacgccggtgcagcgggggggcacggaggccctggtggccctgggatggggaaccgcggtggcttccgcggaggtttcggcagtggcatccggggccggggtcgcggccgtggacggggccggggccgaggccgcggagctcgcggaggcaaggccgaggataaggagtggatgcccgtcaccaagttgggccgcttggtcaaggacatgaagatcaagtccctggaggagatctatctcttctccctgcccattaaggaatcagagatcattgatttcttcctgggggcctctctcaaggatgaggttttgaagattatgccagtgcagaagcagacccgtgccagccagcgcaccaggttcaaggcgtttgttgctatcggggactacaatggccacgtcggtctgggtgttaagtgctccaaggaggtggccaccgccatccgtggggccatcatcctggccaagctctccattgtccccgtgcgcagaggctactgggggaacaagatcggcaagccccacactgtcccttgcaaggtgacaggccgctgcggctctgtgctggtgcgcctcatccctgcacccaggggcactggcatcgtctccgcacctgtgcctaagaagctgctcatgatggctggtatcgatgactgctacacctcagcccggggctgcactgccaccctgggcaacttcgccaaggccacctttgatgccatttctaagacctacagctacctgacccccgacctctggaaggagactgtatttaccaagtctccctatcaggaattcactgaccacctcgttaagacccacaccagagtctccgtgcagcggactcaggatccagctgtggctacaacatagggtttttatacaagaaaaataaagtgaattaagcgtg

SEQ ID NO: 3822 - protein, 296 aa, Homo sapiens [sequence omitted]

SEQ ID NO: 3823 - DNA, 3205 bp, Homo sapiens
cgactcgtcgccattcccggagcaggtcggcctcggcccaggggcgagtatccgttgctgtgtcggagacactagtccccgacaccgagacagccagccctctcccctgcctcgcggcgggagagcgtgtccggccggccggccggcggggctcgcgcaacctccctcgcctccccttcccccgcagcctccgccccgccaggcccggcccggactcccgagccccggcctcctcgtcctcggtcgccgctgccgccgggcttaacagccccgtccgccgcttctcttcctagtttgagaagccaaggaaggaaacagggaaaaatgtcgccatgaaggccgagaaccgctgccgccgccgacccccgccggccctgaacgccatgagcctgggtccccgccgcgcccgctccgctccgactgccgtcgccgccgaggcccccgttgatgccgctgagctcccccaacgccgccgccaccgcctccgacatggacaagaacagcggctccaacagctcctccgcctcttcgggcagcagcaaagggcaacagccgccccgctccgcctcggcggggccagccggcgagtctaaacccaagagcgaattactaatttcagctggattcaatttgttgtcagttgattctgtagtaaggccatatgttgcccctctggaggtgcttgtcaactactctggatgatggatggaaagaactccagtggatccaagcgttataatcgcaaacgtgaactttcctaccccaaaaatgaaagttttaacaaccagtcccgtcgctccagttcacagaaaagcaagacttttaacaagatgcctcctcaaaggggcggcggcagcagcaaactctttagctcttcttttaatggtggaagacgagatgaggtagcagaggctcaacgggcagagtttagccctgcccagttctctggtcctaagaagatcaacctgaaccacttgttgaatttcacttttgaaccccgtggccagacgggtcactttgaaggcagtggacatggtagctggggaaagaggaacaagtggggacataagccttttaacaaggaactctttttacaggccaactgccaatttgtggtgtctgaagaccaagactacacagctcattttgctgatcctgatacattagttaactgggactttgtggaacaagtgcgcatttgtagccatgaagtgccatcttgcccaatatgcctctatccacctactgcagccaagataacccgttgtggacacatcttctgctgggcatgcatcctgcactatctttcactgagtgagaagacgtggagtaaatgtcccatctgttacagttctgtgcataagaaggatctcaagagtgttgttgccacagagtcacatcagtatgttgttggtgataccattacgatgcagctgatgaagagggagaaaggggtgttggtggctttgcccaaatccaaatggatgaatgtagaccatcccattcatctaggagatgaacagcacagccagtactccaagttgctgctggcctctaaggagcaggtgctgcaccgggtagttctggaggagaaagtagcactagagcagcagctggcagaggagaagcacactcccgagtcctgctttattgaggcagctatccaggagctcaagactcgggaagaggctctgtcgggattggccggaagcagaagggaggtcactggtgttgtggctgctctggaacaactggtgctgatggctcccttggcgaaggagtctgtttttcaacccaggaagggtgtgctggagtatctgtctgccttcgatgaagaaaccacggaagtttgttctctggacactccttctagacctcttgctctccctctggtagaagaggaggaagcagtgtctgaaccagagcctgaggggttgccagaggcctgtgatgacttggagttagcagatgacaatcttaaagaggggaccatttgcactgagtccagccagcaggaacccatcaccaagtcaggcttcacacgcctcagcagctctccttgttactacttttaccaagcggaagatggacagcatatgttcctgcaccctgtgaatgtgcgctgcctcgtgcgggagtacggcagcctggagaggagccccgagaagatctcagcaactgtggtggagattgctggctactccatgtctgaggatgttcgacagcgtcacagatatctctctcacttgccactcacctgtgagttcagcatctgtgaactggctttgcaacctcctgtggtctctaaggaaaccctagagatgttctcagatgacattgagaagaggaaacgtcagcgccaaaagaaggctcgggaggaacgccgccgagagcgcaggattgagatagaggagaacaagaaacagggcaagtacccagaagtccacattcccctcgagaatctacagcagtttcctgccttcaattcttatacctgctcctctgattctgctttgggtcccaccagcaccgagggccatggggccctctccatttctcctctcagcagaagtccaggttcccatgcagactttctgctgacccctctgtcacccactgccagtcagggcagtccctcattctgcgttgggagtctggaagaagactctcccttcccttcctttgcccagatgctgagggttggaaaagcaaaagcagatgtgtggcccaaaactgctccaaagaaagatgagaacagcttagttcctcctgcccctgtggacagcgacggggagagtgataattcagaccgtgttcctgtgcccagttttcaaaattccttcagccaagctattgaagcagccttcatgaaactggacacaccagctacttcagatcccctctctgaagagaaaggaggaaagaaaagaaaaaaacagaaacagaagctcctgttcagcacctcagtcgtccacaccaagtgacactactggcccaggctaccttctccatctggtttttgtttttgtttttttttcccccatgcttttgtttggctgctgtaatttttaagtatttgagtttgaacagattagctctggggggagggggtttccacaatgtgagggggaaccaagaaaattttaaatacagtgtattttccagcttcctgtctttacaccaaaataaagtattgacacaagag

SEQ ID NO: 3824 - protein, 761 aa, Homo sapiens
MMDGKNSSGSKRYNRKRELSYPKNESFNNQSRRSSSQKSKTFNKMPPQRGGGSSKLFSSSFNGGRRDEVAEAQRAEFSPAQFSGPKKINLNHLLNFTFEPRGQTGHFEGSGHGSWGKRNKWGHKPFNKELFLQANCQFVVSEDQDYTAHFADPDTLVNWDFVEQVRICSHEVPSCPICLYPPTAAKITRCGHIFCWACILHYLSLSEKTWSKCPICYSSVHKKDLKSVVATESHQYVVGDTITMQLMKREKGVLVALPKSKWMNVDHPIHLGDEQHSQYSKLLLASKEQVLHRVVLEEKVALEQQLAEEKHTPESCFIEAAIQELKTREEALSGLAGSRREVTGVVAALEQLVLMAPLAKESVFQPRKGVLEYLSAFDEETTEVCSLDTPSRPLALPLVEEEEAVSEPEPEGLPEACDDLELADDNLKEGTICTESSQQEPITKSGFTRLSSSPCYYFYQAEDGQHMFLHPVNVRCLVREYGSLERSPEKISATVVEIAGYSMSEDVRQRHRYLSHLPLTCEFSICELALQPPVVSKETLEMFSDDIEKRKRQRQKKAREERRRERRIEIEENKKQGKYPEVHIPLENLQQFPAFNSYTCSSDSALGPTSTEGHGALSISPLSRSPGSHADFLLTPLSPTASQGSPSFCVGSLEEDSPFPSFAQMLRVGKAKADVWPKTAPKKDENSLVPPAPVDSDGESDNSDRVPVPSFQNSFSQAIEAAFMKLDTPATSDPLSEEKGGKKRKKQKQKLLFSTSVVHTK

SEQ ID NO: 3825 - DNA, 1144 bp, Homo sapiens
gccatgaacagtgtgggggaggcatgcacggacatgaagcgcgagtacgaccagtgcttcaatcgctggttcgccgagaaatttctcaagggggacagctccggggacccgtgcaccgacctcttcaagcgctaccagcagtgtgttcagaaagcaataaaggagaaagagattcctattgaaggactggagttcatgggccatggcaaagaaaagcctgaaaattcttcttgaccttgacagtcaccttgaaggatttcgcaagtccagaaattgaggactctggatttttgtcaactaactctgtgaacatagccatcagatttgatgaggaacttaggagagaggagttttatttcctccttcgatgttttcctctcagttgtaaaagatgaactctttgagatgatttctcacctgctgtggtatcttgcaggaactgtgtgctaaaattgaacaatttttttgagattatggttgcaatacttggcgtggaatcagctttacataaatataccttgtatgcaaacgatgataaactagtcaggatgagcagagctgcctgacctcttgatttctgctgcaaaagacatatacactgtactggggtcactatttatgaaagcaattggttaggacctctttttttcctctcagggaactaatgctctgaaaagggatctgggcacaacagtttcagtgagtgcttttgagcacacttttatttttatatagtaactaatggttaagattgatggtggcctggattagcaaagaggaagacagcttttaacacagttccctgccttcacaagaggtgtcagattaagatgtgaaagctgcaagaatgttgcagtgaacaccatttcagagctctcagtgtgcagttcaggaattaagatacttggaatagctgtggaggaagaacctaaattgcaaagatctgctattgccagctctcaacccaagtcagtgaattgtcaacctgcatatcctaaaaatgtcaaaatgctgcatctggttaaatgtcggggtaggggggaagctgaaggtgctcgcttcatttgccttgtttactcatcctgccctgtaatgtctgtaatcctgaagatggaataaattgtaacatttagtttctatcatt

SEQ ID NO: 3826 - DNA, 4088 bp, Homo sapiens
ggcatggatggtagagaggggagctggcacttgaactcaggtctggctcgacctcagaatgagtgatcttgtgtctctgtgccccaggactgcatcctctcaccaatacttcaccagcctagggatctgtgctcccaagagcctgttgacattgtaaacctgaatccaatccataaaccaaaagcccaggcttagaatcacattgtggtggagcgggtgtttggtggagtccctgattcaaaatgtttgacaaggaagcctgaccatttgtcttctgttgggtgtttggagtccaagagacctgagatcagagtccagcattgtcacttcatccagccttggcagtgtgggatgtgactctgcctctgaaccgcagttataccatctgtgctggtggcgttgtgaggatggcaggtaacaaagacgccctgctggcggacttggagtctaccacctcccacatctccaaacggcctgtgttcttgtcggaggagaccccctactcatacccaactggaaaccacacataccaggagattgccgtgccaccccccgtccccccacccccgtccagcgaggccctcaatggcacaatccttgaccccttagaccagtggcagcccagcagctcccgattcatccaccagcagcctcagtcctcatcacctgtgtacggctccagtgccaaaacttccagtgtctccaaccctcaggacagtgttggctctccgtgctcccgagtgggtgaggaggagcacgtctacagcttccccaacaagcagaaatcagctgagccttcacccaccgtaatgagcacgtccctgggcagcaacctttctgaactcgaccgcctgctgctggaactgaacgctgtacagcataacccgccaggcttccctgcagatgaggccaactcaagccccccgcttcctggggccctgagccccctctatggtgtcccagagactaacagccccttgggaggcaaagctgggcccctgacgaaagagaagcctaagcggaatgggggccggggcctggaggacgtgcggcccagtgtggagagtctcttggatgaactggagagctccgtgcccagccccgtccctgccatcactgtgaaccagggcgagatgagcagcccgcagcgcgtcacctccacccaacagcagacacgcatctcggcctcctctgccaccagggagctggacgagctgatggcttcgctgtcggatttcaagggctcctggcccctggaggaggttgtacttcttgtctccatcagctcatctgtccaggagggagaaaagtacccccatccctgtgctgccagacaccgtaccccgagcctcaggagtcctgaccagccccctccgtgtccacagttcatggcccaggggaagacagggagcagctcaccccctggggggcccccgaagcccgggagccagctggacagcatgctggggagcctgcagtctgacctgaacaagctgggggtcgccacagtcgccaaaggagtctgcggggcctgcaagaagcccatcgccgggcaggttgtgaccgccatggggaagacgtggcaccccgagcacttcgtctgcacccactgccaggaggagatcggatcccggaacttcttcgagcgggatggacagccctactgtgaaaaggactaccacaacctcttctccccgcgctgctactactgcaacggccccatcctggataaagtggtgacagcccttgaccggacgtggcaccctgaacacttcttctgtgcacagtgtggagccttctttggtcccgaagggttccacgagaaggacggcaaggcctactgtcgcaaggactacttcgacatgttcgcacccaagtgtggcggctgcgcccgggccatcctggagaactatatctcagccctcaacacgctgtggcatcctgagtgctttgtgtgccgggaatgcttcacgccattcgtgaacggcagcttcttcgagcacgacgggcagccctactgtgaggtgcactaccacgagcggcgcggctcgctgtgttctggctgccagaagcccatcaccggccgctgcatcaccgccatggccaagaagttccaccccgagcacttcgtctgtgccttctgcctcaagcagctcaacaagggcaccttcaaggagcagaacgacaagccttactgtcagaactgcttcctcaagctcttctgctaggtgccctgcccctgtctctgccccccttccccagccagcatccccaactgcgactgtgacctagagacttcacccgggggtgaaggggtaaacccgactgaaactggaacccttgtcctccgctggtgcgggatggacagagggccgtgaggggtccccctgcttgtcttcacccctgccagagcctctgggccccctcctccctcctgtagctctccctaggctgcccactctccatcctccccaggggtagaggctgggggctccaccccagcccatgtacgtccccacgaactggcctggccagcaccccacactggagccatctcttcctcatatttcagcagtgcagccggggggcagggaagggcaggcagggtctgttggggtctctttttatccttattcctcccccgacctaattgtctttgttctgtgattattgggggacacccggctccctccagacaatgccagcataaatccatccatccaaaggcagagaaccaaaggggccatggaaggttctctgtgctcctcctacccttccagtgccctaggcctggcgactgcccctgccttttagacccgccctccccttttatacctgctcttgttctactgagaaaagcctctccagcaataatgttttctagtcacttcctccgtctccgggacggcgtgcctggacactgtaccgactttgatagatttctacactgaggtttgaattcatatcgcctgagttgcttttacttctctatacaaaatgattttgaagagattttaaagacgttcccttttgtattctcttcctcatccaccgccactgggcctgtcactgatggtggctctggtgtgaagtttgctttgtactgagggttggggtggggaagcaatttgtattttattgtttcttagcacaagcaggtgaactgggagcagctctgtgactccccctctttcacttcatagctcaccaggactgttttataaactgctgtatttggaaaccccttctttacttcccaggccagcaagctcttcactgaaactggttgaagggtgttgcacccttttgggcctagaattctgaactttatctgttctgtttctgtgggaggagaaggggaagtatgttttggggggctgcttcctgtctgagtaagccctcaggagcctctgctcccctgtgaacccactgaaccttctgagcccccactgcttctatggggctctctcttctgccttctcaggaaagctggtgtctgattttggccatcaggactctgacgtctctttggtcttgttgatttcctctgggcatatcccttccccagatctgctcctcccctttcacaggtgggatcggcactcagggggtctggaaagaaggtcataagggagcatgataggatttggggcagagggacaggctcctctggggaaaccccccagagctctttaccaaggatgaaagaggagccaggccttgggctcctgatgaggagaaaggggccccaccggggtctaatggtgacagtccaaaccactccactggcctcctggcagaagccgagtgtgctggggtctccgaagagggtccctcctttttgggggaaggtcagcccagcccctccaaaggtctgatgtctccactttcacccgcaggccttaccgctctgtttatagtgacccaccctagatcttccccaagagggactggggtttctggggtccattctctgagtcagtggttatttgaaaatttgattttgattttattttttctctgtaaacttccaagctggcttttcccatttcaattcctgtgatttatgccaataaagtttgcccatg

SEQ ID NO: 3827 - DNA, 1116 bp, Homo sapiens
ccttctctcgccaggcgtcctcgtggaagtgacatcgtctttaaaccctgcgtggcaatccctgacgcaccgccgtgatgcccagggaagacagggcgacctggaagtccaactacttccttaagatcatccaactattggatgattatccgaaatgtttcattgtgggagcagacaatgtgggctccaagcagatgcagcagatccgcatgtcccttcgcgggaaggctgtggtgctgatgggcaagaacaccatgatgcgcaaggccatccgagggcacctggaaaacaacccagctctggagaaactgctgcctcatatccgggggaatgtgggctttgtgttcaccaaggaggacctcactgagatcagggacatgttgctggccaataaggtgccagctgctgcccgtgctggtgccattgccccatgtgaagtcactgtgccagcccagaacactggtctcgggcccgagaagacctcctttttccaggctttaggtatcaccactaaaatctccaggggcaccattgaaatcctgagtgatgtgcagctgatcaagactggagacaaagtgggagccagcgaagccacgctgctgaacatgctcaacatctcccccttctcctttgggctggtcatccagcaggtgttcgacaatggcagcatctacaaccctgaagtgcttgatatcacagaggaaactctgcattctcgcttcctggagggtgtccgcaatgttgccagtgtctgtctgcagattggctacccaactgttgcatcagtaccccattctatcatcaacgggtacaaacgagtcctggccttgtctgtggagacggattacaccttcccacttgctgaaaaggtcaaggccttcttggctgatccatctgcctttgtggctgctgcccctgtggctgctgccaccacagctgctcctgctgctgctgcagccccagctaaggttgaagccaaggaagagtcggaggagtcggacgaggatatgggatttggtctctttgactaatcaccaaaaagcaaccaacttagccagttttatttgcaaaacaaggaaataaaggcttacttctttaaaaaaaaaaaaaaaaaaa

SEQ ID NO: 3828 - protein, 317 aa, Homo sapiens
MPREDRATWKSNYFLKIIQLLDDYPKCFIVGADNVGSKQMQQIRMSLRGKAVVLMGKNTMMRKAIRGHLENNPALEKLLPHIRGNVGFVFTKEDLTEIRDMLLANKVPAAARAGAIAPCEVTVPAQNTGLGPEKTSFFQALGITTKISRGTIEILSDVQLIKTGDKVGASEATLLNMLNISPFSFGLVIQQVFDNGSIYNPEVLDITEETLHSRFLEGVRNVASVCLQIGYPTVASVPHSIINGYKRVLALSVETDYTFPLAEKVKAFLADPSAFVAAAPVAAATTAAPAAAAAPAKVEAKEESEESDEDMGFGLFD

SEQ ID NO: 3829 - DNA, 1148 bp, Homo sapiens
aggcccgggaccgcgggatgggtgtcggcgtgaccaggcctgagctccctgtctctcctcagtgacatcgtctttaaaccctgcgtggcaatccctgacgcaccgccgtgatgcccagggaagacagggcgacctggaagtccaactacttccttaagatcatccaactattggatgattatccgaaatgtttcattgtgggagcagacaatgtgggctccaagcagatgcagcagatccgcatgtcccttcgcgggaaggctgtggtgctgatgggcaagaacaccatgatgcgcaaggccatccgagggcacctggaaaacaacccagctctggagaaactgctgcctcatatccgggggaatgtgggctttgtgttcaccaaggaggacctcactgagatcagggacatgttgctggccaataaggtgccagctgctgcccgtgctggtgccattgccccatgtgaagtcactgtgccagcccagaacactggtctcgggcccgagaagacctcctttttccaggctttaggtatcaccactaaaatctccaggggcaccattgaaatcctgagtgatgtgcagctgatcaagactggagacaaagtgggagccagcgaagccacgctgctgaacatgctcaacatctcccccttctcctttgggctggtcatccagcaggtgttcgacaatggcagcatctacaaccctgaagtgcttgatatcacagaggaaactctgcattctcgcttcctggagggtgtccgcaatgttgccagtgtctgtctgcagattggctacccaactgttgcatcagtaccccattctatcatcaacgggtacaaacgagtcctggccttgtctgtggagacggattacaccttcccacttgctgaaaaggtcaaggccttcttggctgatccatctgcctttgtggctgctgcccctgtggctgctgccaccacagctgctcctgctgctgctgcagccccagctaaggttgaagccaaggaagagtcggaggagtcggacgaggatatgggatttggtctctttgactaatcaccaaaaagcaaccaacttagccagttttatttgcaaaacaaggaaataaaggcttacttctttaaaaaaaaaaaaaaaaaa

SEQ ID NO: 3830 - protein, 317 aa, Homo sapiens; identical to SEQ ID NO: 3828

SEQ ID NO: 3831 - DNA, 2438 bp, Homo sapiens
ggcacgaggaagcggttgggaaagtgtcggtttatcttcgcgccccttgcgttcttgccgcggcttgcctgggcaggtaaagcgcgattgcgagagctcggcaaccctgccgactcagccggaaccggctcccggcccgaggggcgtggtgtcctggtgctccgactccttccgcaggctccttgggacccgcggttccgggagtcccttgctcagggtccctttcctgcagtgaggcgccgtccgccttccctgtgtccccgcagacccccatcatgggcaataccagcagtgagcgcgccgcgctggagcggcatggtggccataagacgccccggagggacagctcggggggcaccaaggacggggacaggcccaagatcctgatggacagccccgaagacgccgacctcttccactccgaggaaatcaaggcaccagagaaggaggaattcctggcctggcagcatgatctggaagtgaatgataaagctcccgcccaggctcggccaacggtgtttcgatggacggggggcggaaaggaagtttacttatctgggtccttcaacaactggagtaaacttcccctcaccagaagccacaataactttgtagccatcctggatctgccggaaggagagcatcagtacaagttctttgtggatggtcagtggacgcacgacccttccgagcccatagtaaccagccagcttggcacagttaacaacatcattcaagtgaagaaaactgactttgaagtatttgatgctttaatggtggattcccaaaagtgctccgatgtgtctgagctgtccagttctcccccaggaccctaccatcaggagccctacgtctgcaaacccgaagagcgctttcgggcaccccctattctccccccacatctcctccaggtcatcctgaacaaggacacggggatttcctgtgatccagctttgcttcctgagcccaatcacgtcatgctgaaccacctatacgcgctgtctatcaaggatggagtgatggtgctcagcgcaacccaccggtacaagaagaagtacgtcaccaccttgttatacaagcccatatgaagagctgggggcggatggtggcccaggagacagcacaccaccaggctccacacgtgcatgctttccccaagagggaatggactgtacattgctcatttcacactcttcagaagacatttcatacctgccctggtcctgcttgaaggtttgtccaggcagagcagctcctgcagcgcctcggtctgtgacagtcctcctagcacccccatggctttgagcctcggggactcatcaagtccaagaaaagagggaggggtggcagaggatctgcagccctggccccgcggtgcatgaggctgggtgcagttctaaacctacattctcgatttttcttaagccaaaaatgaatgctaactcctttgccagtaaaattctgggaaacagggactgaggccacacatcatttccagtcatctgtgtgtttttaaggccagccacttgtccctgttgaggcctggctatggaactaaatacagtgttggtcttgcctgtccttcaaaatcaacaacagattgtctctcggctccagggaggtgtcatttctatagaaattagaagctttctgatttctagatgaggttttacaattgtttcttacagtcatgtgcactaagtactctttttgtaagcagaggtggctggctctgcagccttaaggccattttttaagtcaccacgtctagaagtcacatgaactctgctcagcaataatctgttctcagaacagacttttcaacctgctgccggatttctccattcagctggatgatcctcaggactgaccagttagctggcaggttgtccagctttttattccagtcataataggtgacagtgttaaccgtgaaaacttgagaggcactctgccctcttccctataaaatcacacagcgtgattttacaaggtcccgtggcaccttgctcaggacctctgcccctagttagcaagactgcagcagttgctgttgcttattctgaaaggaatgtagaacttgacagcagccttctgagtctgggtcaggaagatgtcctttggaccaaagcagacttctgtatacgcagctcagtttcccgggagtcgccacagatgtacccactagcccaggttgctgtgagtcagcggaagctcccgttatgccctttgctcctggtgggagagggaggagtgagctccctgggttccagtatttacttggtatacctgagtttgggggtacccttttttgtgacttttcaaaacagtgaattactgtcaccttgatggacaagtttcaataaaactttgtaaaaaaaaaaaaaaaaaaaaaaaaaaaaaaaaaaaaaaaaaaaaaaaaaaaaaaaaaaaaaaaa

SEQ ID NO: 3832 - protein, 270 aa, Homo sapiens
MGNTSSERAALERHGGHKTPRRDSSGGTKDGDRPKILMDSPEDADLFHSEEIKAPEKEEFLAWQHDLEVNDKAPAQARPTVFRWTGGGKEVYLSGSFNNWSKLPLTRSHNNFVAILDLPEGEHQYKFFVDGQWTHDPSEPIVTSQLGTVNNIIQVKKTDFEVFDALMVDSQKCSDVSELSSSPPGPYHQEPYVCKPEERFRAPPILPPHLLQVILNKDTGISCDPALLPEPNHVMLNHLYALSIKDGVMVLSATHRYKKKYVTTLLYKPI

SEQ ID NO: 3833 - DNA, 917 bp, Homo sapiens
gttccgggagtcccttgctcagggtccctttcctgcagtgaggcgccgtccgccttccctgtgtccccgcagacccccatcatgggcaataccagcagtgagcgcgccgcgctggagcggcatggtggccataagacgccccggagggacagctcggggggcaccaaggacggggacaggcccaagatcctgatggacagccccgaagacgccgacctcttccactccgaggaaatcaaggcaccagagaaggaggaattcctggcctggcagcatgatctggaagtgaatgataaagctcccgcccaggctcggccaacggtgtttcgatggacggggggcggaaaggaagtttacttatctgggtccttcaacaactggagtaaacttcccctcaccagaagccacaataactttgtagccatcctggatctgccggaaggagagcatcagtacaagttctttgtggatggtcagtggacgcacgacccttccgagcccatagtaaccagccagcttggcacagttaacaacatcattcaagtgaagaaaactgactttgaagtatttgatgctttaatggtggattcccaaaagtgctccgatgtgtctgagctgtccagttctcccccaggaccctaccatcaggagccctacgtctgcaaacccgaagagcgctttcgggcaccccctattctccccccacatctcctccaggtcatcctgaacaaggacacggggatttcctgtgatccagctttgcttcctgagcccaatcacgtcatgctgaaccacctatacgcgctgtctatcaaggatggagtgatggtgctcagcgcaacccaccggtacaagaagaagtacgtcaccaccttgttatacaagcccatatgaagagctgggggcggatggtggcc

SEQ ID NO: 3834 - DNA, 1642 bp, Homo sapiens
atggccagcgtccacgagagcctctacttcaatcccatgatgaccaatggggttgtgcacgccaatgtgttcggcatcaaggactgggtgacgccgtacaagatcgcggtgctggtgctgctgaacgagatgagccgcacaggcgagggcgccgtcagcctcatggagcggcggaggctcaaccagctgctcctgcccctgctgcagggcccagatattacactgtcaaaactttacaagttaattgaagagtcttgtccacagctggcaaattcagtgcagatcagaatcaaactgatggctgaaggcgagttgaaggatatggaacagttttttgatgacctttcagattctttctctggaactgaaccagaggttcacaaaacaagtgtagtaggtttgtttctgcgtcacatgatcttggcctacagtaagctttctttcagccaagtgtttaaactgtacactgcccttcagcagtacttccagaatggtgagaaaaagacagtggaggatgctgatatggaactgaccagtagagatgagggtgaaagaaaaatggaaaaagaagaacttgatgtatctgtaagagaagaggaggtatcttgcagtgggcctctgtcccaaaaacaagcagaattttttctttctcaacaggcttctttgctaaagaatgatgagactaaggccctcactccagcttccttgcagaaggaattaaacaatttgttgaaatttaatcctgattttgctgaagcgcattatctcagctacttaaacaacctccgtgtccaagatgttttcagttcaacacacagtctcctccattattttgatcgtctgattcttaccggagccgaaagcaaaagtaatggggaagagggctatggccggagcttgagatacgccgctctgaatcttgccgccctgcactgccgcttcggtcactatcaacaggcagagctcgccctgcaggaggcaattaggattgcccaggagtccaacgatcacgtgtgtctccagcactgtttgagctggctttatgtgctggggcagaagagatccgatagctatgttctgctggagcattctgtgaagaaggcagtacattttgggttaccgtacctcgcctccctgggaatacagtcccttgttcaacagagagcttttgctgggaagacggcaaacaagctgatggatgccctaaaggactccgacctcctgcactggaaacacagcctgtcagagctcatcgatatcagcatcgcacagaaaacggccatctggaggctgtatggccgcagcaccatggcactgcaacaggcccagatgttgctgagcatgaacagcctggaggcggtgaatgcgggcgtgcagcagaacaacacagagtcctttgctgtcgcactctgccacctcgcagagctacacgcggagcagggctgttttgctgcagcttctgaagtgttaaagcacttgaaggaacgatttccgcctaatagtcagcacgcccagttatggatgctatgtgatcaaaaaatacagtttgacagagcaatgaatgatggcaaatatcatttggctgattcacttgttacaggaatcacagctctcaatagcatagagggtgtttataggtaag

SEQ ID NO: 3835 - DNA, 1821 bp, Homo sapiens
gcctgggactgtgtctgtcgcccatggccgccgcgctgctcgcccgggcctcgggccctgcccgcagagctctctgtcctagggcctggcggcagttacacaccatctaccagtctgtggaactgcccgagacacaccagatgttgctccagacatgccgggactttgccgagaaggagttgtttcccattgcagcccaggtggataaggaacatctcttcccagcggctcaggtgaagaagatgggcgggcttgggcttctggccatggacgtgcccgaggagcttggcggtgctggcctcgattacctggcctacgccatcgccatggaggagatcagccgcggctgcgcctccaccggagtcatcatgagtgtcaacaactctctctacctggggcccatcttgaagtttggctccaaggagcagaagcaggcgtgggtcacgcctttcaccagtggtgacaaaattggctgctttgccctcagcgaaccagggaacggcagtgatgcaggagctgcgtccaccaccgcccgggccgagggcgactcatgggttctgaatggaaccaaagcctggatcaccaatgcctgggaggcttcggctgccgtggtctttgccagcacggacagagccctgcaaaacaagggcatcagtgccttcctggtccccatgccaacgcctgggctcacgttggggaagaaagaagacaagctgggcatccggggctcatccacggccaacctcatctttgaggactgtcgcatccccaaggacagcatcctgggggagccagggatgggcttcaagatagccatgcaaaccctggacatgggccgcatcggcatcgcctcccaggccctgggcattgcccagaccgccctcgattgtgctgtgaactacgctgagaatcgcatggccttcggggcgcccctcaccaagctccaggtcatccagttcaagttggcagacatggccctggccctggagagtgcccggctgctgacctggcgtgctgccatgctgaaggataacaagaagcctttcatcaaggaggcagccatggccaagctggccgcctcggaggccgcgaccgccatcagccaccaggccatccagatcctgggcggcatgggctacgtgacagagatgccggcagagcggcactaccgcgacgcccgcatcactgagatctacgagggcaccagcgaaatccagcggctggtgatcgccgggcatctgctcaggagctaccggagctgagcccgcggcggactgccccaggactgcgggaaggcgcgggagccaggggcctccaccccaaccccggctcagagactgggcggcccggcgggggctccctggggaccccagatgggctcagtgctgccacccagatcagatcacatgggaatgaggccctccgaccattggcagctccgcctctgggcctttccgcctcctcaccactgtgcctcaagttcctcatctaagtggccctggcctcctggaggcggggttgtgggggggctgagcgacactcagggacacctcagttgtcctcccgcgggccctggtgccctggcatgaaggcccagtgcgacaggcccttggtggggtctgtcttttccttgaggtcagaggtcaggagcagggctggggtcaggatgacgaggcctggggtcctggtgttgggcaggtggtggggctgggccatggagctggcccagaggcccctcagccctttgtaaagtctgatgaaagcaggggtggtgattcatgctgtgtgactgactgtgggtaataaacacacctgtccccc

SEQ ID NO: 3836 - DNA, 1013 bp, Homo sapiens
gttcctgaggtgggaggcggtacccgtggctgagaagaaggaggcctgagagcgacatgtccccggcggctcaggcggagcggcccgtggcgctgtttttctgagtccggggtggcctggcagccggccgaggacgagggtcggcgggggctgcccccgtggtggtggccgccatgctgggagcctgggcggttgagggaaccgctgtggcgctcctgcgactgctgctgctgctgctgccgccggcgatccggggacccgggctcggcgtggccggcgtggccggcgcggcgggggccgggctgcccgagagcgtcatttgggcggtcaacgcgggtggagaggcgcatgtggacgtgcacgggatccacttccgcaaggaccctttggaaggccgggtgggccgagcctcagactatggcatgaaactgccaatcctgcgttccaaccctgaggaccagatcctgtatcaaactgagcggtacaatgaggagacctttggctacgaagtgcccatcaaagaggagggggactacgtgctggtcttgaaatttgcagaggtctactttgcacagtcccagcaaaaggtatttgatgtacgattgaatggccacgtcgtggtgaaggacttggatatctttgatcgtgttgggcatagcacagctcacgatgaaattatacctatgagcatcagaaaggggaagctgagtgtccagggggaggtgtccaccttcacagggaaactctacattgagtttgtcaaggggtactatgacaatcccaaggtctgtgcactctacatcatggctgggacagtggatgatgtaccaaatcttcattccaaccctcttctgcctctgccggttgtgagaacaaatgactatcctgaacagggtggaggggtgtgggaaagaaaccagccatattggttttggtttctgtatttttcacaatgattaatgaacaaaaacaaagagaaaaaaacacacatcaattaaaggagacaaaaagag

SEQ ID NO: 3837 - DNA, 2338 bp, Homo sapiens
ggcacgaggcatgggcggagccgtagttacggtcgactggggcgtcgtccctagcccgggagccgggtctctggagtcgcggcccggggttcacgatgtccgacgaggaagcgaggcagagcggaggctcctcgcaggccggcgtcgtgactgtcagcgacgtccaggagctgatgcggcgcaaggaggagatagaagcgcagatcaaggccaactatgacgtgctggaaagccaaaaaggcattgggatgaacgagccgctggtggactgtgagggctacccccggtcagacgtggacctgtaccaagtccgcaccgccaggcacaacatcatatgcctgcagaatgatcacaaggcagtgatgaagcaggtggaggaggccctgcaccagctgcacgctcgcgacaaggagaagcaggcccgggacatggctgaggcccacaaagaggccatgagccgcaaactgggtcagagtgagagccagggccctccacgggccttcgccaaagtgaacagcatcagccccggctccccagccagcatcgcgggtctgcaagtggatgatgagattgtggagttcggctctgtgaacacccagaacttccagtcactgcataacattggcagtgtggtgcagcacagtgaggggaagcccctgaatgtgacagtgatccgcaggggggaaaaacaccagcttagacttgttccaacacgctgggcaggaaaaggactgctgggctgcaacattattcctctgcaaagatgattgtccctggggaacagtaacaggaaagcatcttcccttgccctggacttgggtctagggatttccaacttgtcttctctccctgaagcataaggatctggaagaggcttgtaacctgaacttctgtgtggtggcagtactgtggcccaccagtgtaatctccctggattaaggcattcttaaaaacttaggcttggcctctttcacaaattaggccacggccctaaataggaattccctggattgtgggcaagtgggcggaagttattctggcaggtactggtgtgattattattattatttttaataaagagttttacagtgctgatatgaccctgttgtcaccccagctgaatttcttatgaccctcccaaaccaaagctcagatggggtcagaagagcttcatagaaagttgggcaaaacaggctagcaattgcaaagtcaggctttgaccaacatatttctttgcactgaggccttgctgctgtggatacggaaatggttaagtactgtgcttcctcagcagctgggctgtcagggccatagtagctccctttggagaacagggaaagcctggaggcttcccaggtggcccagcgtggtgtcctgtcagcttcctctttaggaacccaccagagggcagcaagctcctttcacttcgctagtaagaacccctccgtttttgtgtgtttttgtttttgttttctggagacaaggtcttgctttgtcacccaggctggagtgcagtgtcgtgatcaaggttcactgaagccttgacgctgtgggcactgcctcagccgcccaagtatctgggaccacaggcgtgcaccaccatgcatagctaatttattttttgtagagacagggtctccctgtgttgaccaggttggtctcgaactcctgggctcaagcagtcctcctgccttggcctcctaaagtgctgggatcacaggcgtgagccactgcgcccagcccactgctagtttgactttttataattgaacctcctggctatgccctgagatcagcgctattttgtaaaccgctgaggtatggataggaacgagtagatcagacctcttgaaaatgcttattcttcctcccttttattttttgtctcttttaagatggtaaaatggttctcagggattcctgccaatactttgaattattttttcctctccatggtatcagtgttcatttccccagttcttgcacaccgctttctgttttggcagttctgccaggcaagccctgtgttccttgggactggttttgctgtggttggatacagataccagcttgccttgatgggattggtattgctgtgtgcttccagccacaggttctcacactcaattccaaagccttcctattgggcgaattccctcaaactctatttgacctgacagccatacgtattcccctctggtagccacagacatgctgtgtttaccaatgtttgctgtttaaattgcatgttctaattccacgtattttccagtctcttttataaagtctcagactataataaacacagcttgcccagttaaaaaaaaaaaaaaaaaaa

SEQ ID NO: 3838 - protein, 223 aa, Homo sapiens
MSDEEARQSGGSSQAGVVTVSDVQELMRRKEEIEAQIKANYDVLESQKGIGMNEPLVDCEGYPRSDVDLYQVRTARHNIICLQNDHKAVMKQVEEALHQLHARDKEKQARDMAEAHKEAMSRKLGQSESQGPPRAFAKVNSISPGSPASIAGLQVDDEIVEFGSVNTQNFQSLHNIGSVVQHSEGKPLNVTVIRRGEKHQLRLVPTRWAGKGLLGCNIIPLQR

SEQ ID NO: 3839 - DNA, 1459 bp, Homo sapiens
gtgcgtctggcgtccgcgcgctgcacaatggcggctctgaagagttggctgtcgcgcagcgtaacttcattcttcaggtacagacagtgtttgtgtgttcctgttgtggctaactttaagaagcggtgtttctcagaattgataagaccatggcacaaaactgtgacgattggctttggagtaaccctgtgtgcggttcctattgcacagaaatcagagcctcattcccttagtagtgaagcattgatgaggagagcagtgtctttggtaacagatagcacctctacctttctctctcagaccacatatgcgttgattgaagctattactgaatatactaaggctgtttataccttaacttctctttaccgacaatatacaagtttacttgggaaaatgaattcagaggaggaagatgaagtgtggcaggtgatcataggagccagagctgagatgacttcaaaacaccaagagtacttgaagctggaaaccacttggatgactgcagttggtctttcagagatggcagcagaagctgcatatcaaactggcgcagatcaggcctctataaccgccaggaatcacattcagctggtgaaactgcaggtggaagaggtgcaccagctctcccggaaagcagaaaccaagctggcagaagcacagatagaagagctccgtcagaaaacacaggaggaaggggaggagcgggctgagtcggagcaggaggcctacctgcgtgaggattgagggcctgagcacactgccctgtctccccactcagtggggaaagcaggggcagatgccaccctgcccagggttggcatgactgtctgtgcaccgagaagaggcggcagatcctgccctggccaatcaggcgagacgcctttgtgagctgtgagtgcctcctgtggtctcaggcttgcgctggacctggttcttagcccttgggcactgcaccctgtttaacatttcaccccactctgtacagctgctcttacccattttttttacctcacacccaaagcattttgcctacctgggtcagagagaggagtcctttttgtcatgcccttaagttcagcaactgtttaacctgttttcagtcttatttacgtcgtcaaaaatgatttagtacttgttccctctgttgggatgccagttgtggcagggggaggggaacctgtccagtttgtacgatttctttgtatgtatttctgatgtgttctctgatctgcccccactgtcctgtgaggacagctgaggccaaggagtgaaaaacctattactactaagagaaggggtgcagagtgtttacctggtgctctcaacaggacttaacatcaacaggacttaacacaggcctcttgttccttcctttctttccgtttctctattgtatccaaaggagaagagtgtaagattttgtttgcatctgaaagagaaaatgcgtctctcctgg

SEQ ID NO: 3840 - protein, 239 aa, Homo sapiens
MAALKSWLSRSVTSFFRYRQCLCVPVVANFKKRCFSELIRPWHKTVTIGFGVTLCAVPIAQKSEPHSLSSEALMRRAVSLVTDSTSTFLSQTTYALIEAITEYTKAVYTLTSLYRQYTSLLGKMNSEEEDEVWQVIIGARAEMTSKHQEYLKLETTWMTAVGLSEMAAEAAYQTGADQASITARNHIQLVKLQVEEVHQLSRKAETKLAEAQIEELRQKTQEEGEERAESEQEAYLRED

SEQ ID NO: 3841 - DNA, 4461 bp, Homo sapiens
gtgagtcgcgcggacggagccggacaaaagcgggcggcggcggcaggatgaacagcatcaagaacgtgccggcgcgggtgctgagccgcaggccgggccacagcctggaggccgagcgcgagcagttcgacaagacccaggccatcagcatcagcaaagccatcaacacccaggaggcccccgtgaaggagaagcacgcccggcgcatcattctgggcacacaccacgagaagggggctttcaccttctggtcctacgccattgggctgccgctgcccagcagctccattctcagctggaagttctgccacgtcctccacaaggtccttcgagacgggcaccccaatgtgctgcatgactgccagcggtaccgcagcaacatccgggagattggagacctgtggggacatttgcatgaccgctacggacagctggtgaatgtctacaccaagctgctgctgaccaagatctccttccacctcaagcatccccagtttcccgcgggcctggaggtgacagatgaggtactggagaaggcagctgggaccgatgtcaacaacatcttccagctcactgtggagatgtttgattacatggattgtgagctgaagctttctgaatcagttttccgacagctcaacacggccatcgccgtatcccagatgtcctcaggccagtgccgcctggcccccctcatccaggtcatccaggactgcagccacctctaccactacacggtcaagctcctgttcaagctacactcttgtctccctgcggacaccctgcaaggccacagggaccggttccacgagcagtttcacagcctcaggaacttcttccgcagagcctccgacatgctgtacttcaagcggctcatccagatcccccggctgcccgagggaccccctaacttcctgcgggcctcagccctggctgagcacatcaagccggtggtggtgatccccgaggaggccccggaagatgaggagccggagaatctcattgagatcagcacagggccccccgcgggggagccagtggtggtggctgacctcttcgatcagacgtttggaccccccaatgggtctgtgaaggacgacagggacctccagattgagagcttgaagagagaggtggaaatgctccgctctgaactggagaagatcaagctggaggcccagcggtacatcgcgcagctgaagagccaggtgaatgcactggagggtgagctggaggagcagcggaagcagaagcagaaggccctggtggataatgagcagctccgccacgagctggcccagctgagggctgcccagctggagggcgagcggagccagggcctgcgtgaggaggctgagaggaaggccagtgccacggaggcgcgctacaacaagctgaaggaaaagcacagtgagctcgtccatgtgcacgcggagctgctcagaaagaacgcggacacagccaagcagctgacggtgacgcagcaaagccaggaggaggtggcgcgggtgaaggagcagctggccttccaggtggagcaggtgaagcgggagtcggagttgaagctagaggagaagagcgaccagctggagaagctcaagagggagctggaggccaaggccggagagctggcccgcgcgcaggaggccctgagccacacagagcagagcaagtcggagctgagctcacggctggacacgctgagtgcggagaaggatgctctgagtggagctgtgcggcagcgggaggcagacctgctggcggcgcagagcctggtgcgcgagacagaggcggcgctgagccgggagcagcagcgcagctcccaggagcagggcgagttgcagggccggctggcagagagggagtctcaggagcaggggctgcggcagaggctgctggacgagcagttcgcagtgttgcggggcgctgctgccgaggccgcgggcatcctgcaggatgccgtgagcaagctggacgaccccctgcacctgcgctgtaccagctccccagactacctggtgagcagggcccaggaggccttggatgccgtgagcaccctggaggagggccacgcccagtacctgacctccttggcagacgcctccgccctggtggcagctctgacccgcttctcccacctggctgcggataccatcatcaatggcggtgccacctcgcacctggctcccaccgaccctgccgaccgcctcatagacacctgcagggagtgcggggcccgggctctggagctcatggggcagctgcaggaccagcaggctctgcggcacatgcaggccagcctggtgcggacacccctgcagggcatccttcagctgggccaggaactgaaacccaagagcctagatgtgcggcaggaggagctgggggccgtggtcgacaaggagatggcggccacatccgcagccattgaagatgctgtgcggaggattgaggacatgatgaaccaggcacgccacgccagctcgggggtgaagctggaggtgaacgagaggatcctcaactcctgcacagacctgatgaaggctatccggctcctggtgacgacatccactagcctgcagaaggagatcgtggagagcggcaggggggcagccacgcagcaggaattttacgccaagaactcgcgctggaccgaaggcctcatctcggcctccaaggctgtgggctggggagccacacagctggtggaggcagctgacaaggtggtgcttcacacgggcaagtatgaggagctcatcgtctgctcccacgagatcgcagccagcacggcccagctggtggcggcctccaaggtgaaggccaacaagcacagcccccacctgagccgcctgcaggaatgttctcgcacagtcaatgagagggctgccaatgtggtggcctccaccaagtcaggccaggagcagattgaggacagagacaccatggatttctccggcctgtccctcatcaagctgaagaagcaggagatggagacccaggtgcgtgtcctggagctggagaagacgctggaggctgaacgcatgcggctgggggagttgcggaagcaacactacgtgctggctggggcatcaggcagccctggagaggaggtggccatccggcccagcactgccccccgaagtgtaaccaccaagaaaccacccctggcccagaagcccagcgtggcccccagacaggaccaccagcttgacaaaaaggatggcatctacccagctcaactcgtgaactactaggccccccaggggtccagcagggtggctggtgacaggcctgggcctctgcaactgccctgacaggaccgagaggccttgcccctccacctggtgcccaagcctcccgccccaccgtctggatcaatgtcctcaaggcccctggcccttactgagcctgcagggtcctgggccatgtgggtggtgcttctggatgtgagtctcttatttatctgcagaaggaactttggggtgcagccaggacccggtaggcctgagcctcaactcttcagaaaatagtgtttttaatattcctcttcagaaaatagtgtttttaatattccgagctagagctcttcttcctacgtttgtagtcagcacactgggaaaccgggccagcgtggggctccctgccttctggactcctgaaggtcgtggatggatggaaggcacacagcccgtgccggctgatgggacgagggtcaggcatcctgtctgtggccttctggggcaccgattctaccaggccctccagctgcgtggtctccgcagaccaggctctgtgtgggctagaggaatgtcgcccattactcctcaggcctggccctcgggcctccgtgatgggagccccccaggaggggtcagatgctggaaggggccgctttctggggagtgaggtgagacatagcggcccgggcgctgccttcactcctggagtgagtttccatttccagctggaatctgcagccacccccatttcctgttttccattcccccgttctggccgcgccccactgcccacctgaaggggtggtttccagccctccggagagtgggcttggccctaggccctccagctcagccagaaaaagcccagaaacccaggtgctggaccagggccctcagggaggggaccctgcggctagagtgggctaggccctggctttgcccgtcagatttgaacgaatgtgtgtcccttgagcccaaggagagcggcaggaggggtgggaccaggctgggaggacagagccagcagctgccatgccctcctgctccccccaccccagccctagccctttagcctttcaccctgtgctctggaaaggctaccaaatactggccaaggtcaggaggagcaaaaatgagccagcaccagcgccttggctttgtgttagcatttcctcctgaagtgttctgttggcaataaaatgcactttgactgtttgttgtc

SEQ ID NO: 3842 - protein, 1068 aa, Homo sapiens
MNSIKNVPARVLSRRPGHSLEAEREQFDKTQAISISKAINTQEAPVKEKHARRIILGTHHEKGAFTFWSYAIGLPLPSSSILSWKFCHVLHKVLRDGHPNVLHDCQRYRSNIREIGDLWGHLHDRYGQLVNVYTKLLLTKISFHLKHPQFPAGLEVTDEVLEKAAGTDVNNIFQLTVEMFDYMDCELKLSESVFRQLNTAIAVSQMSSGQCRLAPLIQVIQDCSHLYHYTVKLLFKLHSCLPADTLQGHRDRFHEQFHSLRNFFRRASDMLYFKRLIQIPRLPEGPPNFLRASALAEHIKPVVVIPEEAPEDEEPENLIEISTGPPAGEPVVVADLFDQTFGPPNGSVKDDRDLQIESLKREVEMLRSELEKIKLEAQRYIAQLKSQVNALEGELEEQRKQKQKALVDNEQLRHELAQLRAAQLEGERSQGLREEAERKASATEARYNKLKEKHSELVHVHAELLRKNADTAKQLTVTQQSQEEVARVKEQLAFQVEQVKRESELKLEEKSDQLEKLKRELEAKAGELARAQEALSHTEQSKSELSSRLDTLSAEKDALSGAVRQREADLLAAQSLVRETEAALSREQQRSSQEQGELQGRLAERESQEQGLRQRLLDEQFAVLRGAAAEAAGILQDAVSKLDDPLHLRCTSSPDYLVSRAQEALDAVSTLEEGHAQYLTSLADASALVAALTRFSHLAADTIINGGATSHLAPTDPADRLIDTCRECGARALELMGQLQDQQALRHMQASLVRTPLQGILQLGQELKPKSLDVRQEELGAVVDKEMAATSAAIEDAVRRIEDMMNQARHASSGVKLEVNERILNSCTDLMKAIRLLVTTSTSLQKEIVESGRGAATQQEFYAKNSRWTEGLISASKAVGWGATQLVEAADKVVLHTGKYEELIVCSHEIAASTAQLVAASKVKANKHSPHLSRLQECSRTVNERAANVVASTKSGQEQIEDRDTMDFSGLSLIKLKKQEMETQVRVLELEKTLEAERMRLGELRKQHYVLAGASGSPGEEVAIRPSTAPRSVTTKKPPLAQKPSVAPRQDHQLDKKDGIYPAQLVNY

SEQ ID NO: 3843 - DNA, 952 bp, Homo sapiens
gtcctctcgagaaggcgcggggcgggctgtccggcccgcagggcggtcgagcccgcggcgccatggctcacgtcggctcccgcaagcgctcgaggagtcgcagccggtcccggggacgggggtcggaaaagagaaagaagaagagcaggaaagacacctcgaggaactgctcggcctccacatcccaagagagaagcaagcagaaggcccggaggagaacaagatccagctcctcctcctcttcttccagttcttctagctcctcttcttcctcctcgtcctcctcctcttcctccagtgatggccggaagaagcgggggaagtacaaggacaagaggaggaagaagaagaagaagaggaagaagctgaagaagaagggcaaggagaaggcggaagcacagcaggtggaggctctgccgggcccctcgctggaccagtggcaccgatcagctggggaggaagaggatggcccagtcctgacggatgagcagaagtcccgaatccaggccatgaagcccatgaccaaggaggagtgggatgcccggcagagcatcatccgcaaggtggtggaccctgagacggggcgcaccaggcttattaagggagatggcgaggtcctagaggaaatcgtaaccaaagaacgacacagagagatcaacaagcaagccacccgaggggactgcctggccttccagatgcgagctgggttgcttccctgagggcccccgctggccaaggcctgtggacgacgctggcggcccagcctgggcaggtttcagggtgccagtgggaagcctgatgggtgctggtggcctttcccccgtggattggtctctggcccagcccagtctcttctcaggggcagggggtggaggttggggtcaccggcctgcttggcacccccatctgaaagagcagcacttctcagctattaaaggccccctggatagac

SEQ ID NO: 3844 - protein, 218 aa, Homo sapiens
MAHVGSRKRSRSRSRSRGRGSEKRKKKSRKDTSRNCSASTSQERSKQKARRRTRSSSSSSSSSSSSSSSSSSSSSSSSSDGRKKRGKYKDKRRKKKKKRKKLKKKGKEKAEAQQVEALPGPSLDQWHRSAGEEEDGPVLTDEQKSRIQAMKPMTKEEWDARQSIIRKVVDPETGRTRLIKGDGEVLEEIVTKERHREINKQATRGDCLAFQMRAGLLP

SEQ ID NO: 3845 - DNA, 1014 bp, Homo sapiens
gcgtggatgcaactagagagacaaatcgcctaggaagactgatcaatcacagcaaatgtgggaactgccaaaccaaactgcacgacatcgacggcgtacctcacctcatcctcatcgcctcccgagacatcgcggctggggaggagctcctgtatgactatggggaccgcagcaaggcttccattgaagcccacccgtggctgaagcattaaccggtgggccccgtgccctccccgccccactttcccttcttcaaaggacaaagtgccctcaaagggaattgaattttttttttacacacttaatcttagcggattacttcagatgtttttaaaaagtatattaagatgccttttcactgtagtatttaaatatctgttacaggtttccaaggtggacttgaacagatggccttatattaccaaaacttttatattctagttgtttttgtactttttttgcatacaagccgaacgtttgtgcttcccgtgcatgcagtcaaagactcagcacaggttttagaggaaatagtcaaacatgaactaggaagccaggtgagtctcctttctccagtggaagagccgggaccttccccctgcacccccgacatccagggacggggtgtgaggaagacgctgcctcccaatggcctggacgggatgtttccaagctcttgttcccctaacgtctcaacaggcgctcactgaagtgtatgaatattttttaaaaaggtttttgcagtaagctagtcttcccctctgctttctcgaaagcttactgagccccgggccccaagcacgggccgggcatagatttcctcttccacaagctgccgcttttctgggcaccttgaagcatcagggcgtgaaatcaaactagatgtgggcagggagagggttgcttacctgccctgctggggcagggtttcctgaaactgggttaattctttatagaaatgtgaacactgaatttattttaaaaaataataataaaaatttaaaaaaattaaaaata

SEQ ID NO: 3846 - protein, 99 aa, Homo sapiens [sequence omitted]

SEQ ID NO: 3847 - DNA, 2060 bp, Homo sapiens
ctggcttcggcctcagccccaccatggtgacgcttgctgaactgctggtgctcctggccgctctcctggccacggtctcgggctatttcgttagcatcgacgcccatgctgaagagtgcttctttgagcgggtcacctcgggcaccaagatgggcctcatcttcgaggtggcggagggcggcttcctggacatcgacgtggagattacaggaccagataacaaaggaatttacaaaggagacagagaatccagtgggaaatacacatttgctgctcacatggatggaacatacaaattttgttttagtaaccggatgtccaccatgactccaaaaatagtgatgttcaccattgatattggggaggctccaaaaggacaagatatggaaacagaagctcaccagaacaagctagaagaaatgatcaatgagctagcagtggcgatgacagctgtaaagcacgaacaggaatacatggaagtccgggagagaatacacagagccatcaacgacaacacaaacagcagagtggtcctttggtccttctttgaagctcttgttctagttgccatgacattgggacagatctactacctgaagagattttttgaagtccggagagttgtttaaaaagcctcttcctgatgatcccaactcagaattcactgtttaccaaacaccttggtcataataatgtcattagtttctccatttttattttctgaactgtacattcacaacttatgtttctttgagattaatagatattgggggaaaaacgcctttttaggaaaattatagtgaaaatttgacagttgattggcataatttcttgtttgaatgctgcctccattatataggtccttccaggaactcaaacactgtaagtgaaatatgggagtatagtttttattatttcttcttttccttttgttttcataatataatgcagtttgttcaggaaatcagcacaaagcctgatagtactttactaaaatgactgcattctttggattccttcagtctatggttcaagtcactaaagattcatttttgttgagtccttatgagaaacagcagtatgaatcttgacggtttctgcccgtcctaatggcagagctctctgacttgggtgtatgctgccaggctgggtactttcatactttgttttcttgttttgctttaaaactacgactcagcatacattttcccacatacatttttacattgtaccttaggactcagtcatctccacttaaattgatgacacaagcagctaataaccatttctgggtttctgcctaaccccctaattgtctgttaaagccaattctctgggtgtcccagtgagtggtggctttttttctttccacattggcacattcacttctcccactcttggcatgtaagaaataagcatttacataattggaaaaatctggatttctgatgccaaagggttaaagcttcttggatttcatttcattgatatacagccactattttatttttgatcagtggcctttgggccactgttcagggtactgaccatcagtgtcagcattagggttttggtttttgtttcttttgggtatttcttttttggcacatgtgaatcttgttttgtgtaaaatgaaattactttctcttgttctctgatgatgggtttaaaattaaaagagcatccggttttggtatggggatgatccaggattatgttgtgactgatacatattagttacttgtgctttttttttttttttttggatctttgcaagggcaaaactacaagtaacgagttttatataattaatttaaatttgttacaggttttcatgttcaggataaaccatacttccaccttgggtgagaacacttgcaacagtttattaatgaggtgactttcaccttaggacaactgttgcatgccaagttttttgtgtgtgtgaaacacttcaaaactgatttaaaagatgtaaatttaaaattggttgtatctaatatgccccaggttcggtaaataaacaattctttttaaaaaaaaaaaaaaaaaaaaaaaaa

SEQ ID NO: 3848 - protein, 201 aa, Homo sapiens
MVTLAELLVLLAALLATVSGYFVSIDAHAEECFFERVTSGTKMGLIFEVAEGGFLDIDVEITGPDNKGIYKGDRESSGKYTFAAHMDGTYKFCFSNRMSTMTPKIVMFTIDIGEAPKGQDMETEAHQNKLEEMINELAVAMTAVKHEQEYMEVRERIHRAINDNTNSRVVLWSFFEALVLVAMTLGQIYYLKRFFEVRRVV

SEQ ID NO: 3849 - DNA, 1825 bp, Homo sapiens
atctgcggaagtggagtgcggggagtgcgccggaagaggggtacggaagtgcgccggaagtggggtgcggaggtgtgcagcgcgctgtcagactggctcgcaggcggcgcggccggcggacccgttcgagacagcgcgggcggctcgggtcccctggggctccgcagcaggaggacgccatggacgacaaggagttaattgaatactttaagtctcagatgaaagaagatcctgacatggcctcagcagtggctgccatccggacgttgctggagttcttgaagagagataaaggggagacaatccagggtctgagggcgaatctcaccagtgccatagaaaccctgtgtggtgtggactcctctgtggcagtgtcctctggcggggagctcttcctccgcttcatcagtcttgcctccctggaatactccgattactccaaatgtaaaaagatcatgattgagcggggagaactttttctcaggagaatatcactgtcaagaaacaaaattgcagatctgtgccatactttcatcaaagatggagcgacaatattgactcacgcctactccagagtggtcctgagagtcctggaagcagccgtggcggccaagaagcgatttagtgtatacgtcacagagtcacagcctgatttgtcaggtaagaaaatggccaaagccctctgccacctcaacgtccctgtcactgtggtgctagatgctgctgtcggctacatcatggagaaagcagatcttgtcatagttggtgctgaaggagttgttgaaaacggaggaattattaacaagattggaaccaaccagatggctgtgtgtgccaaagcacagaacaaacctttctatgtggttgcagaaagtttcaagtttgtccggctctttccactaaaccagcaagacgtcccagataagtttaagtataaggcagacactctcaaggtcgcgcagactggacaagacctcaaagaggagcatccgtgggtcgactacactgccccttccttaatcactctgctgtttacagacctgggcgtgctgacaccctcagcagtcagcgatgagctcatcaagctctatctgtaacctgtgagccctttcctgccaaggtgcagcttacgtagttgaggcagggtgagtagctgcttgacaccccagtgagtcaggccaaaactgagatgtgtttaatgaagatttatggagtaaggacttaaaatcatacatcttggagaacctttcttactcatttcagtcccatctaaaaatgtgtcagctattctaaatcccaacttaaattgttcttacggtttctagaaactttccttttcagtttccagaaatacaagttagataattggctacttaactgatgaaagatgagcccaagtccacctgtcttcatcctcccctgcactccagactgatctgcctaaagcacgcgagatgcaggcgaaaagcagccacacccctctgccacaaatgaccaacagctggtcaggacgttacacgcggtgccttgtaagaggcaagaaacacttgctgaatctgcatctggcttccagtggtaagcacattcctcagcaggatcaagccaaacagtaaaaactaccaagagaacacgaggaaggcagaaacgatgtttagcaacagtattctgcatggttcactgcttaagaaaatgccttctggaatatttgtaaactgaaattctgtatgtgtaagagatgtttaaatatgtttgggtcctaaacagctttttaaaattatacttgggaataaattcagcatcttttcaaataaactctatgaaagac

SEQ ID NO: 3850 - protein, 305 aa, Homo sapiens
MDDKELIEYFKSQMKEDPDMASAVAAIRTLLEFLKRDKGETIQGLRANLTSAIETLCGVDSSVAVSSGGELFLRFISLASLEYSDYSKCKKIMIERGELFLRRISLSRNKIADLCHTFIKDGATILTHAYSRVVLRVLEAAVAAKKRFSVYVTESQPDLSGKKMAKALCHLNVPVTVVLDAAVGYIMEKADLVIVGAEGVVENGGIINKIGTNQMAVCAKAQNKPFYVVAESFKFVRLFPLNQQDVPDKFKYKADTLKVAQTGQDLKEEHPWVDYTAPSLITLLFTDLGVLTPSAVSDELIKLYL

SEQ ID NO: 3851 - DNA, 1057 bp, Homo sapiens
gtgagtggcttccacaggccatgcaccccgatatcgagaaagcctggccccccaccactgtccactgaccagaaacctggctgcagggccgaggactggtttggggactggagggctggcagcagcctgtcaccgtgcgaccgtgaccacctggcatgggcttcgtggcctgctctcaggaagtgggtcaagccctgggaaccctcatccatgagagctcgatcccgtatgaagggtgctgccgcccgtgccatctggcccgggggtgactttttgaactgtttattatatggtggatgatgatttcatctcacgtgctggacgctgttctgttcagtgtgctctttggactacattagtcccctgtggagcagcagggctggagatctctgcagtcccttccccgcccgccctgccagaaggccgaggaggcacgtggagggcctccttcctgcaattcttccctctccagagtcagggagggctgcccagccctggcctcacagccgtcccagatgttaggtgagccactgagctctgtgttgaccttgaggggcctggctgggggcccccaggctccatgccttcttgggagggtggccgccaacgcctttcctgtgttatggcaacagggagtgggcatctcatctgcctgtggtcagctctcagacggcagggagcggagctgacgttggctgtgcttggtcaccgctgccatgccgcagaggatgcgcctagctgggctggggccacacgactattatgttggccttgaacggggactgcagagccctcagtttgtctcccttgttcctctgtggctgaggtgggagggggagggtggggtaggtcccccagcaagaaagagggacaggagcaccccaggcaggaccaaggagtcgggaggcccctgccttctgtcctccatggtgagggcacagatgtctccccagagcccagcgctggcagaatggattctgctcctggctttgcttctgcggcttcggtggagacagttatggaataaaatgttccttgcaaaaaaaaaaaaaaaaaa

SEQ ID NO: 3852 - protein, 37 aa, Homo sapiens
MGFVACSQEVGQALGTLIHESSIPYEGCCRPCHLARG

SEQ ID NO: 3853 - DNA, 3055 bp, Homo sapiens
agttccgtcgcagccgggatttgggtcgcggttcttgtttgtggatcgctgtgatcgtcacttggtgagtagcgggctgctgggctggccggggctttcgtggccgccgggccgctcggtgggacggaagcgtgtggagagaccgccaagggctgtagtctgggtccgcgagcaaggttgccctgaactgggggttggggggagcgcagcaaaatggcggctgttcccgagtcttgaatggaagacgcttgtgaggcgggctgtgaggtcgttgaaacaaggtggggggcatggtgggcggcaagaacccaaggtcttgaggccttcgctaatgcgggaaagctcttattcgggtgagatgggctggggcaccatctggggaccctgacgtgaagtttgtcactgactggagaactcggtttgtcgtctgttgcgggggcggcagttatggcggtgccgttgggcagtgcacccgtacctttgggagcgcgcgccctcgtcgtgtcgtgacgtcacccgttctgttggcttataatgcagggtggggccacctgccggtaggtgtgcggtaggcttttctccgtcgcaggacgcagggttcgggcctagggtaggctctcctgaatcgacaggcgccggacctctggtgaggggagggataagtgaggcgtcagtttctttggtcggttttatgtacctatcttcttaagtagctgaagctccggttttgaactatgcgctcggggttggcgagtgtgttttgtgaagttttttaggcaccttttgaaatgtaatcatttgggtcaatatgtaattttcagtgttagactagtaaattgtccgctaaattctggccgtttttggcttttttgttagacaatgcagatcttcgtgaagactctgactggtaagaccatcaccctcgaggttgagcccagtgacaccatcgagaatgtcaaggcaaagatccaagataaggaaggcatccctcctgaccagcagaggctgatctttgctggaaaacagctggaagatgggcgcaccctgtctgactacaacatccagaaagagtccaccctgcacctggtgctccgtctcagaggtgggatgcaaatcttcgtgaagacactcactggcaagaccatcacccttgaggtggagcccagtgacaccatcgagaacgtcaaagcaaagatccaggacaaggaaggcattcctcctgaccagcagaggttgatctttgccggaaagcagctggaagatgggcgcaccctgtctgactacaacatccagaaagagtctaccctgcacctggtgctccgtctcagaggtgggatgcagatcttcgtgaagaccctgactggtaagaccatcaccctcgaggtggagcccagtgacaccatcgagaatgtcaaggcaaagatccaagataaggaaggcattcctcctgatcagcagaggttgatctttgccggaaaacagctggaagatggtcgtaccctgtctgactacaacatccagaaagagtccaccttgcacctggtactccgtctcagaggtgggatgcaaatcttcgtgaagacactcactggcaagaccatcacccttgaggtcgagcccagtgacactatcgagaacgtcaaagcaaagatccaagacaaggaaggcattcctcctgaccagcagaggttgatctttgccggaaagcagctggaagatgggcgcaccctgtctgactacaacatccagaaagagtctaccctgcacctggtgctccgtctcagaggtgggatgcagatcttcgtgaagaccctgactggtaagaccatcaccctcgaagtggagccgagtgacaccattgagaatgtcaaggcaaagatccaagacaaggaaggcatccctcctgaccagcagaggttgatctttgccggaaaacagctggaagatggtcgtaccctgtctgactacaacatccagaaagagtccaccttgcacctggtgctccgtctcagaggtgggatgcagatcttcgtgaagaccctgactggtaagaccatcactctcgaggtggagccgagtgacaccattgagaatgtcaaggcaaagatccaagacaaggaaggcatccctcctgatcagcagaggttgatctttgctgggaaacagctggaagatggacgcaccctgtctgactacaacatccagaaagagtccaccctgcacctggtgctccgtcttagaggtgggatgcagatcttcgtgaagaccctgactggtaagaccatcactctcgaagtggagccgagtgacaccattgagaatgtcaaggcaaagatccaagacaaggaaggcatccctcctgaccagcagaggttgatctttgctgggaaacagctggaagatggacgcaccctgtctgactacaacatccagaaagagtccaccctgcacctggtgctccgtcttagaggtgggatgcagatcttcgtgaagaccctgactggtaagaccatcactctcgaagtggagccgagtgacaccattgagaatgtcaaggcaaagatccaagacaaggaaggcatccctcctgaccagcagaggttgatctttgctgggaaacagctggaagatggacgcaccctgtctgactacaacatccagaaagagtccaccctgcacctggtgctccgtctcagaggtgggatgcagatcttcgtgaagaccctgactggtaagaccatcaccctcgaggtggagcccagtgacaccatcgagaatgtcaaggcaaagatccaagataaggaaggcatccctcctgatcagcagaggttgatctttgctgggaaacagctggaagatggacgcaccctgtctgactacaacatccagaaagagtccactctgcacttggtcctgcgcttgagggggggtgtctaagtttccccttttaaggtttcaacaaatttcattgcactttcctttcaataaagttgttgcattcccaattggtgttttttttttttttttttttttttttttaagtttattttgcatt

SEQ ID NO: 3854 - protein, 685 aa, Homo sapiens
MQIFVKTLTGKTITLEVEPSDTIENVKAKIQDKEGIPPDQQRLIFAGKQLEDGRTLSDYNIQKESTLHLVLRLRGGMQIFVKTLTGKTITLEVEPSDTIENVKAKIQDKEGIPPDQQRLIFAGKQLEDGRTLSDYNIQKESTLHLVLRLRGGMQIFVKTLTGKTITLEVEPSDTIENVKAKIQDKEGIPPDQQRLIFAGKQLEDGRTLSDYNIQKESTLHLVLRLRGGMQIFVKTLTGKTITLEVEPSDTIENVKAKIQDKEGIPPDQQRLIFAGKQLEDGRTLSDYNIQKESTLHLVLRLRGGMQIFVKTLTGKTITLEVEPSDTIENVKAKIQDKEGIPPDQQRLIFAGKQLEDGRTLSDYNIQKESTLHLVLRLRGGMQIFVKTLTGKTITLEVEPSDTIENVKAKIQDKEGIPPDQQRLIFAGKQLEDGRTLSDYNIQKESTLHLVLRLRGGMQIFVKTLTGKTITLEVEPSDTIENVKAKIQDKEGIPPDQQRLIFAGKQLEDGRTLSDYNIQKESTLHLVLRLRGGMQIFVKTLTGKTITLEVEPSDTIENVKAKIQDKEGIPPDQQRLIFAGKQLEDGRTLSDYNIQKESTLHLVLRLRGGMQIFVKTLTGKTITLEVEPSDTIENVKAKIQDKEGIPPDQQRLIFAGKQLEDGRTLSDYNIQKESTLHLVLRLRGGV

SEQ ID NO: 3855 - DNA, 425 bp, Homo sapiens
ggaagatggtcgtaccctgtctgactacaacatccagaaagagtccaccttgcacctggtgctccgtctcagaggtgggatgcagatcttcgtgaagaccctgactggtaagaccatcactctcgaggtggagccgagtgacaccattgagaatgtcaaggcaaagatccaagacaaggaaggcatccctcctgatcagcagaggttgatctttgctgggaaacagctggaagatggacgcaccctgtctgactacaacatccagaaagagtccaccctgcacctggtgctccgtcttagaggtgggatgcagatcttcgtgaagaccctgactggtaagaccatcactctcgaagtggagccgagtgacaccattgagaatgtcaaggcaaagatccaagaccctgactggtaagaccatcact

SEQ ID NO: 3856 - DNA, 8533 bp, Homo sapiens
catgtcgggatccacacagcctgtggcacagacgtggagggccactgagccccgctacccgccccacagcctttcctacccagtgcagatcgcccggacgcacacggacgtcgggctcctggagtaccagcaccactcccgcgactatgcctcccacctgtcgcccggctccatcatccagccccagcggcggaggccctccctgctgtctgagttccagcccgggaatgaacggtcccaggagctccacctgcggccagagtcccactcatacctgcccgagctggggaagtcagagatggagttcattgaaagcaagcgccctcggctagagctgctgcctgaccccctgctgcgaccgtcacccctgctggccacgggccagcctgcgggatctgaagacctcaccaaggaccgtagcctgacgggcaagctggaaccggtgtctccccccagccccccgcacactgaccctgagctggagctggtgccgccacggctgtccaaggaggagctgatccagaacatggaccgcgtggaccgagagatcaccatggtagagcagcagatctctaagctgaagaagaagcagcaacagctggaggaggaggctgccaagccgcccgagcctgagaagcccgtgtcaccgccgcccatcgagtcgaagcaccgcagcctggtgcagatcatctacgacgagaaccggaagaaggctgaagctgcacatcggattctggaaggcctggggccccaggtggagctgccgctgtacaaccagccctccgacacccggcagtatcatgagaacatcaaaataaaccaggcgatgcggaagaagctaatcttgtacttcaagaggaggaatcacgctcggaaacaatgggagcagaagttctgccagcgctatgaccagctcatggaggcctgggagaagaaggtggagcgcatcgagaacaacccccggcggcgggccaaggagagcaaggtgcgcgagtactacgagaagcagttccctgagatccgcaagcagcgcgagctgcaggagcgcatgcagagcagggtgggccagcggggcagtgggctgtccatgtcggccgcccgcagcgagcacgaggtgtcagagatcatcgatggcctctcagagcaggagaacctggagaagcagatgcgccagctggccgtgatcccgcccatgctgtacgacgctgaccagcagcgcatcaagttcatcaacatgaacgggcttatggccgaccccatgaaggtgtacaaagaccgccaggtcatgaacatgtggagtgagcaggagaaggagaccttccgggagaagttcatgcagcatcccaagaactttggcctgatcgcatcattcctggagaggaagacagtggctgagtgcgtcctctattactacctgactaagaagaatgagaactataagagcctggtgagacggagctatcggcgccgcggcaagagccagcagcagcaacaacagcagcagcagcagcagcagcagcagcagcagcagcccatgccccgcagcagccaggaggagaaagatgagaaggagaaggaaaaggaggcggagaaggaggaggagaagccggaggtggagaacgacaaggaagacctcctcaaggagaagacagacgacacctcaggggaggacaacgacgagaaggaggctgtggcctccaaaggccgcaaaactgccaacagccagggaagacgcaaaggccgcatcacccgctcaatggctaatgaggccaacagcgaggaggccatcaccccccagcagagcgccgagctggcctccatggagctgaatgagagttctcgctggacagaagaagaaatggaaacagccaagaaaggtctcctggaacacggccgcaactggtcggccatcgcccggatggtgggctccaagactgtgtcgcagtgtaagaacttctacttcaactacaagaagaggcagaacctcgatgagatcttgcagcagcacaagctgaagatggagaaggagaggaacgcgcggaggaagaagaagaaagcgccggcggcggccagcgaggaggctgcattcccgcccgtggtggaggatgaggagatggaggcgtcgggcgtgagcggaaatgaggaggagatggtggaggaggctgaagccttacatgcctctgggaatgaggtgcccagaggggaatgcagtggcccagccactgtcaacaacagctcagacaccgagagcatcccctctcctcacactgaggccgccaaggacacagggcagaatgggcccaagcccccagccaccctgggcgccgacgggccacccccagggccacccaccccaccaccggaggacatcccggcccccactgagcccaccccggcctctgaagccaccggagcccctacgcccccaccagcacccccatcgccctctgcacctcctcctgtggtccccaaggaggagaaggaggaggagaccgcagcagcgcccccagtggaggagggggaggagcagaagccccccgcggctgaggagctggcagtggacacagggaaggccgaggagcccgtcaagagcgagtgcacggaggaagccgaggaggggccggccaagggcaaggacgcggaggccgctgaggccacggccgagggggcgctcaaggcagagaagaaggagggcgggagcggcagggccaccacagccaagagctcgggcgccccccaggacagcgactccagtgctacctgcagtgcagacgaggtggatgaggccgagggcggcgacaagaaccggctgctgtccccaaggcccagcctcctcaccccgactggcgacccccgggccaatgcctcaccccagaagccactggacctgaagcagctgaagcagcgagcggctgccatcccccccatccaggtcaccaaagtccatgagcccccccgggaggacgcagctcccaccaagccagctcccccagccccaccgccaccgcaaaacctgcagccggagagcgacgcccctcagcagcctggcagcagcccccggggcaagagcaggagcccggcaccccccgccgacaaggaggccttcgcagccgaggcccagaagctgcctggggaccccccttgctggacttccggcctgcccttccccgtgcccccccgtgaggtgatcaaggcctccccgcatgccccggacccctcagccttctcctacgctccacctggtcacccactgcccctgggcctccatgacactgcccggcccgtcctgccgcgcccacccaccatctccaacccgcctcccctcatctcctctgccaagcaccccagcgtcctcgagaggcaaataggtgccatctcccaaggaatgtcggtccagctccacgtcccgtactcagagcatgccaaggccccggtgggccctgtcaccatggggctgcccctgcccatggaccccaaaaagctggcacccttcagcggagtgaagcaggagcagctgtccccacggggccaggctgggccaccggagagcctgggggtgcccacagcccaggaggcgtccgtgctgagagggacagctctgggctcagttccgggcggaagcatcaccaaaggcattcccagcacacgggtgccctcggacagcgccatcacataccgcggctccatcacccacggcacgccagctgacgtcctgtacaagggcaccatcaccaggatcatcggcgaggacagcccgagtcgcttggaccgcggccgggaggacagcctgcccaagggccacgtcatctacgaaggcaagaagggccacgtcttgtcctatgagggtggcatgtctgtgacccagtgctccaaggaggacggcagaagcagctcaggacccccccatgagacggccgcccccaagcgcacctatgacatgatggagggccgcgtgggcagagccatctcctcagccagcatcgaaggtctcatgggccgtgccatcccgccggagcgacacagcccccaccacctcaaagagcagcaccacatccgcgggtccatcacacaagggatccctcggtcctacgtggaggcacaggaggactacctgcgtcgggaggccaagctcctaaagcgggagggcacgcctccgcccccaccgccctcacgggacctgaccgaggcctacaagacgcaggccctgggccccctgaagctgaagccggcccatgagggcctggtggccacggtgaaggaggcgggccgctccatccatgagatcccgcgcgaggagctgcggcacacgcccgagctgcccctggccccgcggccgctcaaggagggctccatcacgcagggcaccccgctcaagtacgacaccggcgcgtccaccactggctccaaaaagcacgacgtacgctccctcatcggcagccccggccggacgttcccacccgtgcacccgctggatgtgatggccgacgcccgggcactggaacgtgcctgctacgaggagagcctgaagagccggccagggaccgccagcagctcggggggctccattgcgcgcggcgccccggtcattgtgcctgagctgggtaagccgcggcagagccccctgacctatgaggaccacggggcaccctttgccggccacctcccacgaggttcgcccgtgaccacgcgggagcccacgccgcgcctgcaggagggcagcctttcgtccagcaaggcatcccaggaccgaaagctgacgtcgacgcctcgtgagatcgccaagtccccgcacagcaccgtgcccgagcaccacccacaccccatctcgccctatgagcacctgcttcggggcgtgagtggcgtggacctgtatcgcagccacatccccctggccttcgaccccacctccataccccgcggcatccctctggacgcagccgctgcctactacctgccccgacacctggcccccaaccccacctacccgcacctgtacccaccctacctcatccgcggctaccccgacacggcggcgctggagaaccggcagaccatcatcaatgactacatcacctcgcagcagatgcaccacaacgcggccaccgccatggcccagcgagctgatatgctgaggggcctctcgccccgcgagtcctcgctggcactcaactacgctgcgggtccccgaggcatcatcgacctgtcccaagtgccacacctgcctgtgctcgtgcccccgacaccaggcaccccagccaccgccatggaccgccttgcctacctccccaccgcgccccagcccttcagcagccgccacagcagctccccactctccccaggaggtccaacacacttgacaaaaccaaccaccacgtcctcgtccgagcgggagcgagaccgggatcgagagcgggaccgggatcgggagcgggaaaagtccatcctcacgtccaccacgacggtggagcacgcacccatctggagacctggtacagagcagagcagcggcagcagcggcgggggtgggggcagcagcagccgccccgcctcccactcccatgcccaccagcactcgcccatctcccctcggacccaggatgccctccagcagagacccagtgtgcttcacaacacaggcatgaagggtatcatcaccgctgtggagcccagcacgcccacggtcctgaggtccacctccacctcctcacccgttcgcccggctgccacattcccacctgccacccactgcccactgggcggcaccctcgatggggtctaccctaccctcatggagcccgtcttgctgcccaaggaggccccccgggtcgcccggccagagcggccccgagcagacaccggccatgccttcctcgccaagcccccagcccgctccgggctggagcccgcctcctcccccagcaagggctcggagccccggcccctagtgcctcctgtctctggccacgccaccatcgcccgcacccctgcgaagaacctcgcacctcaccacgccagcccggacccgccggcgccacctgcctcggcctcggacccgcaccgggaaaagactcaaagtaaacccttttccatccaggaactggaactccgttctctgggttaccacggcagcagctacagccccgaaggggtggagcccgtcagccctgtgagctcacccagtctgacccacgacaaggggctccccaagcacctggaagagctcgacaagagccacctggagggggagctgcggcccaagcagccaggccccgtgaagcttggcggggaggccgcccacctcccacacctgcggccgctgcctgagagccagccctcgtccagcccgctgctccagaccgccccaggggtcaaaggtcaccagcgggtggtcaccctggcccagcacatcagtgaggtcatcacacaggactacacccggcaccacccacagcagctcagcgcacccctgcccgcccccctctactccttccctggggccagctgccccgtcctggacctccgccgcccacccagtgacctctacctcccgcccccggaccatggtgccccggcccgtggctccccccacagcgaagggggcaagaggtctccagagccaaacaagacgtcggtcttgggtggtggtgaggacggtattgaacctgtgtccccaccggagggcatgacggagccagggcactcccggagtgctgtgtacccgctgctgtaccgggatggggaacagacggagcccagcaggatgggctccaagtctccaggcaacaccagccagccgccagccttcttcagcaagctgaccgagagcaactccgccatggtcaagtccaagaagcaagagatcaacaagaagctgaacacccacaaccggaatgagcctgaatacaatatcagccagcctgggacggagatcttcaatatgcccgccatcaccggaacaggccttatgacctatagaagccaggcggtgcaggaacatgccagcaccaacatggggctggaggccataattagaaaggcactcatgggtaaatatgaccagtgggaagagtccccgccgctcagcgccaatgcttttaaccctctgaatgccagtgccagcctgcccgctgctatgcccataaccgctgctgacggacggagtgaccacacactcacctcgccaggtggcggcgggaaggccaaggtctctggcagacccagcagccgaaaagccaagtccccggccccgggcctggcatctggggaccggccaccctctgtctcctcagtgcactcggagggagactgcaaccgccggacgccgctcaccaaccgcgtgtgggaggacaggccctcgtccgcaggttccacgccattcccctacaaccccctgatcatgcggctgcaggcgggtgtcatggcttccccacccccaccgggcctccccgcgggcagcgggcccctcgctggcccccaccacgcctgggacgaggagcccaagccactgctctgctcgcagtacgagacactctccgacagcgagtgactcagaacagggcgggggggggggcggtgtcaggtcccagcgagccacaggaacggccctgcaggagcagggcggctgccgactcccccaaccaaggaaggagcccctgagtccgcctgcgcctccatccatctgtccgtccagagccggcatccttgcctgtctaaagccttaactaagactcccgccccgggctggccctgtgcagaccttactcaggggatgtttacctggtgctcgggaagggaggggaaggggccggggagggggcacggcaggcgtgtggcagccacacgcaggcggccagggcggccagggacccaaagcaggatgaccacgcacctccacgccactgcctcccccgaatgcatttggaaccaaagtctaaactgagctcgcagcccccgcgccctccctccgcctcccatcccgcttagcgctctggacagatggacgcaggccctgtccagcccccagtgcgctcgttccggtccccacagactgccccagccaacgagattgctggaaaccaagtcaggccaggtgggcggacaaaagggccaggtgcggcctggggggaacggatgctccgaggactggactgtttttttcacacatcgttgccgcagcggtgggaaggaaaggcagatgtaaatgatgtgttggtttacagggtatatttttgataccttcaatgaattaattcagatgttttacgcaaggaaggacttacccagtattactgctgctgtgcttttgatctctgcttaccgttcaagaggcgtgtgcaggccgacagtcggtgaccccatcactcgcaggaccaagggggcggggactgctggctcacgccccgctgtgtcctccctccctcccttccttgggcagaatgaattcgatgcgtattctgtggccgccatctgcgcagggtggtggtattctgtcatttacacacgtcgttctaattaaaaagcgaattatactcca

SEQ ID NO: 3857 - DNA, 705 bp, Homo sapiens
tcggacgggcgcggagacgcttctggaaggaacgccgcgatggctgcgcagggagagccccaggtccagttcaaacttgtattggttggtgatggtggtactggaaaaacgaccttcgtgaaacgtcatttgactggtgaatttgagaagaagtatgtagccaccttgggtgttgaggttcatcccctagtgttccacaccaacagaggacctattaagttcaatgtatgggacacagccggccaggagaaattcggtggactgagagatggctattatatccaagcccagtgtgccatcataatgtttgatgtaacatcgagagttacttacaagaatgtgcctaactggcatagagatctggtacgagtgtgtgaaaacatccccattgtgttgtgtggcaacaaagtggatattaaggacaggaaagtgaaggcgaaatccattgtcttccaccgaaagaagaatcttcagtactacgacatttctgccaaaagtaactacaactttgaaaagcccttcctctggcttgctaggaagctcattggagaccctaacttggaatttgttgccatgcctgctctcccggatgaggatgatgacctgtgagaatgaagctggagcccagcgtcagaagtctagttttataggcagctgtcctgtgatgtcagcggtgcagcgtgtgtgccacctcattattatcta

SEQ ID NO: 3858 - protein, 109 aa, Homo sapiens
MAAQGQPQVQFKLVLVGDGGTGKTTFVKHHLTGEFEKKYVATLGVEVHPLVFHTNRGPVKFNVWDTAGLEKFSGLRDGYYIQAQSTIIVFDVTSRVTYKNVPNWHRDLV

SEQ ID NO: 3859 - DNA, 6508 bp, Homo sapiens
cttggaaatgacccgccacacctgaagcctgcaggtgctgaggccacattcgatcagacccaagctttgggagaccgctggggaaatttcccacttcctctcctgagaccaggaactcagcagagaaactttgtggaaaatgaactgaaggatgccacccagggagagtatctcctgagatcccatcatgcaggccttcccacaagggcccggcagcatgacaaggtgaaggcagagtatgtgcatctcaaccatccgctcaccctcgtgaccagagagcgcgatttggccgtgaaggagaaacaccagctccaagccaagctggagaacctagaacaggtcctgaagcatatgcgagaggcggctgaacggcggcagcagctgcagttggagcatgaccaggccctggctgttctcagtgccaagcagcaggaaattgaccttctgcagaagtccaaggttcgagagctggaagagaaatgccggactcaaagtgagcagttcaacctgctgtcccgggacctggagaagttccggcagcacgctggcaagattgacctgctgggtggcagcgcggtggcccccctggacatctccacggcccccagcaagcctttcccacagttcatgaatggcctagccacctccctcggcaaaggtcaggagagcgctattggaggcagctctgcgatcggtgaatatatccggccccttccgcagcctggtgacaggccggagcctctgtccgccaagcccaccttcctgtcgagatccggtagcgcaagatgcagatctgagtcagacatggagaatgaacggaattccaatacctccaagcagagatactcggggaaggtccacctctgtgttgcccgctatagttacaaccccttcgatggaccgaacgagaaccccgaagctgagctgcccctcacggcgggaaaatacctctacgtctatggagacatggatgaggatgggttctatgaaggagagctcctcgatggccagaggggtctggtgccctccaacttcgtggactttgtgcaggacaacgagtcgcggttggcaagcacgctggggaacgagcaggatcagaacttcatcaaccattccggcatcggcctggagggagagcacatcctggacctccactccccaacccacatagatgcgggcatcaccgacaacagtgccgggaccctggacgtgaacatcgacgacatcggagaagacatcgtgccttaccctagaaaaatcaccctcatcaaacaactcgccaaaagtgttattgtgggctgggagcccccggcggtgccaccaggatggggaacggtgagcagctacaacgtcctggtggacaaggagacacgcatgaacctcacgctggggagcagaactaaagccctcatcgagaagctcaacatggcagcctgcacctaccgcatctccgtgcagtgcgtcaccagcaggggcagctcggatgagctgcagtgcacgctgctggtgggcaaggacgtggtggtggccccctcccacctgcgggtggacaacatcacgcagatctccgcccagctctcctggctacccaccaacagcaactacagccacgtcatcttcctcaacgaggaggagttcgacatcgtcaaggccgccaggtacaagtaccagttcttcaatctcaggcccaacatggcctataaggtgaaggttctggccaaaccccaccagatgccgtggcagctcccgctggagcaaagggagaagaaggaggcctttgtggagttctccacgttgcctgcaggacccccagcacccccacaagatgttaccgtccaggctggggtgacccccgccaccatccgggtctcctggagaccacctgtgctgacgcccaccgggctgtccaatggcgcaaacgttaccggctacggcgtgtatgccaaagggcagagggtggctgaagtcatcttccccacggcagacagcacggccgtggagcttgtgcggctgcggagcctggaggccaagggcgtgaccgtgcggaccctctccgcccagggcgagtccgtggactctgcagttgctgccgttccccccgagctcctggtgcctcctaccccccacccgagacctgcaccccaatcaaagccattagcaagttctggagtccccgaaaccaaagacgagcacctgggtccccacgccaggatggatgaggcctgggagcagagccgtgcacctggccctgtgcatgggcacatgctggagccgcccgtgggccccggaaggcggtcgccctcacccagccgcatcctgccacagccacagggcaccccggtgtccaccaccgtcgccaaggccatggcccgggaggccgcgcagagggtggccgagagcagcaggttagagaaaaggagcgtcttcctagagagaagcagcgcggggcagtacgccgcctcagacgaggaggacgcctatgactctccagacttcaagaggaggggcgcctcggtggacgacttcctgaaaggctctgaacttggcaagcagccgcactgttgccatggagacgagtaccacacagagagcagccgggggtctgacctctcagacatcatggaggaggacgaggaggagctgtattctgaaatgcagctggaagatgggggaaggaggcggcccagcggcacgtcccacaatgccctcaagattttagggaacccagcctctgcaggacgggtggatcacatgggccggaggtttccccgtggcagcgctggtcctcagaggtcccggcccgtgacagtcccatccatcgacgattacgggcgagaccgcctttctccagacttctatgaagagtcagaaactgaccctggtgccgaagagctcccggcccggatctttgtggctctctttgactacgacccgctcaccatgtccccaaacccagatgctgcagaggaggagcttccctttaaagaaggccagatcatcaaggtttatggtgataaagacgctgatggattctaccgtggggaaacctgtgcccggcttggccttattccttgtaacatggtctctgagatacaagcagatgatgaggagatgatggatcagcttcttagacagggctttctccctctgaatacacctgtggagaaaatagagagaagcaggagaagtggcaggcgtcattcggtatcgacgcggagaatggtggccctgtatgactacgaccccagagaaagctcgcccaacgtcgatgtcgaggccgaacttacattttgcacaggagatattattacagtttttggtgaaattgatgaagatggattttattatggggagctgaatgggcagaaaggccttgtgccctcaaacttcttggaagaagtgcctgatgacgtagaagtctatctttctgatgctccatcccactactctcaagatacgccaatgcgctcaaaggcaaaaaggaagaagagtgttcatttcacaccttaatcaggcaatgtagccttcacgtaagtgagcaactgaagataccgataaagataccaacttaagctaccttaaccgggccagtgtggtagacttaaggcttcattgtggggttaaaaaaaaaaaaagatacaaagaaatatgtctcaaaaaactattggacctaaataattagaatattacttggtctcagttgtaaagcaactgaatttatagtgaagcaaatcatctttaataatcatttcctactatttgcattaagaatatttgaaaggccaacattgggaacatatttcttaacaagctaactgtgtgtttacatagagagagctgcatattgcattgttagccactcttggaaaaagcacaacctaacaaacatgtttactataggaagctttactttagaaacttaacccaaggtcaagcagatgagtagtgaacacaggtgatcgagtgttggctctgaacactccaaacactggctcgagtggccagaacgtgttttccttaagtaaccctgcctctaccttacgagagagctatgctcctcctcaaagcacaatcatcctgtgacagaagttgctgcaacacgcgtttgttgttggtataccaatgcaatactaagttgatgaagcacgcagctcaaatgatcacattagatggaatagatggtatcttcaggtgtactttgggatgctttactaggtgttttccattagaattagaccttgattttaaatccaagcaagcttgaagccccttggcttacagcatttgcctgctgaatactaaacactcacatggcaagagttgctctggagaggtagggccagaggaatgctgctgcactgccaactcaggcacatgcttagctgtaaagggaagcgaggtgaagtcgtcctgcagcgtattagagtaaaagtctacccctctgaagcactattaagcgcttaacgtatatttaaatactaccatgtgctatctactgaggaagattcatgttcaattatttggaaataatgcaagcatccactaagggcctttaagctttctttgattataattaaggttcattttagtttttttttttctttcaaccagtgtgccatctccaatatttctatagtataccaaccaccccaggaatgcactttaacaatatcaggattttatataaccaaatagtttcaaatacaacaaaattccctttatgaactttcgctttttaagactactgatgggtactcggccaactttactatcaacctaatttcagatcatgtctcccctgcccttagtcttcatttatgaagtgaattattacctgccttagctttgccaaagcaacggccaccccgcactccctcgagacagagaaacggaacccacacatttatgtctggggcctctctctggcgtgctgtgggagaggacctttgcttctcatggcatacttcaacaactgaaagaacaaatgaacccccctgacctttcctggtgggaaacggggacagtacgatgttaccaagtgaattctgttgttggcgctcacacactcaataaactgtaacactgtacctactaggttcctcctgagggttcaggtacagcaaggagagctccatcccccacagtccatctccattcggggtcacctacgtcatctatgggttctggtagtcctgggagaggcagggaaatgtcctcgaaaaagaaaaaggggctgctttccaaaggcaagaaactgctgaaaaagctgggtgcagtgaaatgattcatgtgcttccggacaactgccaaatctatgtaattttctttaattccaaactagggctttcatgactcaagtacttcctaaaaaaacccaatcttctcccctgacaccagtagagaaatgcacttttgcactaccaaccactttaaaccaaccacgagaacaaagaggagcggttgctctctgtcaccgctggcagtctgctctcattgtccaagctctgatttgggaggtgggaggggacgtcttattaacaaacgggggcgcatagctatcacctgtagctccctccctacctgtaattccagtctttgtgcatttgtcatctgcccttaaaggaatgattttcaacctttctcccttctcaaaatgcttgcctcataatgcataactttcactttgactctggtcttgaaattcctagtttaattcgccttgatgttctgccttataaatgcacaatgatttgtactgtctaataaaaacagtgtatactttgtatgtgtcgtgcattcagtggtcttcatcctgacacagtggtttgagatcaagttgtacaggctgtgcattttaagatactagtttcagtctttcaaagccagccaggctacacacagaaaatgtttactcaatcattcaaaaaagagaaaaggagagaaagtaactttgtttggtaaagcaccagtactccaaccttccagaaagccgattatcttcattgcttttaatgttctattctgtggcatatggttttctgttactttcgttgtcaaaatgccatacccaaatacacagcaatgaatggcacacaagtaatccacataatgcataagccacaccaaaaccagactcaatttaaatctgctccaaatgagtccatacccatcttcatcattggcatttgaacaaaagacttacttacaaagttgctggcagatgtatttgatggttactcttttgtaattcttgtccacttgtaaattgtttttactctttatacatacttttcagactgcctttcttttgtaatttatggacggtttataaatgaatgacaaagctttccccattgtgtcttcaaaaacgctattataaattgtaatataatagtatgtggtagatttattattaaaggaaatccatgtgtggttaagctctgtgtgggtgtgtgcatgtgcacagttagtgtaaaatattttctagaaataaaatttgttattttat

SEQ ID NO: 3860 - protein, 1052 aa, Homo sapiens
MREAAERRQQLQLEHDQALAVLSAKQQEIDLLQKSKVRELEEKCRTQSEQFNLLSRDLEKFRQHAGKIDLLGGSAVAPLDISTAPSKPFPQFMNGLATSLGKGQESAIGGSSAIGEYIRPLPQPGDRPEPLSAKPTFLSRSGSARCRSESDMENERNSNTSKQRYSGKVHLCVARYSYNPFDGPNENPEAELPLTAGKYLYVYGDMDEDGFYEGELLDGQRGLVPSNFVDFVQDNESRLASTLGNEQDQNFINHSGIGLEGEHILDLHSPTHIDAGITDNSAGTLDVNIDDIGEDIVPYPRKITLIKQLAKSVIVGWEPPAVPPGWGTVSSYNVLVDKETRMNLTLGSRTKALIEKLNMAACTYRISVQCVTSRGSSDELQCTLLVGKDVVVAPSHLRVDNITQISAQLSWLPTNSNYSHVIFLNEEEFDIVKAARYKYQFFNLRPNMAYKVKVLAKPHQMPWQLPLEQREKKEAFVEFSTLPAGPPAPPQDVTVQAGVTPATIRVSWRPPVLTPTGLSNGANVTGYGVYAKGQRVAEVIFPTADSTAVELVRLRSLEAKGVTVRTLSAQGESVDSAVAAVPPELLVPPTPHPRPAPQSKPLASSGVPETKDEHLGPHARMDEAWEQSRAPGPVHGHMLEPPVGPGRRSPSPSRILPQPQGTPVSTTVAKAMAREAAQRVAESSRLEKRSVFLERSSAGQYAASDEEDAYDSPDFKRRGASVDDFLKGSELGKQPHCCHGDEYHTESSRGSDLSDIMEEDEEELYSEMQLEDGGRRRPSGTSHNALKILGNPASAGRVDHMGRRFPRGSAGPQRSRPVTVPSIDDYGRDRLSPDFYEESETDPGAEELPARIFVALFDYDPLTMSPNPDAAEEELPFKEGQIIKVYGDKDADGFYRGETCARLGLIPCNMVSEIQADDEEMMDQLLRQGFLPLNTPVEKIERSRRSGRRHSVSTRRMVALYDYDPRESSPNVDVEAELTFCTGDIITVFGEIDEDGFYYGELNGQKGLVPSNFLEEVPDDVEVYLSDAPSHYSQDTPMRSKAKRKKSVHFTP

SEQ ID NO: 3861 - DNA, 2262 bp, Homo sapiens
ggcggtgttgaggttgggtacgggatgcggggtctttgactgaaggggtaggccaagtggaggtatcagggacgtcgcgcggcacagaagaggaccagcctggacgccggggacgctgtcatgtacggcgcgagcgggggccgcgccaaacccgagaggaaaagcggcgcgaaggaggaggccgggccaggcggtgccggcggtgggggcagccgagtggagctcttggttttcggctatgcctgcaagctgttccgggacgacgagcgggccctggctcaggaacagggacagcacctcatcccctggatgggggaccacaagatcctcatcgacagatatgatggacgtggtcacctgcatgacctttctgagtacgatgctgagtattccacgtggaacagagattatcagctgtctgaagaggaggcgcgaatagaggccctgtgtgatgaagagaggtatttagccttgcatacggacttgcttgaggaggaggcaaggcaagaggaagaatacaagcgattgagtgaagcactagcagaggatgggagctacaatgccgtggggttcacttacggtagcgactattacgacccgtcagagccgacggaggaggaggagccttccaaacagagagaaaaaaatgaggccgaaaatttagaggaaaatgaagagcccttcgttgcccccttaggattgagcgtcccgtctgacgtggagttgccaccaaccgctaaaatgcacgccatcatcgagcgcacggccagcttcgtgtgcaggcagggagcacagtttgagatcatgctgaaggccaagcaggcccggaactcccagtttgactttctgcgcttcgaccactacctcaacccctactataagttcatccagaaagccatgaaagagggacgctacactgtcctggcagaaaacaaaagtgacgagaaaaaaaaatcaggagtcagctctgacaatgaagatgatgatgatgaagaagatgggaattaccttcatccctctctctttgcctccaagaagtgtaaccgccttgaagagctgatgaagcccttgaaggtagtggacccagatcatcccctcgcagcacttgttcgtaaggcacaggctgacagttccactcccaccccacacaacgcagacggtgcgcctgtgcagccctcccaggtggagtacacggcagactcgaccgtggcagccatgtattacagctactacatgctaccggacggcacttactgcctggcgccgcccctcccggaatcgacgtgactacttactacagcacccttcctgctggcgtgaccgtgtctaactcccctggagtgacgaccaccgccccaccacctcctgggaccacaccactaccgcccccaaccacagcagagactagcagcggggccacctccacaaccaccaccacaagtgcacttgcccccgtggccgccatcatccccccgccccccgacgtccagcccgtgattgacaagctggccgagtatgtcgccaggaacggcctgaagttcgagaccagtgttcgtgccaagaatgatcaaagatttgagttcctgcagccgtggcaccagtataatgcttattatgagtttaagaagcagttcttcctccagaaagaagggggcgatagcatgcaggctgtgtctgcaccagaagaggctcccacagactctgctcccgagaagccaagtgatgctggggaggatggcgcgcctgaagacgcagccgaggtgggagcacgggcaggctcaggcgggaagaaggaggcatcgtccagtaagaccgtcccggacgggaagctggtgaaagcttcctttgctccaataagctttgcaatcaaggccaaagaaaatgatctgcttcccctggaaaaaaatcgtgttaagctagatgatgacagtgatgatgatgaagaaagcaaagaaggccaagaaagttctagtagtgctgcaaacactaacccagcagttgccccaccctgtgtagttgttgaggagaagaagcctcaacttacccaggaggagctagaagcaaagcaagcaaagcaaaagctggaagatcgcctcgcagctgctgcccgggaaaagctggcccaggcgtctaaggagtcaaaagagaaacagcttcaagcagaacgtaaaaggaaagcggcgttatttttacagaccctcaaaaatcctctgccggaagcagaagctgggaaaattgaggagagtcctttcagtgtcgagg

SEQ ID NO: 3862 - DNA, 404 bp, Homo sapiens
gtccgcaatgttgccagtgtctgtctgcagattggctacccaactgttgcatcagtaccccattctatcatcaacgggtacaaacgagtcctggccttgtctgtggagacggattacaccttcccactcgctgaaaaggtcaaggccttcttggctgatccatctgcctttgtggctgctgcccctgtggctgctgccaccacagctgctcctgctgctgctgcagccccagctaaggttgaagccaaggaagagtcggaggagtcggacgaggatatgggatttggtctctttgactaatcaccaaaaagcaaccaacttagccagctttatttgcaaaacaaggaaataaaggcttacttctttaaaaaaaaaaaaaaaaaaaaaaaaaaaaaaaaaaaaaa

SEQ ID NO: 3863 - protein, 114 aa, Homo sapiens
MLPVSVCRLATQLLHQYPILSSTGTNESWPCLWRRITPSHSLKRSRPSWLIHLPLWLLPLWLLPPQLLLLLLQPQLRLKPRKSRRSRTRIWDLVSLTNHQKATNLASFICKTRK

SEQ ID NO: 3864 - DNA, 5050 bp, Homo sapiens
cgaaggggggtgggccgggggaggggaggttcgttccgcggagcgcagccagaaccgggaccaagaatcgccttcagccctgtctggtgcatccttggcagaaagtgaggaggaaaacacccccattgttagatgaggtcttaatcatggaacatttgaagtcacgtaaagaaggttctttggcatggacacaagttcagtgggaggattagaattgactgatcagactcctgttttattagggagtacggccatggcaactagtctcacgaatgtaggaaactcatttagtggtccagctaatcctttagtgtctagatctaataagtttcagaactcgtcagtggaagatgatgatgatgttgtttttatcgaacctgtacaacctcccccaccttctgtaccagtggtagctgatcaaagaaccataacatttacatcatcaaaaaatgaagaactacaaggaaatgattccaaaattactccttcctcaaaagagttggcatctcagaagggaagtgtaagtgagacaattgtcattgatgatgaagaggacatggaaacaaatcaagggcaagagaaaaattcctccaattttattgaacgaagacctcctgagactaaaaacagaaccaatgatgtggatttctccacttccagtttttcaagaagtaaggtaaatgcaggaatgggtaatagtggtatcaccacagaaccagactctgaaattcagattgctaatgttacaactttagaaacaggtgtaagctctgtgaatgatggccaattagaaaatactgacgggcgagatatgaacttaatgattacacatgtaacatcactgcagaataccaacttgggagatgtctctaacggactgcagtcaagtaattttggtgttaatatacaaacatacaccccatctttaacttcacagaccaagactggagtaggaccttttaatcctggtagaatgaatgtggcaggagacgtttttcagaatggagaatctgcaactcatcataatcctgattcttggatctcccagtcagcttcatttccccgtaatcagaaacaaccaggggtggactctttatcaccagtggcctcacttcctaaacagattttccagccgtctgtccaacagcagcctactaaaccagttaaagtcacttgtgcaaactgcaaaaaacctttacagaagggccagacagcttatcaacgaaaaggatcagctcacctcttttgttctaccacctgcctttcttccttctcccacaagcctgctccaaagaaactctgtgttatgtgtaaaaaagatataactacaatgaaaggaaccattgttgctcaagtggattcaagtgagtccttccaggaattctgtagtacatcttgtttatctctctatgaagacaaacagaatcctactaaaggagctctaaataaatcaagatgtacaatctgtggtaaactaactgagattcgccatgaagtcagctttaaaaatatgactcataagctgtgcagtgaccactgctttaatagatatagaatggccaatggtttaataatgaattgctgtgaacagtgtggagagtacttgcccagtaaaggtgctggaaataatgttctggtgattgatggtcaacagaaaagattttgctgtcaaagttgtgtcagtgaatacaaacaggtaggtagccatccaagcttcctgaaggaggttcgagatcacatgcaggactctttcttaatgcagcctgagaaatatggaaaactgacaacttgtactggttgccgaacacagtgcaggttttttgatatgactcagtgtataggtcctaatggatatatggagccatattgttcaactgcttgtatgaacagtcacaagacaaaatatgcaaaatcacaaagtttgggaattatttgccatttttgtaagcgaaactctttacctcaataccaagccacaatgcctgatggaaaactgtacaacttttgcaattccagttgtgtggctaaatttcaggctctaagtatgcagtcatctccaaatggccagtttgtagcgccaagtgatattcagttgaaatgcaactactgcaaaaattccttttgttcaaaaccagaaatcctggaatgggagaacaaagtgcatcagttctgcagcaaaacttgttcagatgactataagaagttgcattgcatagttacatattgcgaatactgtcaagaggagaagactcttcatgaaacagtaaatttctctggcgttaagagacctttctgtagtgaaggctgcaaattattatacaaacaggattttgccagacgtttaggattgagatgtgttacttgcaactattgttctcagctatgtaagaagggagcaactaaagaactcgatggtgttgtgagagatttctgcagtgaagattgctgtaaaaaatttcaggattggtactacaaggctgcaaggtgtgactgttgtaaatctcaaggaactcttaaagagcgagttcagtggcgtggggaaatgaaacatttctgtgatcaacattgcttactgcgtttctactgtcaacaaaatgagcccaacatgacaactcagaaaggacctgaaaacttacattatgatcagggttgtcagacatctcgaaccaaaatgacaggttcagcaccacccccttctccaacacctaacaaagagatgaagaacaaagcagttctttgcaaacctttaacaatgacaaaagctacttactgtaaacctcacatgcagaccaaatcttgtcagacagatgatacttggaggacagaatatgttccagtgcctatccctgtgcctgtgtatatcccagttcctatgcacatgtacagtcagaatattcctgttcctactacagttcctgttcctgtgccagttcctgtttttctgcctgctccattggacagcagtgagaagattcctgcagcaattgaggagctaaaaagcaaggtttcttcagatgctcttgatacagagttgcttacaatgacggatatgatgagtgaagacgaggggaaaacagagacaaccaacatcaacagtgtaattattgaaacagatataattggttcagaccttttgaagaactctgacccagagacacagtccagcatgcctgatgtaccatatgaaccagatttggatatcgaaatagattttcccagagctgctgaggagcttgatatggaaaatgaatttttattaccacctgtttttggcgaagaatatgaggaacagcccagacctcgatctaaaaaaaagggagccaagagaaaggctgtatcaggataccagtctcatgatgatagttctgacaattcagaatgcagctttcctttcaaatatacgtatggcgtaaatgcatggaaacactgggtcaaaactaggcaacttgatgaagatcttctggtattagatgagttaaaatcttctaaatcagtaaagttaaaagaggatctactctctcacaccacagctgagcttaactatgggttagctcattttgtcaatgagatccgacggccaaatggagagaattatgcacctgacagcatctattacctttgccttggaatacaggagtatttgtgtggaagtaatcgaaaagacaacatatttattgatcctggataccaaacatttgagcaagaattgaataaaatactgcgaagctggcaaccaagcatacttccagatgggtcaatattctctcgagttgaagaagactatctctggaggataaaacaactaggatcacactctccagtagctcttctgaatacactgttctactttaacactaagtattttggcctgaaaacagtggaacaacacttaagactttcctttggcactgtgtttaggcattggaaaaaaaatcctttaacgatggaaaacaaagcgtgtcttcgataccaagtgtcttccttgtgtggaacagataatgaagataaaattactactggaaaaagaaaacatgaagatgatgagccagtatttgaacaaattgaaaacacagccaatccttccagatgtcctgtgaaaatgtttgaatgctacttgtctaaaagtccacagaatcttaatcagaggatggatgttttttatttgcaaccagaatgctctagttctacagatagccctgtctggtatacgtctacttcactggaccgaaacaccttggaaaatatgcttgtacgggttcttctagtaaaagatatttatgataaagacaattatgaactggatgaagacacagactaaaaaggaacgttgcagaagcaatcgggataaaacagcattagatagtcatgctgctagatctttattatggaaaacatttcaagtttactccttctgttttgagttttgtagcagtgtacccacgctgggtattaccatgtaaataatctgtgagtgaaagttgccattattctatgtagtggttttaggatacttaacaaatacattcaaattctttttttattattatttatttgattaggtatgtttgtaactttttacattacagaatatgaatgagaatgtgccatgtataatttttttcttgtagtaagaaacatccatattgcacaactctactgttgcaaagcttccttggaagggggctcttttactgggttcttaaccagatggttgtgtatgggtagcactactaaaagtttagaacttgcagtgtctttcggaatttttaaaataaactgtaaactaataggctggggtttttgttttgttttggggttttgttttgtttggttttacattttagttactgaagccttacaaggttatgtagagagataccatcttctgtaccaaaaatagacaagagaatgctgtcaatattggtgtactgtaatgtgaatctatgctggtgaaaacaattttttgttccccttattaaaaccttagtgtccttttctcatttgtggctttctgcatcacccaatcaataaaaaacaaatatatatatgt

SEQ ID NO: 3865 - protein, 1377 aa, Homo sapiens
MDTSSVGGLELTDQTPVLLGSTAMATSLTNVGNSFSGPANPLVSRSNKFQNSSVEDDDDVVFIEPVQPPPPSVPVVADQRTITFTSSKNEELQGNDSKITPSSKELASQKGSVSETIVIDDEEDMETNQGQEKNSSNFIERRPPETKNRTNDVDFSTSSFSRSKVNAGMGNSGITTEPDSEIQIANVTTLETGVSSVNDGQLENTDGRDMNLMITHVTSLQNTNLGDVSNGLQSSNFGVNIQTYTPSLTSQTKTGVGPFNPGRMNVAGDVFQNGESATHHNPDSWISQSASFPRNQKQPGVDSLSPVASLPKQIFQPSVQQQPTKPVKVTCANCKKPLQKGQTAYQRKGSAHLFCSTTCLSSFSHKPAPKKLCVMCKKDITTMKGTIVAQVDSSESFQEFCSTSCLSLYEDKQNPTKGALNKSRCTICGKLTEIRHEVSFKNMTHKLCSDHCFNRYRMANGLIMNCCEQCGEYLPSKGAGNNVLVIDGQQKRFCCQSCVSEYKQVGSHPSFLKEVRDHMQDSFLMQPEKYGKLTTCTGCRTQCRFFDMTQCIGPNGYMEPYCSTACMNSHKTKYAKSQSLGIICHFCKRNSLPQYQATMPDGKLYNFCNSSCVAKFQALSMQSSPNGQFVAPSDIQLKCNYCKNSFCSKPEILEWENKVHQFCSKTCSDDYKKLHCIVTYCEYCQEEKTLHETVNFSGVKRPFCSEGCKLLYKQDFARRLGLRCVTCNYCSQLCKKGATKELDGVVRDFCSEDCCKKFQDWYYKAARCDCCKSQGTLKERVQWRGEMKHFCDQHCLLRFYCQQNEPNMTTQKGPENLHYDQGCQTSRTKMTGSAPPPSPTPNKEMKNKAVLCKPLTMTKATYCKPHMQTKSCQTDDTWRTEYVPVPIPVPVYIPVPMHMYSQNIPVPTTVPVPVPVPVFLPAPLDSSEKIPAAIEELKSKVSSDALDTELLTMTDMMSEDEGKTETTNINSVIIETDIIGSDLLKNSDPETQSSMPDVPYEPDLDIEIDFPRAAEELDMENEFLLPPVFGEEYEEQPRPRSKKKGAKRKAVSGYQSHDDSSDNSECSFPFKYTYGVNAWKHWVKTRQLDEDLLVLDELKSSKSVKLKEDLLSHTTAELNYGLAHFVNEIRRPNGENYAPDSIYYLCLGIQEYLCGSNRKDNIFIDPGYQTFEQELNKILRSWQPSILPDGSIFSRVEEDYLWRIKQLGSHSPVALLNTLFYFNTKYFGLKTVEQHLRLSFGTVFRHWKKNPLTMENKACLRYQVSSLCGTDNEDKITTGKRKHEDDEPVFEQIENTANPSRCPVKMFECYLSKSPQNLNQRMDVFYLQPECSSSTDSPVWYTSTSLDRNTLENMLVRVLLVKDIYDKDNYELDEDTD

SEQ ID NO: 3866 - DNA, 681 bp, Homo sapiens
atggattggggcacgctgcagacgatcctggggggtgtgaacaaacactccaccagcattggaaagatctggctcaccgtcctcttcatttttcgcattatgatcctcgttgtggctgcaaaggaggtgtggggagatgagcaggccgactttgtctgcaacaccctgcagccaggctgcaagaacgtgtgctacgatcactacttccccatctcccacatccggctatgggccctgcagctgatcttcgtgtccagcccagcgctcctagtggccatgcacgtggcctaccggagacatgagaagaagaggaagttcatcaagggggagataaagagtgaatttaaggacatcgaggagatcaaaacccagaaggtccgcatcgaaggctccctgtggtggacctacacaagcagcatcttcttccgggtcatcttcgaagccgccttcatgtacgtcttctatgtcatgtacgacggcttctccatgcagcggctggtgaagtgcaacgcctggccttgtcccaacactgtggactgctttgtgtcccggcccacggagaagactgtcttcacagtgttcatgattgcagtgtctggaatttgcatcctgctgaatgtcactgaattgtgttatttgctaattagatattgttctgggaagtcaaaaaagccagtttaa

SEQ ID NO: 3867 - protein, 226 aa, Homo sapiens
MDWGTLQTILGGVNKHSTSIGKIWLTVLFIFRIMILVVAAKEVWGDEQADFVCNTLQPGCKNVCYDHYFPISHIRLWALQLIFVSSPALLVAMHVAYRRHEKKRKFIKGEIKSEFKDIEEIKTQKVRIEGSLWWTYTSSIFFRVIFEAAFMYVFYVMYDGFSMQRLVKCNAWPCPNTVDCFVSRPTEKTVFTVFMIAVSGICILLNVTELCYLLIRYCSGKSKKPV

SEQ ID NO: 3868 - DNA, 708 bp, Homo sapiens
cagaggggtccatagggcgttgttctggattccggtcgtaacttaaagggaaactttcacaatgtccggagcccttgatgtcctgcaaatgaaggaggaggatgtccttaagttccttgcagcaggaacccacttaggtggcaccaatcttgacttccagatggaacagtacatctataaaaggaaaagtgatggcatctatatcataaatctgaagaagacctgggagaagcttctggccgcttcactcctggaaccttcactaaccagatccaggcagccttccgggagccacggcttcttgtggttactgaccccagggctgacccaccagcctctcacggaggcgtcttatgttaacctacctaccattgctctgtgtaacagattctcctctgcgctatgtggacattgccatcccatgcaacaacaagggagctcgctcagtgggtttgatgtggtggatgctggctcgggaagttctgcgcatgcgtggcaccatttctcgtgaacacccatgggaggtcatgactgatctctacttctacagagatcctgaagagattgaaaaagaagagcaggctgctgctgaaaaggcggtgaccaaggaggaatttcagggtgaatggactgctccagctcctgagttcactgctactcagcctgaggttgcagactggtctgaaggtgtgcaggtgccctctgtgc

SEQ ID NO: 3869 - DNA, 597 bp, Homo sapiens
gggaaactttcacaatgtccggagcccttgatgtcctgcaaatgaaggaggaggatgtccttaagttccttgcagcaggaacccacttaggtggcaccaatcttgacttccagatggaacagtacatctataaaaggaaaagtgatggcatctatatcataaatctgaagaagacctgggagaagcttctgctggcagctcgtgctattgttgccattgaaaaccctgctgatgtcagtgttatatcctccaggaatactggccagagggctgtgctgaagtttgctgcggccactggagccactccaattgctggccgcttcactcctggaaccttcactaaccagatccaggtcttatgttaacctacctaccattgctctgtgtaacagattctcctctgcgctatgtggacattgccatcccatgcaacaacaagggagctcgctcagtgggtttgatgtggtggatgctggctcgggaagttctgcgcatgcgtggcaccatttctcgtgaacacccatgggaggtcatgactgatctctacttctacagagatcctgaagagattgaaaaagaagagcaggctgctgctga

SEQ ID NO: 3870 - DNA, 686 bp, Homo sapiens
atggaacagtacatctataaaaggaaaagtgatggcatctatatcataaatctgaagaagacctgggagaagcttctgctggcagctcgtgctattgttgccattgaaaaccctgctgatgtcagtgttatatcctccaggaatactggccagagggctgtgctgaagtttgctgcggccactggagccactccaattgctggccgcttcactcctggaaccttcactaaccagatccaggcagccttccgggagccacggcttcttgtggttactgaccccagggctgacccaccagcctctcacggaggcgtcttatgttaacctacctaccattgctctgtgtaacagattctcctctgcgctatgtggacattgccatcccatgcaacaacaagggagctcgctcagtgggtttgatgtggtggatgctggctcgggaagttctgcgcatgcgtggcaccatttctcgtgaacacccatgggaggtcatgactgatctctacttctacagagatcctgaagagatgggtgaatggactgctccagctcctgagttcactgctactcagcctgaggttgcagactggtctgaaggtgtgcaggtgccctctgtgcctattcagcagttccctactgaagactggagcgctcagcctgccacggaagactggtctgcagctccc

SEQ ID NO: 3871 - protein, 107 aa, Homo sapiens
MEQYIYKRKSDGIYIINLKKTWEKLLLAARAIVAIENPADVSVISSRNTGQRAVLKFAAATGATPIAGRFTPGTFTNQIQAAFREPRLLVVTDPRADPPASHGGVLC

SEQ ID NO: 3872 - DNA, 1315 bp, Homo sapiens
gcggcaggtgagtagctgtgcgaattcggttctctagggaactccttcttcgcctgctggccttacctgggctccccgcttctctggaggggaggcggtgcgggaactcccgtaggcgtgagctggagcgcgcgcccgctgctctctccaggtcccgccgcgccagttcgcctccgcaaagcccgtccctctcttccgcaggcaccatgttcctgactgcgctcctctggcgcggccgcattcccggccgtcagtggatcgggaagcaccggcggccgcggttcgtgtcgttgcgcgccaagcagaacatgatccgccgcctggagatcgaggcggagaaccattactggctgagcatgccctacatgacccgggagcaggagcgcggccacgccgcggtgcgcaggagggaggccttcgaggccataaaggcggccgccacttccaagttccccccgcatagattcattgcggaccagctcgaccatctcaatgtcaccaagaaatggtcctaatcctgagtcgtcacccttggattttatggatcacggagctgaccatctttacctggtcctggaactgaaaaactgtagcttgtgtgaaaatgagcctttggaccagtctttattaaaacaaacaaacatgagtagtctgcatatcgaatatctagagctctaaaccccccaatacttaaaagtctaattgctgtcctgtggtttcattagtctgataggaagatagggatttcctcagtcacagatgatattttgaaggaaagctgcaataaagccacaatgatttgaggtctttgcttaagtatgagatacttgatgggggctttatcatgcaacattagtttgcttaccttaagaattgcccaaaaatgaaagaaaatatgagcttttcagttaaacatactcctaaaaacattttccgggattttactactaaaattggacatttaagcgaagtaaaagaggccgggtgcggtggctcacgcctgtaatcccaacactttaggagtccaaggcgggcggatcacttgaggtcaggagttcaagaccagcttggccaaggtgataaaacccgtctctactaatacaaaaaaaattagctgggtatgttggtgcaggcttgcaatcccagctacttgggacgctgaggtgggaggatcgcctgaacctcagaggcagaggttgcaatgaagcggaggttgcagtgagccgagagcatgccgctgcactccagcctgggagactgcatctcaaaaaagaaaaataaacgaagtaaaagatatttatcagaaaaaaaaaaa

SEQ ID NO: 3873 - protein, 102 aa, Homo sapiens
MFLTALLWRGRIPGRQWIGKHRRPRFVSLRAKQNMIRRLEIEAENHYWLSMPYMTREQERGHAAVRRREAFEAIKAAATSKFPPHRFIADQLDHLNVTKKWS

SEQ ID NO: 3874 - DNA, 662 bp, Homo sapiens
ctcttcctaagccggcgctcggcgagttctcccaggagaaggccatgttcagttcgagcgccaagatcgtgaagcccaatgatgagaagccggacgagttcgagtccggcatctcccaggctcttctggagctggagatgaactcggacctcaaagctcagctcagggagctgaatattacggcagccaaggaaattgaacttggtggtggtcggaaagctatcataatctttgttcccattcctcaactgaaatctttccagaaaattcaagtccggctagtacgcgaattggagaaaaagttcagtgggaagcatgtcgtctttatcgttcagagaagaattctgcctaagccaactcgaaaaagccgtacaaaaaataagcaaaagcgtcccaggagccatactctgacagctgtgcacgatgccatccttgaggacttggtcttcccaagcgaaattgtgggcaagagaatccgcgtgaaactagatggcagccggctcataaaggttcatttggacaaagcacagcagaacaatgtggaacacaaggttgaaactttttctggtgtctataagaagctcacgggcaaggatgttaattttgaattcccagagtttcaattacaaacaaaaatgactacataaaaatatatattcaca

SEQ ID NO: 3875 - protein, 194 aa, Homo sapiens [sequence omitted]

SEQ ID NO: 3876 - DNA, 2392 bp, Homo sapiens
gcctgcgggcagccgtgccgagaatgaaccccagcacccccagctacccaacggcctcgctctacgtgggggacctccaccccgacgtgactgaggcgatgctctacgagaagttcagcccggcagggcccatcctctccatccggatctgcagggacttgatcaccagcggctcctccaactacgcgtatgtgaacttccagcatacgaaggacgcggagcatgctctggacaccatgaattttgatgttataaagggcaagccagtacgcatcatgtggtctcagcgtgatccatcacttcgaaaaagtggagtgggcaacatattcgttaaaaatctggataagtccattaataataaagcactgtatgatacagtttctgcttttggtaacatcctttcgtgtaacgtggtttgtgatgaaaatggttccaagggttatggatttgtacactttgagacacacgaagcagctgaaagagctattaaaaaaatgaacggaatgctcctaaatggtcgcaaagtatttgttggacaatttaagtctcgtaaagaacgagaagctgaacttggagctagggcaaaagagttccccaatgtttacatcaagaattttggagaagacatggatgatgagcgccttaaggatctctttggcaagttcgggcccgccttaagtgtgaaagtaatgaccgatgaaagtggaaaatccaaaggatttggatttgtaagctttgaaaggcatgaagatgcacagaaagctgtagatgagatgaatggaaaggagctcaatggaaaacaaatttacgttggtcgagctcagaaaaaagtggaacggcagacggaacttaagcgcacatttgaacagatgaagcaagataggatcaccagataccaggttgttaatctttatgtgaaaaatcttgatgatggtattgatgatgaacgtctccggaaagcgttttctccatttggtacaatcactagtgcaaaggttatgatggaaggtggtcgcagcaaagggtttggttttgtatgtttctcctccccagaagaagccactaaagcagttacagaaatgaacggtagaattgtggccacaaagccattgtatgtagctttagctcagcgcaaagaagagcgccaggcttacctcactaacgagtatatgcagagaatggcaagtgtacgagctgtgcccaaccagcgagcacctccttcaggttacttcatgacagctgtcccacagactcagaaccatgctgcatactatcctcctagccaaattgctcgactaagaccaagtcctcgctggactgctcagggtgccagacctcatccattccaaaataagcccagtgctatccgcccaggtgctcctagagtaccatttagtactatgagaccagcttcttcacaggttccacgagtcatgtcaacgcagcgtgttgctaacacatcaacacagacagtgggtccacgtcctgcagctgctgctgctgctgcagctacccctgctgtgcgcacggttccacggtataaatatgctgcgggagttcgcaatcctcagcaacatcgtaatgcacagccacaagttacaatgcaacagcttgctgttcatgtacaaggtcaggaaactttgactgcctccaggttggcatctgcccctcctcaaaagcaaaagcaaatgttaggtgaacggctctttcctcttattcaagccatgcaccctactcttgctgggaaaatcactggcatgttgttggagattgataattcagaacttctttatatgctcgagtctccagagtcactccgttctaaggttgatgaagctgtagctgtactacaagcccaccaagctaaagaggctacccagaaagcagttaacagtgctaccggtgttccaactgtttaaaattgatcagagaccacgaaaagaaatttgtgcttcaccgaagaaaaatatctaaacatcgagaaactatgggaaaaaaaattgcaaaatctaaaataaaaaatgcaaaatctaaaataaaaaatggaaaggaaactttgaaccttatgtaccgagcaaatgcaaggtctagcaaatataatgctagtcctagattacttattgatttaaaaacaaaaaaaagattacttaattttgatttaaaaacaaaaaatcgtaaaatacaaaaaccagttaatgttttgtagaccctgggaaaagaattttcagcaaagtacaaaaatttaaagcattcctttaattttttaattctttactgtggaatagctcaaaatgtccattctgttttaagtaacagaattgataactgagcaaggaaacatggtttggattataaaattcttgctttaataaaaatttcttaaacagtgaaa

SEQ ID NO: 3877 - DNA, 628 bp, Homo sapiens
ctcagaaccatgctgcatactatcctcctagccaaattgctcgactaagaccaagtcctcgctggactgctcagggtgccagacctcatccattccaaaataagcccagtgctatccgcccaggtgctcctagagtaccatttagtactatgagaccagcttcttcacaggttccacggtataaatatgctgcgggagttcgcaatcctcagcaacatcgtaatgcacagccacaagttacaatgcaacagcttgctgttcatgtacaaggtcaggaaactttgactgcctccaggttggcatctgcccctcctcaaaagcaaaagcaaatgttaggtgaacggctctttcctcttattcaagccatgcaccctactcttgctgggaaaatcactggcatgttgttggagattgataattcagaacttctttatatgctcgagtctccagagtcactccgttctaaggttgatgaagctgtagctgtactacaagcccaccaagctaaagaggctacccagaaagcagttaacagtgctaccggtgttccaactgtttaaaattgatcagagaccacgaaaagaaatttgtgcttcaccgaagaaaaatatctaaacatcgagaaact

SEQ ID NO: 3878 - DNA, 6356 bp, Homo sapiens
gccttcgccgccgttggggctggaagttcccgccaggtccgtgccgggcgagagagatgctgcccggcccgcctcggctttgaggcgagagaagtgtcccagacccatttcgccttgctgacggcgtcgagccctggccagacatgtccacagggttctccttcgggtccgggactctgggctccaccaccgtggccgccggcgggaccagcacaggcggcgttttctccttcggaacgggagcgtctagcaacccttctgtggggctcaattttggaaatcttggaagtacttcaactccagcaactacatctgctccttcaagtggttttggaaccgggctctttggatctaaacctgccactgggttcactctaggaggaacaaatacaggaatagcaacaactataactacaggattaactctgggaacgccagccactacatctgcagctacaacaggcttcagtttaggattcaataaacctgcagcatctgccacaccatttgctctacctattacctctacctcagctagcggtctgactctttcgtctgctctgacatcaactccagcagcatccacaggatttactctaaataatttgggtgggacaacagccacaactacaactgcatcaacaggcctctctttagggggagccttagctggtttgggaggttcacttttccagagtacaaacacaggaacatcaggacttggacagaatgctttagggttgactttgggaactacagcagctacttcaactgcaggcaatgaaggccttggtggtatagatttcagtagctcctcagataaaaagagtgataaaacgggaacaagaccagaggatagtaaagctctgaaggatgaaaatctacctcctgtcatctgccaggatgttgaaaatctccagaaatttgtgaaggagcagaaacaagttcaagaagaaattagtagaatgtcttcaaaagcaatgcttaaggtacaagaagatattaaagctctgaagcagctcctgtcgttggctgccaatggaatacagagaaacactctcaacattgacaaattgaaaatagaaactgctcaggagttgaagaatgctgaaatagctttaagaacccagaagacaccacctggacttcaacatgaatatgcagctcctgctgactacttcagaatcttggttcagcaatttgaggtacagcttcagcagtacaggcagcagattgaagaactagaaaaccatcttgccactcaagcaaataattcacatataacccctcaagatttgtcaatggctatgcagaaaatttatcaaacatttgtagctttagcggcacaacttcagtctattcatgaaaatgtaaaggttctgaaagaacagtaccttggctacaggaaaatgttcttgggagatgctgttgatgtgtttgaaacaaggcgagcagaagccaagaagtggcagaacacacccagagttactactggacccactcctttcagcaccatgccaaacgcagcagccgttgccatggctgcaacacttacacagcagcaacagcctgctacaggtctgaacgcattcaagttatagcttcttactgttccaatgcagaacatttatgtgcgtttttataagtcttccatttgtgtgagcactgaagaaatttctatgagtagctgttccaatacaatctaaaattgtgatggacacgattataaacatacctgataaaaaaggcagggtagtcttagcaataattatacatcaattagatattgaatattgtgaatctacttaatgttatttgctgtaatgctataaatgccctttagaacatggtgtttcactagtgaattacatttaagaataacattagattctgaaatcatgactgtaccatttattgttttaaagtcagagatcatccatccattctttgaatttttcatatatgatactgataggtggtgcattctcattttcctcatacatagtgattacaaagtacccacattcaggatgaagtatgcttttattgactgaaggtatgttgaagatcaataggcttgtttgtatgtatgttgactgtaaacagaatacaagccctctaaaccaaattttgaagatgatacatgctagaattgtacctttccaaggtgaacagaacagcaagagcaggaaaaagatgttttgagatgtggattgcacattaaggagcaactgggaagttgaacagatgaaaataattggtgacatggaaagcagattgttttatttcttggtttagttacacttctaattagagaaacattttttgtggtcattctacagtgttttatttggtcctgtgtctttcggaggttaatagttatcttaatcctgccatcccttttgtcaggtttgaagcttgacatggaaaaatagtcttaatcgatattgatttttttattttaatcattcataaatttcttagtaatgcttactattcaatagcatgtgtctttctgagagttccatatagtccagtagtacattataatacacacaaattaatacatatttagattgcattcaagctacctatactagggaagcattctctggttttcactattggcagtttaaaaaattgttcttcacatttggagatgacagaattgacttgccataagtaaagggttgatgatagatttatgccaaatcctccatatcccgtggctggacccatgtgaatagtggctcgcacgagcactgtctggtagctctctagctggctggagtgtaggattgcgttgttaagttatggagggaaaaagtcattatgggattgattcctttgaggattgatatttcttcttaaaaggattcaatcccataattatgaccatcagctctcatgattacctaaccagttaatcaaaccaaccatagtactagtttactttttagagccagtattaatcctaaagtagataagtgtagatttggttaagtgttctttaaacatagtgaatttccattctattaaatagaacttgagaaatgtcagttatataaaaagttatgttgtaagtgaatatattctatgataaatacctaaacttgaagcaaaatctcctgtcaagggtttgtgtgtgtgtgtgtgtttaactttcttatctatagattattattttgagaaattcataggttttcacttatacattttgagcttgtggacatatggagatgtgtgttcattctctaaatgagtgcctactatgtgctgggctcgaggaatacaaaggtagacaatatagattttgtctttgccctctgtggtggttgacaatgttagcttaatctggagtattcttgaggagccttttgctcataggctttaattttgtctgtgacttttgccaggctttggggaaattgactgccttcactcttccctgaaactttgaagtccacataagggctttctcatcagatggcagaaattataatttattaacctaaacaaccttacagtgttttcgctttgaattgtatgaattcttagaactgagaagctaaacaacagtgataacaattttacattatcttttctttctccttttgtttctctaaaggtctcccaggccttcccagtcaaaattttcgttatttttagtcatgtcaccatgatgtgagatttctgagctctgttagatacatttagaaatgtccctatttatcaaatggtgttttgtaccccataagttatcccttatgccctgtgacttctgtgaaatctttgtttttaagtgccagtaacaaattttagaccatctagatgagggtagagagagcttatgcattgtttttatacatcactgttgatctatacaagatttgagttatcagaagggttttgcttttatttgcatatgaaatttttattaacatgaatatgggcacagagcaaatagcttcttagactgctgccttctgaaggtggcttctgtatctttctcagaggaggaggaatagacttaaacgacttctttgtcctccttcaattttttttttaatgaaaaagtatactagggcttaggcatgtgtgatttacagttatttgttctgaaggctgcagagaattgaaaatccagcaggctatttgtgtatgaaatcatgagcatcgataacgtggataacgtagttccatgttggcagaacttgacacttgtctataagtgcttcccaagcctcctgaaaaactgaagacatttacattaggcttttcagtataattttaatttaggataggttttttagcaatgtatctgggattgagttttgctattgtgttttgacactttaagagttcttgatgtttacataataagactttcttatgtgacttagctgctgttttaaggagagccaagacgttttgttaggaattcctaatttttagcttagtgtaggtttggacatttaaggtgtagtgttaaataggaaacattaagtatttcatcttagtttcttgtggttttgtgattttgttgtatttaataaccaaaggaacattccccattaaatcagtaagagtaaaatttttcaaactggggaaaacgcattttaggttttttaaagaaaaattattttaaaatgtgacttagaaataaccatactaattacattaggcatttggggtgatcatggaaaattataaaatatttttagcactttagtcctttttctgttaatgcagttttacttttaagaaagtaaaatttattctggaaaatatgaattacagcgctaaacctggttttgttgtgtgtgaatatattatatggtaacttttgtaaaatgttactctacatgaagatttcactttggccagtcattggtatatatcactacaaacttaattttatttatggaaataagaacctctcattggatgactattcaaatttcaaagcagacttcttgaattgtttacgtaacttttgcctgaaggatttagactgctttctaatagtgaaactaatatatatggtggccagagtgtaatatatgctaatactttggcatgggagatatttatcatgagtttttactattaaaaaatgttatacatttgcctacgagttttataaatgatgttgccttcagaatttgtgtgaaggtacaaaactaaaaatatcatgtatctgatgtgcaatggaaagtcttgtcatcattagatatgagttcttgattatattctgaatattgatgattagaaaaatcttatgttctgtcgctcttaacaacagacccacacacaacaaaaagcatgctatttgagtaactcttacgacttacaaggctgagggctgtggtgtgcattattctttagggtcttccaccagcagtgcctcctattaacctgtgacaaacaagtctctcaatgttaaagaactggacatgtgttttttatgttttttgttaggaatcagaaagtataataatatgcttggtttctttttcctatagtaacattttacaaaagagctgctaggcaggtattttattctcaaagtgatctcaaactggatgtaaaattttaaattatttttttaatagtagtataagaattctggctgctattagttattgtttgttttctgggttagaagctattcgaaaagtccagtttctgtcccagtgtagcaaaatgtagttcctcggttgtttttctttaaatgctttataattttacactacctttttaatatacaaacctcattcttcattggataacttgaaggctttgatttctttaaaaatttaaattttagtgtgtatattactttgacagttccctcatctttgagatgcactgatcactgtgcttgaaaaagacaatactgaagattgtactatgaagtttattgaataattttcataaattatttatccaaatgagagatttttagatttttgtattctgcttagttttaaaaaaaaaaaatagtagtttaaaagagaggctagtaagtttgatgctattcttgccaaacaaactcagccaaaatctttaaagtaacaagagggaaaaggatgactaatcgttctgcttctgagtacattttccaaaacgttggaaagaaacttctgaattgaaatcttgaatgtattgaatctgtcaaggtacacagcggtgcctttgtaaatgttcattactttatttaatcaggtgataagtggtgtaatgtagcagagcttaagaatagaactcaattatcactttttgtgaacaagttggaattgtcatgttactgtgtaattgatttgctttacaatgaacaataaatttaataaaat

SEQ ID NO: 3879 - protein, 485 aa, Homo sapiens
MSTGFSFGSGTLGSTTVAAGGTSTGGVFSFGTGASSNPSVGLNFGNLGSTSTPATTSAPSSGFGTGLFGSKPATGFTLGGTNTGIATTITTGLTLGTPATTSAATTGFSLGFNKPAASATPFALPITSTSASGLTLSSALTSTPAASTGFTLNNLGGTTATTTTASTGLSLGGALAGLGGSLFQSTNTGTSGLGQNALGLTLGTTAATSTAGNEGLGGIDFSSSSDKKSDKTGTRPEDSKALKDENLPPVICQDVENLQKFVKEQKQVQEEISRMSSKAMLKVQEDIKALKQLLSLAANGIQRNTLNIDKLKIETAQELKNAEIALRTQKTPPGLQHEYAAPADYFRILVQQFEVQLQQYRQQIEELENHLATQANNSHITPQDLSMAMQKIYQTFVALAAQLQSIHENVKVLKEQYLGYRKMFLGDAVDVFETRRAEAKKWQNTPRVTTGPTPFSTMPNAAAVAMAATLTQQQQPATGLNAFKL

SEQ ID NO: 3880 - DNA, 489 bp, Homo sapiens
atggctgttggcaagaacaaacgccttacgaaaggaggcaaaaagggagccaagaagaaagtggttgatccattttctaagaaagagtggtatgatgtgaaagcaccttctgtgttcaatataaggaatattggaaagatgctagtcaccaggacccaaggaaacaaaattgcatctgatggcctcaagggtcatgtgtttgaacaccaacaggtccgccaaatccggaagaatatgatggaaatcaagacccgggaggtgcagaaaaatgacttgaaagaagtggtcaataaattgattccagacagcattggaaaagacatagaaaagacttgccaatccatttatcctctccatgatgtcttcgttagaaaagtaaaaatgctgaagaagcccaagtttgaattgggaaaactcatggagcttcatggtgaaggcagtagttctggaaaagccactgggagcaagacaggtgctaaagttgaatga

SEQ ID NO: 3881 - DNA, 4768 bp, Homo sapiens
gcggccgcggcgcggcgggaccatggagctcagagcgcagccccggcgccggcggcgggaccgcggaccgttttagttttgattgctgttaactactactgataactgagccaaagtggtgatgctacttgaggggaatttctgcaacccatagtcaacgattacatgattgtgaaccatgcctttagtgaagaggaacattgagccccggcacttgtgccggggagctctgcctgaagggattaccagcgaacttgaatgtgtaaccaatagtactcttgccgctatcatacgccagctgagcagtctgagcaaacatgctgaagacatatttggtgagttgtttaatgaggctaacaacttctacatcagagcaaattctcttcaagacagaattgatcgccttgctgtcaaagtcacccagctggattcaacagtggaagaggtctcactacaggatatcaacatgaaaaaagctttcaaaagttccacagtccaagaccagcaagtggtttcaaagaacagcattcctaatcctgttgctgatatttacaaccagagtgataagccaccgcctctgaacatcctgacaccatacagagatgacaagaaggatgggctgaagttctatactgatccttcctatttctttgacctctggaaagaaaaaatgctacaggacacagaagacaaaaggaaagagaaaaggcgtcaaaaggagcaaaagcgtatagatggcaccacccgtgaggtgaaaaaggttagaaaagccagaaacaggcgccaggagtggaatatgatggcatatgacaaagagcttagacccgacaacaggttgtctcagagtgtgtaccatggagcgtcttccgagggatccctgtccccagatactaggtcacatgcatcggacgttacggattactcttacccggctactcccaaccattctctgcacccccagcctgtgaccccttcctatgcagctggtgacgtgccaccacacgggcctgcaagccaggctgcggagcatgagtaccggcccccatctgcctcggcgaggcacatggccctcaacagacctcagcagccgccccccccgcctccccctcaggccccagaggggtcccaggcctctgcaccgatggctccagcagactacgggatgctcccagcgcagataattgagtattacaacccatccggaccacctcctccgccacctcctcctgtgattccctcagcacaaactgccttcgtcagccctctccagatgcccatgcagcccccgttccctgcatcagccagctccacgcacgcagctcctcctcacccaccctccaccgggctcctggtcacagccccgccacccccgggcccaccacctcccccgccaggccctcctggtcccgggtcttctctttcgtcctccccaatgcatggccccccagtagctgaggcgaagcggcaagagcctgcacagccaccaatcagtgatgctcgaagcgacctcctcgctgctattcgaatgggaattcaactgaaaaaggtgcaggagcagcgggagcaggaggccaagcgggagccagtggggaatgacgtggccacgatcctgtcccggcgcattgccgtggagtacagcgactctgacgacgactcagagttcgacgagaacgactggtccgactgagcaaaggccggcggagaggccgcgtgtgggagcgtgttgaagattttaagtggtctctacacccaaatagtggtattctaatcccgtagcatagcaccttttgtataaacaatgtgatattgcttctgcacatccaaaaattctgggtcttttcagtatttactgtgtaatacttaagtgccactaaacatagcaaattgtgctgcacatgaggaaataggctgtcactatcacattgtcctgaaaacagcatctgctttcctcttggccatgagagtatttagtgcagtttgggtttactcttactgatcaatataactctgcagacttgctgtgtgtttgtgaagctgcctggtgttaggtctctgcaagactaatgactatgtcagagtgatgtcttccaaccagtaagtgatattgtttcaccgctttggtttttccttttgtttttttaaaggatgtgtttctgaataagttggttttagagggaaaggttcaacaaacagggagaatccagtgtttctgctttcagtttcttggcttggtagcctctgagtgaatctgatgctctgctgaataatttcattacctctgcacatgcctgtcaaatatgaaattggaagggcccttttcaggctgggttccctgtgggcatttgcttagtaaatgcctgttgatggtttttgcaagagaattcagcagctcaacagtaatgaaagtgaagaacagagtccattttccttcctggggccattggggatgacactcaagatacttgccagtctctccagtgtgggcaccagccggccagaacagatgcgagcagtccatgactctgggagctacaccgctgagctgggcagagctgcggcacagggcctgggctgcaaaggagccctgctcctttagtttcctgacacctgtgtcctgagtgagccgcaggagttcttagctcctcagcgagcaacagagagcactttagatggcacctttcaccacttggtcagaattttaaaagcttaggtttaggtgaaagtagatattgacagctattcacctttcacggtgctggggccagattagggatcactcccgtgaggagggccttcaccctgttctagaagcacatggttgtcctcctgttgttggcacattaaatgataaaaagcacctcatgagattcccttgatcagccctgcagctgtagtacagtgctgtgccctcacctccacccttcctgttgttcccacgtgggcaataccagggacccatggggaaactcaagaatgacagcttctatattttgtaattctggatgaaagataactgtgttgaacaaacaggtgctccaggctttgattatagatacgacttcaaaaatatgctaagacgcttgacttattaaggactttaacctactcaacagtatttcatatccattgtggttagttactcagttatgttgagaagaatctggagctaaaagcagagatgtttgaggtgacggtaggaatgtgagcaggatggtgatgggggtttttgttaaaatgcatctgagcaagtcagccagccccgaagtcccctcagtgtgtgtgtctcgagtggctacctgttgggcttgtgggcagtgattgtacagagcctgtccattgggtgcagtcatgtagatctgaagccctgaaaagcctcatgtctgcatcccctttccaaggctgcttccctggtgtgtctgttctctcctctgtcccaggtgctgggagcgtcctcttcagcgtcttttcctagagctggtcaccactaggctgtcactataaattccttgaatataagtaacagttattaatgaacttctaaatttctaatttctctctctctctcttttttttttttttgttgttgttaaaaagggcctactacattggcgctattcttaggacttctgcaacttttaaagtcttacttgtctttcttgttgcttttgtattaggagttccccgtgtgggtctagaactcccctttggtaatgcttctttgtttttttatggcccttctgttctcaggatggagagaacacagaagctactatccatgtcaggatttattctatttatatcttattacaataaaattagtggcactttattcataaatattcatgagcctgttaattgttagttgtcttcctgtagctgaatcaacaagttattttcaactcaattttatgacttgcgaaaaagcttttgccctgttgtgtaccataacatttaaaagaatggaaaatgactgaaatccaatttagattatttttagagtatttttccagcaaattcaatttattctgaaatttaaatccagatcttttctaatatggtattacaatgaaaagaataaagagaagatttgaattttcagtttcattttcaaaaactatttaccaaaacaaatggagaagaaacatccaaaagcacatttcatttctccaaactttgtgttttaaattatagttataaattgtaaggtaattttaaattgtccctcgtattatttctccacgtctgttttagtttaatgtctcctaagcttttctctcatagcgtagacctagggaagggatgggaagattgcccagtccccgatggctgcgcacacaggaggcggcggagcacaaggcaagtgagtttgcactgtcagccccagaccgtaagcttggctacactgatgtttttctttactaaggatactattcaaaaattaacattttcatctcagtaagtttttagaacatcaaaatgttttctgagctccaagtggctaggttgtaaaagttttataataatttgcaattaaaatacatgatacatattaatccattaaagactagtgggaatgtatcagccagagtagcaagtaatttttgttttataaatcatagtatctgtcatcttgcagtattaccaatgctgttgtaaattgaatttaaagtggtattaaaaaaaactgttaaacaatttttatctgtttgtatatcttactatagattatgtacaagtaacatctaaataaaattacacttttaaccct

SEQ ID NO: 3882 - protein, 502 aa, Homo sapiens
MPLVKRNIEPRHLCRGALPEGITSELECVTNSTLAAIIRQLSSLSKHAEDIFGELFNEANNFYIRANSLQDRIDRLAVKVTQLDSTVEEVSLQDINMKKAFKSSTVQDQQVVSKNSIPNPVADIYNQSDKPPPLNILTPYRDDKKDGLKFYTDPSYFFDLWKEKMLQDTEDKRKEKRRQKEQKRIDGTTREVKKVRKARNRRQEWNMMAYDKELRPDNRLSQSVYHGASSEGSLSPDTRSHASDVTDYSYPATPNHSLHPQPVTPSYAAGDVPPHGPASQAAEHEYRPPSASARHMALNRPQQPPPPPPPQAPEGSQASAPMAPADYGMLPAQIIEYYNPSGPPPPPPPPVIPSAQTAFVSPLQMPMQPPFPASASSTHAAPPHPPSTGLLVTAPPPPGPPPPPPGPPGPGSSLSSSPMHGPPVAEAKRQEPAQPPISDARSDLLAAIRMGIQLKKVQEQREQEAKREPVGNDVATILSRRIAVEYSDSDDDSEFDENDWSD

SEQ ID NO: 3883 - DNA, 1307 bp, Homo sapiens
atgcgcgatctcccggagcatgcgcagcagcggcgccgacgcggggcggtgcctggtgaccgcgcgcgctcccggaagtgtgccggcgtcgcgcgaaggttcagcagggagccgtgggccgggcgcgccggttcccggcacgtgtctcggcacgtggcagcgcgcctggccctgggcttggaggcgccggcgccctggatccgccggccgtggtcgccgagtcggtgtcgtccttgaccatcgccgacgcgttcattgcagccggcgagagctcagctccgaccccgccgcgccccgcgcttcccaggaggttcatctgctccttccctgactgcagcgccaattacagcaaagcctggaagcttgacgcgcacctgtgcaagcacacgggggagagaccatttgtttgtgactatgaagggtgtggcaaggccttcatcagggactaccatctgagccgccacattctgactcacacaggagaaaagccgtttgtttgtgcagccaatggctgtgatcaaaaattcaacacaaaatcaaacttgaagaaacattttgaacgcaaacatgaaaatcaacaaaaacaatatatatgcagttttgaagactgtaagaagacctttaagaaacatcagcagctgaaaatccatcagtgccagcataccaatgaacctctattcaagctatgtatgtcaaaaaggatgttcctttgtggcaaaaacatggacggaacttctgaaacatgtgagagaaacccataaagaggaaatactatgtgaagtatgccggaaaacatttaaacgcaaagattaccttaagcaacacatgaaaactcatgccccagaaagggatgtatgtcgctgtccaagagaaggctgtggaagaacctatacaactgtgtttaatctccaaagccatatcctctccttccatgaggaaagccgcccttttgtgtgtgaacatgctggctgtggcaaaacatttgcaatgaaacaaagtctcactaggcatgctgttgtacatgatcctgacaagaagaaaatgaagctcaaagtcaaaaaatctcgtgaaaaacggagtttggcctctcatctcagtggatatatccctcccaaaaggaaacaagggcaaggcttatctttgtgtcaaaacggagagtcacccaactgtgtggaagacaagatgctctcgacagttgcagtacttacccttggctaagaactgcactgctttgtttaaaggactgcagaccaaggagcgagctttctctcagagcatgcttttctttattaaaattactgatgcag

SEQ ID NO: 3884 - DNA, 1352 bp, Homo sapiens
ggggggaaacggaagtgagcggcggggtcgactgacggtaacggggcagagaggctgttcgcagagctgcggaagatgaatgccagaggacttggatctgagctaaaggacagtattccagttactgaactttcagcaagtggaccttttgaaagtcatgatcttcttcggaaaggtttttcttgtgtgaaaaatgaacttttgcctagtcatccccttgaattatcagaaaaaaatttccagctcaaccaagataaaatgaatttttccacactgagaaacattcagggtctatttgctccgctaaaattacagatggaattcaaggcagtgcagcaggttcagcgtcttccatttctttcaagctcaaatctttcactggatgttttgaggggtaatgatgagactattggatttgaggatattcttaatgatccatcacaaagcgaagtcatgggagagccacacttgatggtggaatataaacttggtttactgtaatagtgtgctgttcatggaaaccgagggctgcatcttgtttatagtcatctttgtactgtaatttgatgtacacaacattaaaagtactgacacctgagaatttctgctcaagtagtatcagtgatcatttaaaatttggaggggtctttggtttacagccatgtgacaattaaaagcactaaagggagatcatgttaaagctcttaatttatattaaaacagtagcctttgtctttaaaaaagttgttgctcatgaatattataaaatgatctacaggtttcaattcaacctgtttctaggtttttttgtaaatttagttttgattaagcattataagcatttgagtctataaactttatagtagcatctttcagaataaacatttttaattgatttcagtggcaactctcaaattgattacaatatgagatatatcagtgtcgtccattaacactcataagaataatatttactgtgtcagtgctattttaggattatagttattgtttgattatttcaggttgaaaagtagaagttccaaggttttgattttggtctggtctttaagtgaaaaattaaagcaaccagtagatgtaggttaaacttttacttcatagacttaatatgtgattaatatattgccaagcaacactgttaaagaaaagtaaaactcattttttcttgttcttaatttatatattacaagatactgtaaggtattctttatgaagttgatatataaaaatttacatttttagaacattagtgaatggatcatcttttacaattaaaagtatattttgattatcagtttcttagcaaaaaaaaaaaaaaaaaaaaaaaaaaaaaa

SEQ ID NO: 3885 - protein, 141 aa, Homo sapiens
MNARGLGSELKDSIPVTELSASGPFESHDLLRKGFSCVKNELLPSHPLELSEKNFQLNQDKMNFSTLRNIQGLFAPLKLQMEFKAVQQVQRLPFLSSSNLSLDVLRGNDETIGFEDILNDPSQSEVMGEPHLMVEYKLGLL

SEQ ID NO: 3886 - DNA, 579 bp, Homo sapiens
acactgatgatgtttttagccagggtgccgttccttttcactattgtgccattctctgttctacggtccatgttgtcaaaagtggttcgttcgactgaacaaggtaccctgtttgcttgtattgctttcttagaaacacttggaggagtcactgcagtttctacttttaatggaatttactcagccactgttgcttggtaccctggcttcactttcctgctgtctgctggtctgttactacttccagccatcagtctatgtgttgtcaagtgtaccagctggaatgagggaagctatgaacttcttatacaagaagaatccagtgaagatgcttcagacagagcctgttaagctgctattgatagtcggagcttatatactgtgacttctgaagactatacatgaattccacaatcagtgctttgttgatacaaaatccttaaaagggaggcactttaaagaatatgtatttttcacttttcttaatatgtttcatcggtgacaggcatgataatatttctatatgtaatgggtaattgggaaaaaatagatgataaataaaattgctctaaagaagtt

SEQ ID NO: 3887 - DNA, 1207 bp, Homo sapiens
gagacagcgccggggcaagtgagagccggacgggcactgggcgactctgtgcctcgctgaggaaaaataactaaacatgggcaaaggagatcctaagaagccgagaggcaaaatgtcatcatatgcattttttgtgcaaacttgtcgggaggagcataagaagaagcacccagatgcttcagtcaacttctcagagttttctaagaagtgctcagagaggtggaagaccatgtctgctaaagagaaaggaaaatttgaagatatggcaaaggcggacaaggcccgttatgaaagagaaatgaaaacctatatccctcccaaaggggagacaaaaaagaagttcaaggatcccaatgcacccaagaggcctccttcggccttcttcctcttctgctctgagtatcgcccaaaaatcaaaggagaacatcctggcctgtccattggtgatgttgcgaagaaactgggagagatgtggaataacactgctgcagatgacaagcagccttatgaaaagaaggctgcgaagctgaaggaaaaatacgaaaaggatattgctgcatatcgagctaaaggaaagcctgatgcagcaaaaaagggagttgtcaaggctgaaaaaagcaagaaaaagaaggaagaggaggaagatgaggaagatgaagaggatgaggaggaggaggaagatgaagaagatgaagatgaagaagaagatgatgatgatgaataagttggttctagcgcagtttttttttcttgtctataaagcatttaacccccctgtacacaactcactccttttaaagaaaaaaattgaaatgtaaggctgtgtaagatttgtttttaaactgtacagtgtctttttttgtatagttaacacactaccgaatgtgtctttagatagccctgtcctggtggtattttcaatagccactaaccttgcctggtacagtatgggggttgtaaattggcatggaaatttaaagcaggttcttgttggtgcacagcacaaattagttatatatggggatggtagttttttcatcttcagttgtctctgatgcagcttatacgaaataattgttgttctgttaactgaataccactctgtaattgcaaaaaaaaaaaaagttgcagctgttttgttgacattctgaatgcttctaagtaaatacaattttttttattaaaaaaaaaaaaaaaaaaaaaaaaa

SEQ ID NO: 3888 - protein, 215 aa, Homo sapiens
MGKGDPKKPRGKMSSYAFFVQTCREEHKKKHPDASVNFSEFSKKCSERWKTMSAKEKGKFEDMAKADKARYEREMKTYIPPKGETKKKFKDPNAPKRPPSAFFLFCSEYRPKIKGEHPGLSIGDVAKKLGEMWNNTAADDKQPYEKKAAKLKEKYEKDIAAYRAKGKPDAAKKGVVKAEKSKKKKEEEEDEEDEEDEEEEEDEEDEDEEEDDDDE

SEQ ID NO: 3889 - DNA, 2825 bp, Homo sapiens
cggaggtgaggtttgttaccgcgattctgagaggtgggcttttagtccctccagacctcggctttagtgctgtctccgcttttctttcaccttcacagaggttcgtgtcttcctaaaagaaggttttattgggaggtaaaggtcaatgcgtaggggtagagtaagatgtcttatggtgaaattgaaggtaaattcttgggacctagagaagaagtaacgagtgagccacgctgtaaaaaattgaagtcaaccacagagtcgtatgtttttcacaatcatagtaatgctgattttcacagaatccaagagaaaactggaaatgattgggtccctgtgaccatcattgatgtcagaggacatagttatttgcaggagaacaaaatcaaaactacagatttgcatagacctttgcatgatgagatgcctggtaatagaccagatgttattgaatccattgattcacaggttttacaggaagcacgtcctccattagtatccgcagacgatgagatatatagcacaagtaaagcatttataggacccatttacaaaccccctgagaaaaagaaacgtaatgaagggaggaatgaggcacatgttctaaatggtataaatgacagaggaggacaaaaagagaaacagaaatttaactctgaaaaatcagagattgacaatgaattattccagttttacaaagaaattgaagagcttgaaaaggaaaaagatggttttgagaacagttgtaaagaatctgaaccttctcaggaacaatttgttccattttatgagggtcataataatggtctcttaaaacctgatgaagaaaagaaagatcttagtaataaagctatgccatcacattgtgattatcagcagaacttggggaatgagccagacaaatatccctgtaatggacaagtaatacctacattttgtgacacttcatttacttctttcaggcctgaatggcagtcagtatatccttttatagtgccctatggtccccctcttcccagtttgaactatcatttaaacattcagagattcagtggtccaccaaatccaccatcaaatattttccaagcccaagatgactctcagatacaaaatggatattatgtaaataattgtcatgttaactggaattgcatgacttttgatcagaacaatgaatatactgactgtagtgagaataggagtagtgttcatccctctggaaatggctgcagtatgcaagatcgatatgtgagtaatggtttctgtgaagtcagagaaagatgctggaaagatcattgtatggacaagcataatggaacagacaggtttgtgaaccagcagtttcaagaggaaaagttaaataaattgcagaagttacttattcttttaagaggtctgcctggttctgggaaaacaacattgtctcgaattctgcttggtcagaatcgtgatggcattgtgttcagcactgatgactattttcaccatcaagatgggtacaggtataatgttaatcaacttggtgatgcccatgactggaaccagaacagagcaaaacaagctatcgatcagggaagatctccagttataatagataacactaatatacaagcttgggaaatgaagccatatgtggaagtggccataggaaaaggatacagagtagagtttcatgaacctgaaacttggtggaaatttgatcctgaagaattagaaaagaggaataaacatggtgtgtctcgaaagaagattgctcagatgttggatcgttatgaatatcaaatgtccatttctattgtaatgaattcagtggaaccatcacacaaaagcacacaaagacctcctcctccacaggggagacagaggtggggaggctctcttggctcacataatcgtgtctgtgtcacaaataatcattaaattagctattttcagctaacacatttgttgttgcacttgaaaaagagttagtgagcctgtcttggagtttaagtagtttcaaataaaaaaaggctacagtgcctcacaaaggatgttcccagcaagttgtttaaattcccagcaagttgttaaagtgtaaataaaaatatatgaaattgtattttaaatgtttttatattctcttgttgtaatactcttggctgttatggaagcacctgagtaatagagtggtgggtaggagctaggatgtttttctacaatcgaattttaaactaatttatctattttatagacactattgaacagttttttaatagttcatatctaaatctaacttttcataaaactttacggtttttccttcactaccttaaatatgcaagaaatactgacttggtatagggtaccttagttttctctattcattagacaggtaaaattatatttcagctgattgatctgtgtgacaaaattatttcttagctataatcagcacatcacttagttcaaacaaaattccccagcaaatgttagatagtaggtatatcagtcacctggggagttttcttcataatatgcatattcatcttgtaatgcatacatagttatcatcctccttctcaacccatctccctaaccccacatgcttgccagttcttgaagggataaagtgattctaataatgttttacttctctctgttcaatttaatgtgatataattctagtataaaaatattttggacagttgcttaacatggtcataagaggatttgtactatagaatatcttctagtactaatttttctgtagagcaaattatatttctctcactggatagtttttagatgtgtttcttcatataaaattaaaaactgagatggaattc

SEQ ID NO: 3890 - protein, 583 aa, Homo sapiens
MSYGEIEGKFLGPREEVTSEPRCKKLKSTTESYVFHNHSNADFHRIQEKTGNDWVPVTIIDVRGHSYLQENKIKTTDLHRPLHDEMPGNRPDVIESIDSQVLQEARPPLVSADDEIYSTSKAFIGPIYKPPEKKKRNEGRNEAHVLNGINDRGGQKEKQKFNSEKSEIDNELFQFYKEIEELEKEKDGFENSCKESEPSQEQFVPFYEGHNNGLLKPDEEKKDLSNKAMPSHCDYQQNLGNEPDKYPCNGQVIPTFCDTSFTSFRPEWQSVYPFIVPYGPPLPSLNYHLNIQRFSGPPNPPSNIFQAQDDSQIQNGYYVNNCHVNWNCMTFDQNNEYTDCSENRSSVHPSGNGCSMQDRYVSNGFCEVRERCWKDHCMDKHNGTDRFVNQQFQEEKLNKLQKLLILLRGLPGSGKTTLSRILLGQNRDGIVFSTDDYFHHQDGYRYNVNQLGDAHDWNQNRAKQAIDQGRSPVIIDNTNIQAWEMKPYVEVAIGKGYRVEFHEPETWWKFDPEELEKRNKHGVSRKKIAQMLDRYEYQMSISIVMNSVEPSHKSTQRPPPPQGRQRWGGSLGSHNRVCVTNNH

SEQ ID NO: 3891 - DNA, 1479 bp, Homo sapiens
cgagctgccatgagcctctgggtggacaagtatcggccctgctccttgggacggctggactatcacaaggagcaggcggcccagctgcggaacctggtgcagtgtggtgactttcctcatctgttagtgtacggaccatcaggtgctggaaaaaagacaagaattatgtgtattttacgtgaactttatggtgttggagtggaaaaattgagaattgaacatcagaccatcacaactccatctaaaaaaaaaattgaaattagcaccattgcaagtaactaccaccttgaagttaatcctagtgatgctggaaatagtgaccgagtagtcattcaggagatgttgaaaacagtggcacaatcacaacaacttgaaacaaactctcaaagggattttaaagtggtattattgacagaagttgacaaactcaccaaagatgctcagcatgccttgcgaagaaccatggaaaaatatatgtctacctgcagattgatcttgtgctgcaattctacatctaaagtgatcccacctattcgtagtaggtgcttggcggttcgtgtgcctgctcccagcattgaagatatttgccacgtgttatctactgtgtgtaagaaggaaggtctgaatcttccttcacaactggctcatagacttgcagagaagtcttgtagaaatctcagaaaagccctgcttatgtgtgaagcctgcagagtgcaacaatatccttttactgcagatcaagaaatccctgagacagattgggaggtgtatctgagggagactgcaaatgctattgtcagtcagcaaactccacaaaggctccttgaagttcgtggaaggctgtatgagcttctaactcattgtattcctcctgagataataatgaagggccttctctcagaactgttacataattgtgatggacaactgaaaggggaggtggcacaaatggcagcttactatgagcatcgtctacagctgggtagcaaagccatttatcacttggaagcgtttgtggccaaattcatggcactttataagaagttcatggaggatggattggaaggcatgatgttctgacttctgtcagttattcttgcaaagatttctcagtatcagtatttacatacagcttatattaaaagagctgtgggtaaattaactgaacttaatcatgtcgtatttgggtttttttggtaataacttctctgtgaactattaatcatcctctgagttaaataattgctcctatactattgaagtatgtagttttgtacataacttagagactttagagtctaagaaaatgatcttaatttactttaagcattggttattcaagtattcattgttgatcctcctattctcttccgtctaatctctcacctgctaaaggagatttacacattagaaagcaaagattattttcatttatccagatgaccattttctgccacaggtaacatgattgtttgacgg

SEQ ID NO: 3892 - protein, 356 aa, Homo sapiens
MSLWVDKYRPCSLGRLDYHKEQAAQLRNLVQCGDFPHLLVYGPSGAGKKTRIMCILRELYGVGVEKLRIEHQTITTPSKKKIEISTIASNYHLEVNPSDAGNSDRVVIQEMLKTVAQSQQLETNSQRDFKVVLLTEVDKLTKDAQHALRRTMEKYMSTCRLILCCNSTSKVIPPIRSRCLAVRVPAPSIEDICHVLSTVCKKEGLNLPSQLAHRLAEKSCRNLRKALLMCEACRVQQYPFTADQEIPETDWEVYLRETANAIVSQQTPQRLLEVRGRLYELLTHCIPPEIIMKGLLSELLHNCDGQLKGEVAQMAAYYEHRLQLGSKAIYHLEAFVAKFMALYKKFMEDGLEGMMF

SEQ ID NO: 3893 - DNA, 811 bp, Homo sapiens
gggcgggaagatggcggctgggttcaaaaccgtggaacctctggagtattacaggagatttctgaaagagaactgccgtcctgatggaagagaacttggtgaattcagaaccacaactgtcaacatcggttcaattagtaccgcagatggttctgctttagtgaagttgggaaatactacagtaatctgtggagttaaagcagaatttgcagcaccatcaacagatgcccctgataaaggatacgttgttcctaatgtggatctaccacccctgtgttcatcgagattccggtctggacctcctggagaagaggcccaagtggctagccagttcattgcagatgtcattgaaaattcacagataattcagaaagaggacttatgcatttctccaggaaagcttgtctgggttctatactgtgatctcatttgcctcgactacgatggaaacattttggatgcctgcacatttgctttgctagcggctttaaaaaatgtacagttgcctgaagttactataaatgaagaaactgctttagcagaagttaatttaaagaagaaaagttatttgaatattagaactcatccagttgcaacttcctttgctgtgtttgatgacactttgcttatagttgaccctactggagaggaggaacatctggcaacaggaaccttaacaatagtaatggatgaggaaggcaaactctgttgtcttcacaaaccaggcatgttcccgccacttcagtcctaaacatatgtagatgaaaactcagtgtgagccttaaattagggagggccaaatagaatatgg

SEQ ID NO: 3894 - protein, 276 aa, Homo sapiens
MAAGFKTVEPLEYYRRFLKENCRPDGRELGEFRTTTVNIGSISTADGSALVKLGNTTVICGVKAEFAAPSTDAPDKGYVVPNVDLPPLCSSRFRSGPPGEEAQVASQFIADVIENSQIIQKEDLCISPGKLVWVLYCDLICLDYDGNILDACTFALLAALKNVQLPEVTINEETALAEVNLKKKSYLNIRTHPVATSFAVFDDTLLIVDPTGEEEHLATGTLTIVMDEEGKLCCLHKPGGSGLTGAKLQDCMSRAVTRHKEVKKLMDEVIKSMKPK

SEQ ID NO: 3895 - DNA, 3213 bp, Homo sapiens
agagactcaagatgattccctttttacccatgttttctctactattgctgcttattgttaaccctataaacgccaacaatcattatgacaagatcttggctcatagtcgtatcaggggtcgggaccaaggcccaaatgtctgtgcccttcaacagattttgggcaccaaaaagaaatacttcagcacttgtaagaactggtataaaaagtccatctgtggacagaaaacgactgtgttatatgaatgttgccctggttatatgagaatggaaggaatgaaaggctgcccagcagttttgcccattgaccatgtttatggcactctgggcatcgtgggagccaccacaacgcagcgctattctgacgcctcaaaactgagggaggagatcgagggaaagggatccttcacttactttgcaccgagtaatgaggcttgggacaacttggattctgatatccgtagaggtttggagagcaacgtgaatgttgaattactgaatgctttacatagtcacatgattaataagagaatgttgaccaaggacttaaaaaatggcatgattattccttcaatgtataacaatttggggcttttcattaaccattatcctaatggggttgtcactgttaattgtgctcgaatcatccatgggaaccagattgcaacaaatggtgttgtccatgtcattgaccgtgtgcttacacaaattggtacctcaattcaagacttcattgaagcagaagatgacctttcatcttttagagcagctgccatcacatcggacatattggaggcccttggaagagacggtcacttcacactctttgctcccaccaatgaggcttttgagaaacttccacgaggtgtcctagaaaggatcatgggagacaaagtggcttccgaagctcttatgaagtaccacatcttaaatactctccagtgttctgagtctattatgggaggagcagtctttgagacgctggaaggaaatacaattgagataggatgtgacggtgacagtataacagtaaatggaatcaaaatggtgaacaaaaaggatattgtgacaaataatggtgtgatccatttgattgatcaggtcctaattcctgattctgccaaacaagttattgagctggctggaaaacagcaaaccaccttcacggatcttgtggcccaattaggcttggcatctgctctgaggccagatggagaatacactttgctggcacctgtgaataatgcattttctgatgatactctcagcatggatcagcgcctccttaaattaattctgcagaatcacatattgaaagtaaaagttggccttaatgagctttacaacgggcaaatactggaaaccatcggaggcaaacagctcagagtcttcgtatatcgtacagctgtctgcattgaaaattcatgcatggagaaagggagtaagcaagggagaaacggtgcgattcacatattccgcgagatcatcaagccagcagagaaatccctccatgaaaagttaaaacaagataagcgctttagcaccttcctcagcctacttgaagctgcagacttgaaagagctcctgacacaacctggagactggacattatttgtgccaaccaatgatgcttttaagggaatgactagtgaagaaaaagaaattctgatacgggacaaaaatgctcttcaaaacatcattctttatcacctgacaccaggagttttcattggaaaaggatttgaacctggtgttactaacattttaaagaccacacaaggaagcaaaatctttctgaaagaagtaaatgatacacttctggtgaatgaattgaaatcaaaagaatctgacatcatgacaacaaatggtgtaattcatgttgtagataaactcctctatccagcagacacacctgttggaaatgatcaactgctggaaatacttaataaattaatcaaatacatccaaattaagtttgttcgtggtagcaccttcaaagaaatccccgtgactgtctatacaactaaaattataaccaaagttgtggaaccaaaaattaaagtgattgaaggcagtcttcagcctattatcaaaactgaaggacccacactaacaaaagtcaaaattgaaggtgaacctgaattcagactgattaaagaaggtgaaacaataactgaagtgatccatggagagccaattattaaaaaatacaccaaaatcattgatggagtgcctgtggaaataactgaaaaagagacacgagaagaacgaatcattacaggtcctgaaataaaatacactaggatttctactggaggtggagaaacagaagaaactctgaagaaattgttacaagaagaggtcaccaaggtcaccaaattcattgaaggtggtgatggtcatttatttgaagatgaagaaattaaaagactgcttcagggagacacacccgtgaggaagttgcaagccaacaaaaaagttcaaggatctagaagacgattaagggaaggtcgttctcagtgaaaatccaaaaaccagaaaaaaatgtttatacaaccctaagtcaataacctgaccttagaaaattgtgagagccaagttgacttcaggaactgaaacatcagcacaaagaagcaatcatcaaataattctgaacacaaatttaatatttttttttctgaatgagaaacatgagggaaattgtggagttagcctcctgtggtaaaggaattgaagaaaatataacaccttacaccctttttcatcttgacattaaaagttctggctaactttggaatccattagagaaaaatccttgtcaccagattcattacaattcaaatcgaagagttgtgaactgttatcccattgaaaagaccgagccttgtatgtatgttatggatacataaaatgcacgcaagccattatctctccatgggaagctaagttataaaaataggtgcttggtgtacaaaactttttatatcaaaaggctttgcacatttctatatgagtgggtttactggtaaattatgttattttttacaactaattttgtactctcagaatgtttgtcatatgcttcttgcaatgcatattttttaatctcaaacgtttcaataaaaccatttttcagatataaagagaattacttcaaattgagtaattcagaaaaactcaagatttaagttaaaaagtggtttggacttgggaa

SEQ ID NO: 3896 - DNA, 5723 bp, Homo sapiens
gcagccgccacattcaacaggcagcagcgcagcgggcgcgccgctggggagagcaagcggcccgcggcgtccgtccgtccttccgtccgcggccctgtcagctggagcgcggcgcaggctctgccccggcccggcggctctggccggccgtccagtccgtgcggcggaccccgaggagcctcgatgtggatggccccgcgaagttaagttctgggctcgcgcttccactccgccgcgccttcctcccagtttccgtccgctcgccgcaccggcttcgttcccccaaatctcggaccgtcccttcgcgccccctccccgtccgcccccagtgctgcgttctccccctcttggctctcctgcggctgggggaggggcgggggtcaccatggccgaggcgcctcaggtggtggagatcgacccggacttcgagccgctgccccggccgcgctcgtgcacctggccgctgcccaggccggagtttagccagtccaactcggccacctccagcccggcgccgtcgggcagcgcggctgccaaccccgacgccgcggcgggcctgccctcggcctcggctgccgctgtcagcgccgacttcatgagcaacctgagcttgctggaggagagcgaggacttcccgcaggcgcccggctccgtggcggcggcggtggcggcggcggccgccgcggccgccaccggggggctgtgcggggacttccagggcccggaggcgggctgcctgcacccagcgccaccgcagcccccgccgcccgggccgctgtcgcagcacccgccggtgccccccgccgccgctgggccgctcgcggggcagccgcgcaagagcagctcgtcccgccgcaacgcgtggggcaacctgtcctacgccgacctcatcaccaaggccatcgagagctcggcggagaagcggctcacgctgtcgcagatctacgagtggatggtcaagagcgtgccctacttcaaggataagggtgacagcaacagctcggcgggctggaagaattcaattcgtcataatctgtccctacacagcaagttcattcgtgtgcagaatgaaggaactggaaaaagttcttggtggatgctcaatccagagggtggcaagagcgggaaatctcctaggagaagagctgcatccatggacaacaacagtaaatttgctaagagccgaagccgagctgccaagaagaaagcatctctccagtctggccaggagggtgctggggacagccctggatcacagttttccaaatggcctgcaagccctggctctcacagcaatgatgactttgataactggagtacatttcgccctcgaactagctcaaatgctagtactattagtgggagactctcacccattatgaccgaacaggatgatcttggagaaggggatgtgcattctatggtgtacccgccatctgccgcaaagatggcctctactttacccagtctgtctgagataagcaatcccgaaaacatggaaaatcttttggataatctcaaccttctctcatcaccaacatcattaactgtttcgacccagtcctcacctggcaccatgatgcagcagacgccgtgctactcgtttgcgccaccaaacaccagtttgaattcacccagcccaaactaccaaaaatatacatatggccaatccagcatgagccctttgccccagatgcctatacaaacacttcaggacaataagtcgagttatggaggtatgagtcagtataactgtgcgcctggactcttgaaggagttgctgacttctgactctcctccccataatgacattatgacaccagttgatcctggggtagcccagcccaacagccgggttctgggccagaacgtcatgatgggccctaattcggtcatgtcaacctatggcagccaggcatctcataacaaaatgatgaatcccagctcccatacccaccctggacatgctcagcagacatctgcagttaacgggcgtcccctgccccacacggtaagcaccatgccccacacctcgggtatgaaccgcctgacccaagtgaagacacctgtacaagtgcctctgccccaccccatgcagatgagtgccctggggggctactcctccgtgagcagctgcaatggctatggcagaatgggccttctccaccaggagaagctcccaagtgacttggatggcatgttcattgagcgcttagactgtgacatggaatccatcattcggaatgacctcatggatggagatacattggattttaactttgacaatgtgttgcccaaccaaagcttcccacacagtgtcaagacaacgacacatagctgggtgtcaggctgagggttagtgagcaggttacacttaaaagtacttcagattgtctgacagcaggaactgagagaagcagtccaaagatgtctttcaccaactcccttttagttttcttggttaaaaaaaaaaacaaaaaaaaaaaccctcctttttttcctttcgtcagacttggcagcaaagacatttttcctgtacaggatgtttgcccaatgtgtgcaggttatgtgctgctgtagataaggactgtgccattggaaatttcattacaatgaagtgccaaactcactacaccatataattgcagaaaagattttcagatcctggtgtgctttcaagttttgtatataagcagtagatacagattgtatttgtgtgtgtttttggtttttctaaatatccaattggtccaaggaaagtttatactctttttgtaatactgtgatgggcctcatgtcttgataagttaaacttttgtttgtactacctgttttctgcggaactgacggatcacaaagaactgaatctccattctgcatctccattgaacagccttggacctgttcacgttgccacagaattcacatgagaaccaagtagcctgttatcaatctgctaaattaatggacttgttaaacttttggaaaaaaaaagattaaatgccagctttgtacaggtcttttctatttttttttgtttattttgttatttgcaaatttgtacaaacatttaaatggttctaatttccagataaatgatttttgatgttattgttgggacttaagaacatttttggaatagatattgaactgtaataatgttttcttaaaactagagtctactttgttacatagtcagcttgtaaattttgtggaaccacaggtatttggggcagcattcataattttcattttgtattctaactggattagtactaattttatacatgcttaactggtttgtacactttgggatgctacttagtgatgtttctgactaatcttaaatcattgtaattagtacttgcatattcaacgtttcaggccctggttgggcaggaaagtgatgtatagttatggacactttgcgtttcttatttaggataacttaatatgtttttatgtatgtattttaaagaaatttcatctgcttctactgaactatgcgtactgcatagcatcaagtcttctctagagacctctgtagtcctgggaggcctcataatgtttgtagatcagaaaagggagatctgcatctaaagcaatggtcctttgtcaaacgagggattttgatccacttcaccattttgagttgagctttagcaaaagtttcccctcataattctttgctcttgtttcagtccaggtggaggttggttttgtagttctgccttgaggaattatgtcaacactcatacttcatctcattctcccttctgccctgcagattagattacttagcacactgtggaagtttaagtggaaggagggaatttaaaaatgggacttgagtggtttgtagaatttgtgttcataagttcagatgggtagcaaatggaatagaacttacttaaaaattggggagatttatttgaaaaccagctgtaagttgtgcattgagattatgttaaaagccttggcttaagaatttgaaaatttctttagcctgtagcaacctaaactgtaattcctatcattatgttttattactttccaattacctgtaactgacagaccaaattaattggctttgtgtcctatttagtccatcagtattttcaagtcatgtggaaagcccaaagtcatcacaatgaagagaacaggtgcacagcactgttcctcttgtgttcttgagaaggatctaatttttctgtatatagcccacatcacacttgctttgtcttgtatgttaattgcatcttcattggcttggtatttcctaaatgtttaacaagaacacaagtgttcctgataagatttcctacagtaagccagctgtattgtaagcttcccaccgtgatgatcatttttttgaagattcattgaacagccaccactctatcatcctcattttggggcagtccaagacatagctggttttagaaacccaagttcctctaagcacagcctcccgggtatgtaactgaacttggtgccaaagtacttgtgtactaatttctattactacgtactgtcactttcctcccgtgccattactgcatcataatacaaggaacctcagagcccccatttgttcattaaagaggcaactacagccaaaatcactgttaaaatcttactacttcatggagtagctcttaggaaaatatatcttcctcctgagtctgggtaattatacctctcccaagcccccattgtgtgttgaaatcctgtcatgaatccttggtagctctctgagaacagtgaagtccagggaaaggcatctggtctgtctggaaagcaaacattatgtggcctctggtagtttttttcctgtaagaatactgactttctggagtaatgagtatatatcagttattgtacatgattgctttgtgaaatgtgcaaatgatatcacctatgcagccttgtttgatttattttctctggtttgtactgttattaaaagcatattgtattatagagctattcagatattttaaatataaagatgtattgtttccgtaatatagacgtatggaatatatttaggtaatagatgtattacttggaaagttctgctttgacaaactgacaaagtctaaatgagcacatgtatcccagtgagcagtaaatcaatggaacatcccaagaagaggataaggatgcttaaaatggaaatcattctccaacgatatacaaattggacttgttcaactgctggatatatgctaccaataaccccagccccaacttaaaattcttacattcaagctcctaagagttcttaatttataactaattttaaaagagaagtttcttttctggttttagtttgggaataatcattcattaaaaaaaatgtattgtggtttatgcgaacagaccaacctggcattacagttggcctctccttgaggtgggcacagcctggcagtgtggccaggggtggccatgtaagtcccatcaggacgtagtcatgcctcctgcatttcgctacccgagtttagtaacagtgcagattccacgttcttgttccgatactctgagaagtgcctgatgttgatgtacttacagacacaagaacaatctttgctataattgtataaagccataaatgtacataaattatgtttaaatggcttggtgtctttcttttctaattatgcagaataagctctttattaggaattttttgtgaagctattaaatacttgagttaa

SEQ ID NO: 3897 - protein, 655 aa, Homo sapiens
MAEAPQVVEIDPDFEPLPRPRSCTWPLPRPEFSQSNSATSSPAPSGSAAANPDAAAGLPSASAAAVSADFMSNLSLLEESEDFPQAPGSVAAAVAAAAAAAATGGLCGDFQGPEAGCLHPAPPQPPPPGPLSQHPPVPPAAAGPLAGQPRKSSSSRRNAWGNLSYADLITKAIESSAEKRLTLSQIYEWMVKSVPYFKDKGDSNSSAGWKNSIRHNLSLHSKFIRVQNEGTGKSSWWMLNPEGGKSGKSPRRRAASMDNNSKFAKSRSRAAKKKASLQSGQEGAGDSPGSQFSKWPASPGSHSNDDFDNWSTFRPRTSSNASTISGRLSPIMTEQDDLGEGDVHSMVYPPSAAKMASTLPSLSEISNPENMENLLDNLNLLSSPTSLTVSTQSSPGTMMQQTPCYSFAPPNTSLNSPSPNYQKYTYGQSSMSPLPQMPIQTLQDNKSSYGGMSQYNCAPGLLKELLTSDSPPHNDIMTPVDPGVAQPNSRVLGQNVMMGPNSVMSTYGSQASHNKMMNPSSHTHPGHAQQTSAVNGRPLPHTVSTMPHTSGMNRLTQVKTPVQVPLPHPMQMSALGGYSSVSSCNGYGRMGLLHQEKLPSDLDGMFIERLDCDMESIIRNDLMDGDTLDFNFDNVLPNQSFPHSVKTTTHSWVSG

SEQ ID NO: 3898 - DNA, 1284 bp, Homo sapiens
ggttcatttcgtgtctcggcgatgtttcctagagtctcgacgttcctacctcttcgccccctttcccgccaccctttgtcctctggaagcccggagacatcagcggctgcgattatgctactcactgttcggcacggaacagtcaggtaccgcagttcagcgctgttggcccggacaaaaaataacatccaaagatattttggcactaacagtgtgatctgtagcaagaaagataagcagtctgttcgaactgaggagacttccaaggagacttcagagagccaagacagtgaaaaggaaaatacgaaaaaagacttgttaggcattattaagggcatgaaagttgaattaagcacagtaaatgtacgaacaacaaagccccccaaaagaagaccacttaaaagtttggaagctacacttggcaggcttcgaagagctacagaatatgctccaaagaagagaattgagcccctgagtcctgagttggtggcagctgcatctgctgtggcagattctctcccttttgataagcaaacaaccaagtcagagctgctgagccagctccagcagcatgaggaagagtcaagggcacagagagatgcaaagcgacctaaaattagtttcagtaacataatatcagatatgaaagttgccagatctgctacagctagagttcgttcaagaccagagcttcggattcagtttgatgaaggctatgacaattatcctggccaggagaagacggatgatcttaaaaaaaggaaaaatatattcacagggaaaagacttaatatttttgacatgatggcagttactaaagaagcacctgaaacagacacatcaccttcactttggaatgtggaatttgctaagcagttagccacagtaaatgaacaaccccttcagaatggatttgaagagctgatccagtggacaaaagaggggaaactatgggagttcccaattaacaatgaagcaggttttgatgatgatggttcagaatttcatgaacatatatttctggagaaacacctggagagctttccaaaacaaggaccaattcgccacttcatggagctggtgacttgtggcctttccaaaaacccatatcttagtgttaaacagaaggttgaacacatagagtggtttagaaattattttaatgaaaaaaaggatattctaaaagaaagtaacatacagttcaattaagaccatggaaatttttatttcaaacaattagagatggatattacaactaaataaaataattttactagagtttgt

SEQ ID NO: 3899 - protein, 395 aa, Homo sapiens
MFPRVSTFLPLRPLSRHPLSSGSPETSAAAIMLLTVRHGTVRYRSSALLARTKNNIQRYFGTNSVICSKKDKQSVRTEETSKETSESQDSEKENTKKDLLGIIKGMKVELSTVNVRTTKPPKRRPLKSLEATLGRLRRATEYAPKKRIEPLSPELVAAASAVADSLPFDKQTTKSELLSQLQQHEEESRAQRDAKRPKISFSNIISDMKVARSATARVRSRPELRIQFDEGYDNYPGQEKTDDLKKRKNIFTGKRLNIFDMMAVTKEAPETDTSPSLWNVEFAKQLATVNEQPLQNGFEELIQWTKEGKLWEFPINNEAGFDDDGSEFHEHIFLEKHLESFPKQGPIRHFMELVTCGLSKNPYLSVKQKVEHIEWFRNYFNEKKDILKESNIQFN

SEQ ID NO: 3900 - DNA, 830 bp, Homo sapiens
cccccccgagcgccgctccggctgcaccgcgctcgctccgagtttcaggctcgtgctaagctagcgccgtcgtcgtctcccttcagtcgccatcatgattatctaccgggacctcatcagccacgatgagatgttctccgacatctacaagatccgggagatcgcggacgggttgtgcctggaggtggaggggaagatggtcagtaggacagaaggtaacattgatgactcgctcattggtggaaatgcctccgctgaaggccccgagggcgaaggtaccgaaagcacagtaatcactggtgtcgatattgtcatgaaccatcacctgcaggaaacaagtttcacaaaagaagcctacaagaagtacatcaaagattacatgaaatcaatcaaagggaaacttgaagaacagagaccagaaagagtaaaaccttttatgacaggggctgcagaacaaatcaagcacatccttgctaatttcaaaaactaccagttctttattggtgaaaacatgaatccagatggcatggttgctctattggactaccgtgaggatggtgtgaccccatatatgattttctttaaggatggtttagaaatggaaaaatgttaacaaatgtggcaattattttggatctatcacctgtcatcataactggcttctgcttgtcatccacacaacaccaggacttaagacaaatgggactgatgtcatcttgagctcttcatttattttgactgtgatttatttggagtggaggcattgtttttaagaaaaacatgtcatgtaggttgtctaaaaataaaatgcatttaaactcatttgagag

SEQ ID NO: 3901 - protein, 172 aa, Homo sapiens
MIIYRDLISHDEMFSDIYKIREIADGLCLEVEGKMVSRTEGNIDDSLIGGNASAEGPEGEGTESTVITGVDIVMNHHLQETSFTKEAYKKYIKDYMKSIKGKLEEQRPERVKPFMTGAAEQIKHILANFKNYQFFIGENMNPDGMVALLDYREDGVTPYMIFFKDGLEMEKC

SEQ ID NO: 3902 - DNA, 3372 bp, Homo sapiens
gcggcacggagcgggcgtgctgagccccggccgccggcccggcatgggcgtctcccgcgggccctccgctggccggggctagggccggatggagccgcgggacggtagcccggaggcccggagcagcgactgcgagtcggcttccgcctcgtccagcggctccgagcgcgacgccggtcccgagccggacaaggcgccgcggcgactcaacaagcggcgcttcccggggctgcggctcttcgggcacaggaaagccatcaccaagtctggcctccagcacctggccccccctccgcccacccctggggcccggtgcagcgagtcagagcggcagatccggagtacagtggactggagcgagtcggcgacatatggggagcacatctggttcgagaccaacgtgtccggggacttctgctacgttggggagcagtactgtgtagccaggatgctgcagaagtcagtgtctcgaagaaagtgcgcagcctgcaagattgtggtgcacacgccctgcatcgagcagctggagaagataaatttccgctgtaagccatccttccgtgaatcaggctccaggaatgtcctcgagccaacctttgtatggcaccactgggtacacagacgacgccaggacggcaagtgtcggcactgtgggaagggattccagcagaagttcaccttccacagcaaggagattgtggccatcagctgctcgtggtgcaagcaggcataccacagcaaggtgtcctgcttcgtgctgcagcagatcgaggagccgtgctcgctgggggtccacgcagccgtggtcatcccgcccacctggatcctccgcgcccggaggccccagaatactctgaaagcaagcaagaagaagaagagggcatccttcaagaggaagtccagcaagaaagggcctgaggagggccgctggagacccttcatcatcaggcccaccccctcccccctcatgaagcccctgctggtgtttgtgaaccccaagagtgggggcaaccagggtgcaaagatcatccagtctttcctctggtatctcaatccccgacaagtcttcgacctgagccagggagggcccaaggaggcgctggagatgtaccgcaaagtgcacaacctgcggatcctggcgtgcgggggcgacggcacggtgggctggatcctctccaccctggaccagctacgcctgaagccgccaccccctgttgccatcctgcccctgggtactggcaacgacttggcccgaaccctcaactggggtgggggctacacagatgagcctgtgtccaagatcctctcccacgtggaggaggggaacgtggtacagctggaccgctgggacctccacgctgagcccaaccccgaggcagggcctgaggaccgagatgaaggcgccaccgaccggttgcccctggatgtcttcaacaactacttcagcctgggctttgacgcccacgtcaccctggagttccacgagtctcgagaggccaacccagagaaattcaacagccgctttcggaataagatgttctacgccgggacagctttctctgacttcctgatgggcagctccaaggacctggccaagcacatccgagtggtgtgtgatggaatggacttgactcccaagatccaggacctgaaaccccagtgtgttgttttcctgaacatccccaggtactgtgcgggcaccatgccctgcggccaccctggggagcaccacgactttgagccccagcggcatgacgacggctacctcgaggtcattggcttcaccatgacgtcattggccgcgctgcaggtgggcggacacggcgagcggctgacgcagtgtcgcgaggtggtgctcaccacatccaaggccatcccggtgcaggtggatggcgagccctgcaagcttgcagcctcacgcatccgcattgccctgcgcaaccaggccaccatggtgcagaaggccaagcggcggagcgccgcccccctgcacagcgaccagcagccggtgccagagcagttgcgcatccaggtgagacgcgtcagcatgcacgactatgaggccctgcactacgacaaggagcagctcaaggaggcctccgtgccgctgggcactgtggtggtcccaggagacagtgacctagagctctgccgtgcccacattgagagactccagcaggagcccgatggtgctggagccaagtccccgacatgccagaaactgtcccccaagtggtgcttcctggacgccaccactgccagccgcttctacaggatcaaccgagcccaggagcacctcaactatgtgactgagatcgcacaggatgagatttatatcctggaccctgagctgctgggggcatcggcccggcctgacctcccaacccccacttcccctctccccacctcaccctgctcacccacgccccggtcactgcaaggggatgctgcaccccctcaaggtgaagagctgattgaggctgccaagaggaacgacttctgtaagctccaggagctgcaccgagctgggggcgacatcatgcaccgagacaagcagagtcgcacgctcctgcaccacgcagtcagcactggcagcaaggatgtggtccgctacctgctggaccacgctcccccagagatccttgatgcggtggaggaaaacggggagacctgtttgcaccaagcagcggccctgggccagcgcaccatctgccactacatcgtggaggccggggccagaccagcagggcgacactccccggcagcaggctgagaaggctcaggacaccgagctggcggcctacctggagaaccggcagcactaccagatgatccagcgggaggaccaggagacggctgtgtagcgggccgcccacgggcagcaggagggacaatgcggccaggggatgagcgccttccttgcccacctcactgccacattccagtgggacggccacggggggacctaggccccagggaaagagccccatgccgccccctaaggagccgcacagacctagggctggactcaggagctggggggcctcacctgttcccctgaggaccccgccggacccggaggctcacagggaacaagacacggctgggttggatatgcctttgccggggttctggggcagggcgctccctggccgcagcagatgccctcccaggagtggaggggctggagaggggaaggccttcgggaagaggcttcctgggccccctggtcttcggccgggtccccagcccccgctcctgccccaccccacctcccccgggcttcctcccggaaactcagtgcctgctgcacttgcctgccctgccttgcttggcacccgctccggcgaccctccccgctcctctgtcatt

SEQ ID NO: 3903 - DNA, 3724 bp, Homo sapiens
tttttctttcctggctgatgatttgtcattctagtcacttcctgccttgtgaccacacacccaggcttgacaaagctgttctgcagatcagaaagaaggggttcctggtcatacaccagtactaccaaggacagcttttttcctgcaagatctgttacctaaagcaataaaaaatggccagaggatcagtgtccgatgaggaaatgatggagctcagagaagcttttgccaaagttgatactgatggcaatggatacatcagcttcaatgagttgaatgacttgttcaaggctgcttgcttgcctttgcctgggtatagagtacgagaaattacagaaaacctgatggctacaggtgatctggaccaagatggaaggatcagctttgatgagtttatcaagattttccatggcctaaaaagcacagatgttgccaagacctttagaaaagcaatcaataagaaggaagggatttgtgcaatcggtggtacttcagagcagtctagcgttggcacccaacactcctattcagaggaagaaaagtatgcctttgtcaactggataaacaaagccctggaaaatgatcctgattgtcggcatgtcatcccaatgaacccaaacacgaatgatctctttaatgctgttggagatggcattgtcctttgtaaaatgatcaacctgtcagtgccagacacaattgatgaaagaacaatcaacaaaaagaagctaacccctttcaccattcaggaaaatctgaacttggctctgaactctgcctcagccatcgggtgccatgtggtcaacataggggctgaggacctgaaggaggggaagccttatctggtcctgggacttctgtggcaagtcatcaagattgggttgtttgctgacattgaactcagcagaaatgaagctctgattgctcttttgagagaaggtgagagcctggaggatttgatgaaactctcccctgaagagctcttgctgaggtgggctaattaccacctggaaaatgcaggctgcaacaaaattggcaacttcagtactgacatcaaggactcaaaagcttattaccacctgcttgagcaggtggctccaaaaggagatgaagaaggtgttcctgctgttgttattgacatgtcaggactgcgggagaaggatgacatccagagggcagaatgcatgctgcagcaggcggagaggctgggctgccggcagtttgtcacagccacagatgttgtccgagggaaccccaagttgaacttggcttttattgccaacctctttaacagataccctgccctgcacaaaccagagaaccaggacattgactggggggctcttgaaggtgagacgagagaagagcggacatttaggaactggatgaactccctgggtgttaaccctcgagtcaatcatttgtacagtgacttatcagatgccctggtcatcttccagctctatgaaaagatcaaagttcctgttgactggaacagagtaaacaaaccgccataccccaaactgggaggcaatatgaagaagcttgagaattgtaactacgcggtagaattggggaagaatcaagcgaagttctccctggttggcatcggtggacaagatctcaatgaaggaaaccgcactctcacactggccttgatttggcagctaatgagaaggtatacactgaatatcctcgaagaaattggtggtggccagaaggtcaatgatgacattattgtcaactgggtgaatgaaacattgagggaagcaaagaaaagttcatccatctctagtttcaaggacccgaagattagtacaagtctgcctgttctggacctcatcgatgccatccaaccaggttccattaactatgaccttctgaagacagaaaatctgaatgatgatgagaaactcaacaatgcaaaatatgccatctctatggcccgaaaaattggagcaagagtgtatgccctgccagaagacctggttgaagtgaaccccaaaatggtcatgaccgtgtttgcctgcctcatggggaaaggaatgaagagggtgtgaggcccaatggggctgggtgggaggcggtgcactcactcctgactgcccggcacagatgctccagggatgattcaagccattccaaagttcaacttggtgacactctataagattccaaaaagcacatattagtgcagccaagtagcctctcctgtatttaacaaaaagtgcttcattctttgcaggaggcccaacctcctatatataggtttctattcttgatttatttgcttcttcgaaaatctagaggaaaagaaagaagttattttccaggtacccttctcgcttttgccattagccaaggatagaagctgcagtggtattaattttgatataatctttcaaaccagcttcatgtggcttcccttttctttgttcaagatgagggccaggaggggaaacatcacacctgccctaaaccctgttcctggaggtcagcatttgatctgttgcaagcccctctttctgtcccctcttcctaccctgcctcccttgactttgctcctcacacttttggaaccatgccttccgggggggcccatctcttctggccgtccttgtctctgggccacttggagtgtgtgataaatcagtcaagctgttgaagtctcaggagtctctggtagcctgcagaagtaagcctcatcatcagagcctttcctcaaaactggagtcccaaatgtcatcaggttttgttttttttcagccactaagaacccctctgcttttaactctagaatttgggcttggaccagatctaacatcttgaatactctgccctctagagccttcagccttaatggaaggttggatccaaggagggtgtaatggagcatcaagccactcggcggcagcatggagctataactaagcatcctttagggttctgcctctccaggcatttagccctcacattagatctagttactgtggtatggctaatacctgtcaacatttggaggcaatcctaccttgcttttgcttctagagcttagcatatctgattgttgtcaggccatattatcaatgtttacttttttggtactataaaagctttctgccacccctaaactccaggggggacaatatgtgccaatcaatagcacccctactcacatacacacacacctagccagctgtcaagggcagaatgaatctatgctggataagaaatggtggaactgcgttatgaagagctaatttactggacaaagaattccaaagcaaaaccagaacagtatgaatttgagcaggtctcataggttgagcaatttccccctaaaccaactgaaggctaaaaagcaacaggccattgtgaaccaatgcaagacgccctctatcatggtgaaaagctccatcaatgaggtatcttctttagtggtggtatgtaatggaacttagccatttttcaaagcaattgaaatgcattgctctggatctgttccttggcagtggactcagaaagccaacatgtggctcctcccagcccataaccagtatttttgctgcttctgaatacaaattggttggttttgacttcagattgaacttactgtagcctcagatgatttcccccctccgcctccaggaagaaagaatgttactgccttaataaaaaatgaaaagagaatgatgctcaaaatctttccaaataaaatgttccctat

SEQ ID NO: 3904 - DNA, 1191 bp, Homo sapiens
aaagcgagagtgagtgggaccggaggggcggggcatcatatgggcggggctgaggcgaggccccggcggccatcttgagccccgccttttacttcggcccgcttcttctggtcactccgccaccgtagaatcgcctaccatttggtgcaagcaaaaagcaatcagcaattggacaggaaaagaatggcattgaagcagatttccagcaacaagtgctttgggggattgcagaaagtttttgaacatgacagtgttgaactaaactgcaaaatgaaatttgctgtctacttaccaccaaaggcagaaacaggaaagtgccctgcactgtattggctctcaggtttaacttgcacagagcaaaattttatatcaaaatctggttatcatcagtctgcttcagaacatggtcttgttgtcattgctccagataccagccctcgtggctgcaatattaaaggtgaagatgagagctgggactttggcactggtgctggattttatgttgatgccactgaagatccttggaaaaccaactacagaatgtactcttatgtcacagaggagcttccccaactcataaatgccaattttccagtggatccccaaaggatgtctatttttggccactccatgggaggtcatggagctctgatctgtgctttgaaaaatcctggaaaatacaaatctgtgtcagcatttgctccaatttgcaaccctgtactctgtccctggggcaaaaaagcctttagtggatatttgggaacagatcaaagtaaatggaaggcttatgatgctacccaccttgtgaaatcctatccaggatctcagctggacatactaattgatcaagggaaagatgaccagtttcttttagatggacagttactccctgataacttcatagctgcctgtacagaaaagaaaatccccgttgtttttcgattgcaagagggttatgatcatagctactacttcattgcaacctttattactgaccacatcagacatcatgctaaatacctgaatgcatgaaaaaactccaaataagagaatctcttcaggattataaaagttgtaaaatgcaactgtattgctgagcaaaaaaaaaaaaaattcaaaacattggattttatagtgctaaaagggctttattctatagttgaatcacctctgaataaagatataaaacct

SEQ ID NO: 3905 - protein, 282 aa, Homo sapiens
MALKQISSNKCFGGLQKVFEHDSVELNCKMKFAVYLPPKAETGKCPALYWLSGLTCTEQNFISKSGYHQSASEHGLVVIAPDTSPRGCNIKGEDESWDFGTGAGFYVDATEDPWKTNYRMYSYVTEELPQLINANFPVDPQRMSIFGHSMGGHGALICALKNPGKYKSVSAFAPICNPVLCPWGKKAFSGYLGTDQSKWKAYDATHLVKSYPGSQLDILIDQGKDDQFLLDGQLLPDNFIAACTEKKIPVVFRLQEGYDHSYYFIATFITDHIRHHAKYLNA

SEQ ID NO: 3906 - DNA, 1424 bp, Homo sapiens
ggccggtggcgggactctggggaaaatggctgcgtcttcgagtggtgagaaggagaaggagcggctgggaggcggtttgggagtggcgggtggtaacagcacacgagagcggctgctgtctgcgcttgaggacttggaggtcctgtctagggaacttatagaaatgctggcaatttcaagaaaccaaaagttgttacaggctggagaggaaaaccaggtcctggagttgttaattcaccgagatggggaatttcaagaactaatgaaattggcacttaatcagggaaaaattcatcatgaaatgcaagttttagaaaaagaagtagagaagagagacagtgatattcagcagctacaaaaacagctaaaggaagcagaacaaatactggcaacagctgtttaccaagcgaaggagaaactcaagtcaatagaaaaagcaagaaaaggtgctatctcctctgaagaaataattaagtatgcacataggatcagtgcaagtaatgctgtatgtgctccactgacctgggttccaggggacccccggagaccctacccaactgatttagagatgagaagtgggttactgggtcagatgaacaatccttccactaatggcgtgaatggccatttaccaggagatgcacttgcagcaggaagattgccagatgtccttgctccacagtatccatggcagtcaaatgacatgtcgatgaatatgttaccaccaaatcatagtagtgactttttgttggaacctcctgggcataataaagaaaatgaagatgatgtagagattatgtcaacggactcctcaagcagtagtagtgagtctgattgaaaaacttaaaagacaatatacagaattgaatactgtagaattctgtttctttaacagtagcagggaaatgtaaactacaggtgacaaaaaatacccaggtaaacactggctttggtagaattgtgcagtcattaaaagtcaaaattttttgactttctttttaaagccaaagaccatagttttagttttaagccactaggtagatatttaggggaatagtcaaaatttactgttgaaaaagcagttgctatgtgctttcttaccctgttctgttccagttttgctggatttgtacatagccattctagaaatagagttgagggaaattatccatatacatatcactaataggcttcttggaattatttagaaaagcatttttaaactggcagtggatgactgaataggcatcatatttctttttgtgtgtcatttaaaagtaacaaaaactgccatttgacagtaaaggctcttggcttctgttggaggcatgggaaattgtctcaatttgtacagtttgtaattgtaatttttgtaaataaatttgtttgtacattgaaaaaaaaaaaaaaaaaaaaaaaaaaaa

SEQ ID NO: 3907 - protein, 270 aa, Homo sapiens
MAASSSGEKEKERLGGGLGVAGGNSTRERLLSALEDLEVLSRELIEMLAISRNQKLLQAGEENQVLELLIHRDGEFQELMKLALNQGKIHHEMQVLEKEVEKRDSDIQQLQKQLKEAEQILATAVYQAKEKLKSIEKARKGAISSEEIIKYAHRISASNAVCAPLTWVPGDPRRPYPTDLEMRSGLLGQMNNPSTNGVNGHLPGDALAAGRLPDVLAPQYPWQSNDMSMNMLPPNHSSDFLLEPPGHNKENEDDVEIMSTDSSSSSSESD

SEQ ID NO: 3908 - DNA, 1843 bp, Homo sapiens
gcgagatccctaccgcagtagccgcctctgccgccgcggagcttcccgaacctctcagccgcccggagccgctcccggagcccggccgtagaggctgcaatcgcagccgggagcccgcagcccgcgccccgagcccgccgccgcccttcgagggcgccccaggccgcgccatggtgaaggtgacgttcaactccgctctggcccagaaggaggccaagaaggacgagcccaagagcggcgaggaggcgctcatcatcccccccgacgccgtcgcggtggactgcaaggacccagatgatgtggtaccagttggccaaagaagagcctggtgttggtgcatgtgctttggactagcatttatgcttgcaggtgttattctaggaggagcatacttgtacaaatattttgcacttcaaccagatgacgtgtactactgtggaataaagtacatcaaagatgatgtcatcttaaatgagccctctgcagatgccccagctgctctctaccagacaattgaagaaaatattaaaatctttgaagaagaagaagttgaatttatcagtgtgcctgtcccagagtttgcagatagtgatcctgccaacattgttcatgactttaacaagaaacttacagcctatttagatcttaacctggataagtgctatgtgatccctctgaacacttccattgttatgccacccagaaacctactggagttacttattaacatcaaggctggaacctatttgcctcagtcctatctgattcatgagcacatggttattactgatcgcattgaaaacattgatcacctgggtttctttatttatcgactgtgtcatgacaaggaaacttacaaactgcaacgcagagaaactattaaaggtattcagaaacgtgaagccagcaattgtttcgcaattcggcattttgaaaacaaatttgccgtggaaactttaatttgttcttgaacagtcaagaaaaacattattgaggaaaattaatatcacagcataaccccaccctttacattttgtgcagtgattattttttaaagtcttctttcatgtaagtagcaaacagggctttactatcttttcatctcattaattcaattaaaaccattaccttaaaatttttttctttcgaagtgtggtgtcttttatatttgaattagtaactgtatgaagtcatagataatagtacatgtcaccttaggtagtaggaagaattacaatttctttaaatcatttatctggatttttatgttttattagcattttcaagaagacggattatctagagaataatcatatatatgcatacgtaaaaatggaccacagtgacttatttgtagttgttagttgccctgctacctagtttgttagtgcatttgagcacacattttaattttcctctaattaaaatgtgcagtattttcagtgtcaaatatatttaactatttagagaatgatttccacctttatgttttaatatcctaggcatctgctgtaataatattttagaaaatgtttggaatttaagaaataacttgtgttactaatttgtataacccatatctgtgcaatggaatataaatatcacaaagttgtttaactagactgcgtgttgtttttcccgtataataaaaccaaagaatagtttggttcttcaaatcttaagagaatccacataaaagaagaaactattttttaaaaattcacttctatatatacaatgagtaaaatcacagattttttctttaaataaaaataagtcattttaataactaaaccagattctttgtggatactattaaagtaacatttaagcctcaaccttg

SEQ ID NO: 3909 - protein, 266 aa, Homo sapiens
MVKVTFNSALAQKEAKKDEPKSGEEALIIPPDAVAVDCKDPDDVVPVGQRRAWCWCMCFGLAFMLAGVILGGAYLYKYFALQPDDVYYCGIKYIKDDVILNEPSADAPAALYQTIEENIKIFEEEEVEFISVPVPEFADSDPANIVHDFNKKLTAYLDLNLDKCYVIPLNTSIVMPPRNLLELLINIKAGTYLPQSYLIHEHMVITDRIENIDHLGFFIYRLCHDKETYKLQRRETIKGIQKREASNCFAIRHFENKFAVETLICS

SEQ ID NO: 3910 - DNA, 2002 bp, Homo sapiens
tttagtaaatcacacaaaaatccagcagaaattgtgaaaatcctgaaagacaatttggccattttggaaaagcaagacaaaaagacagacaaggcttcagaagaagtgtctaaatcactgcaagcaatgaaagaaattctgtgtggtacaaacgagaaagaacccccaacagaagcagtggctcagctagcacaagaactctacagcagtggcctgctggtgacactgatagctgacctgcagctgatagactttgagggaaaaaaagatgtgacccagatatttaacaacatcttgagaagacagataggcactcggagtcctactgtggagtatattagtgctcatcctcatatcctgtttatgctcctcaaaggatatgaagccccacagattgccttacgttgtgggattatgctgagagaatgtattcgacatgaaccacttgtcaaaatcatcctcttttctaatcaattcagagatttctttaagtacgtggagttgtcaacatttgatattgcttcagatgcctttgctactttcaaggatttactaaccagacataaagtgttggtagcagacttcttagaacaaaattacgacactatttttgaagactatgagaaattgcttcagtctgagaattatgttactaagagacagtctttaaagctgctaggggagctgatcctggaccgtcacaactttgccatcatgacaaagtatatcagcaagccggagaacctgaaactcatgatgaacctccttcgggataaaagtcccaacatccagtttgaagcctttcatgtttttaaggtgtttgtggccagtcctcacaaaacacagcctattgtggagatcctgttaaaaaatcagcccaaactcattgagtttctgagcagcttccaaaaagaaaggacggatgatgagcagttcgctgacgagaagaactacttgattaaacagatccgagacttgaagaaaacggccccttgaagagctccccggcccctgtcacagtcagtcgtctcatttgtccagtttgtacagtgtgtcatttcagaaagtcatcattcttgggaagactttggaggtgcctattttttctgctgtaattgttctgggtagatggagtataaacatttgaatggaaaaaaattaacctagaataatatattcattttagtcaagtctgtgattatttatgtgaaatgagaaccattgtatcagatgttgataaaagcaattttaacttgcagatgtgagcccctgggcacaatgagccgctaaatgggagctcaattgacaggcatcaccaagtcttcaaggaggactgagttctcaggggagaactgggaatggggccagggtgcaaaaatgctttgcccatctgtaggtagacacacagatcgctcagggcactgagagatcccagaaggtaacgttaatgttttcagtcattgtgtgtcctttgttgctgccaatgtctttggactgtaatcagtgcatccacacctcccaggatccagtgctccctctcagctcagtctcccctctctccctgtcctgcattccatcccagctcctcagcatggcctcagtgggcgcacccatgcctcccgcagtccaggtgagcaggggagcaactgagcaggaagaggatggatcaacaagggtcacggggaataggggacccacggggtgtgacctgcttgctagagaactgtgaacatgtggctctggatagagtgactgctgctccatattagcttccagagggtgagtgagggacagaatatttccttcataatggtcatgggtgaatgctttctgctgtaagtgtcttttagagtaggaatcagcatagtgggatgcccagcaggcacaaaccatgggtccagggagtctcagcggggaacttctatcagtatcaataaccattggaaggagaaatgattcatgtgtgaaaaaattctcagatccatcaataaatttttttcag

SEQ ID NO: 3911 - protein, 289 aa, Homo sapiens
MKEILCGTNEKEPPTEAVAQLAQELYSSGLLVTLIADLQLIDFEGKKDVTQIFNNILRRQIGTRSPTVEYISAHPHILFMLLKGYEAPQIALRCGIMLRECIRHEPLVKIILFSNQFRDFFKYVELSTFDIASDAFATFKDLLTRHKVLVADFLEQNYDTIFEDYEKLLQSENYVTKRQSLKLLGELILDRHNFAIMTKYISKPENLKLMMNLLRDKSPNIQFEAFHVFKVFVASPHKTQPIVEILLKNQPKLIEFLSSFQKERTDDEQFADEKNYLIKQIRDLKKTAP

SEQ ID NO: 3912 - DNA, 1323 bp, Homo sapiens
cacaaaggcaccaaaccacaaaacgtcacacgtaaacatcatacgtggcaaccacaagccaatcagttggatatttcattcattggtatacatatggactgtaaggtgtctttcaggttgcagaaaagatggaaaaaaggacatgtgcactctgccccaaagatgtcgaatataatgtcctgtactttgcacaatcagagaatatagctgctcatgagaattgtttgctgtattcttcaggacttgtggaatgtgaggatcaggatccacttaatcctgatagaagttttgatgtggaatcagtaaagaaagaaatccagagaggaaggaagttgaaatgcaaattttgtcataaaagaggagccaccgtgggatgtgatttaaaaaactgtaacaagaattaccactttttctgtgccaagaaggacgacgcagttccacagtctgatggagttcgaggaatttataaactgctttgccagcaacatgctcaattcccgatcatcgctcaaagtgctaaattttcaggagtgaaaagaaaaagaggaaggaagaaacccctctcaggcaatcatgtacagccacccgaaacaatgaaatgtaatacattcataagacaagtgaaagaagagcatggcagacacacagatgcaactgtgaaagttccttttcttaagaaatgcaagggaagcaggacttcttaattacttacttgaagaaatattagacaaagttcattcaattccagaaaaactcatggatgagacttacttcagaatcagactatgaagaaatcgggagtgcactttttgactgtagattgttcgaagacacatttgtaaattttcaagcagcaatagagaaaaaaattcatgcatctcaacaaaggtggcagcagttgaaggaagagattgagctacttcaggacttaaaacaaaccttgtgctcttttcaagaaaatagagatcttatgtcaagttctacatcaatatcatccctgtcttattagggattaccatttcctaagccaagagtcatgtcaaattgcaatcaggctcaaaaccagagaccaggctgtgaaatccacacatctttagaactagtcgtctcctcttggcctcagcagctcttccctgttcttactggttgacattttgatcactctttgcacactcttgtgttttttgctcactgtcacactcccagcacctagtatgctcagtaaatgtttgtggaataagtgcataaaatgttcttaacctttgattctacttacagcccatgatagcctcttagatataataaatttggattatactaaaa

SEQ ID NO: 3913 - protein, 191 aa, Homo sapiens
MEKRTCALCPKDVEYNVLYFAQSENIAAHENCLLYSSGLVECEDQDPLNPDRSFDVESVKKEIQRGRKLKCKFCHKRGATVGCDLKNCNKNYHFFCAKKDDAVPQSDGVRGIYKLLCQQHAQFPIIAQSAKFSGVKRKRGRKKPLSGNHVQPPETMKCNTFIRQVKEEHGRHTDATVKVPFLKKCKGSRTS

SEQ ID NO: 3914 - DNA, 931 bp, Homo sapiens
ttgctttcctctgccgcatggtcctgggccgttggcgtcggaagcctgaagcatgggcgctgagtgggagctgggggccgaggctggcggttcgctgctgctgtgcgccgcgctgctggcggcgggctgcgccctgggcctgcgcctgggccgcgggcagggggcggcggaccgcggggcgctcatctggctctgctacgacgcgctggtgcacttcgcgctggaaggcccttttgtctacttgtctttagtaggaaacgttgcaaattccgatggcttgattgcttctttatggaaagaatatggcaaagctgatgcaagatgggtttattttgatccaaccattgtgtctgtggaaattctgaccgtcgccctggatgggtctctggcattgttcctcatttatgccatagtcaaagaaaaatattaccggcatttcctgcagatcaccctgtgcgtgtgcgagctgtatggctgctggatgaccttcctcccagagtggctcaccagaagccccaacctcaacaccagcaactggctgtactgttggctttacctgtttttttttaacggtgtgtgggttctgatcccaggactgctactgtggcagtcatggctagaactcaagaaaatgcatcagaaagaaaccagttcagtgaagaagtttcagtgaactttcaaaaccataaacaccattatctaacttcatgaaccagaatgaatcaaatctttttgtttggccaaaatgtaatacattccagtctacactttgtttttgtattgttgctcctgaacaacctgtttcaaattggttttaaggcgaccagttttcgttgtattgttgttcaattaaatggtgatatagggaaaagagaacaaatttgaatttgtaataataaaatgtttaattatacaaaaaaaaaaaaaaaaa

SEQ ID NO: 3915 - protein, 206 aa, Homo sapiens
MGAEWELGAEAGGSLLLCAALLAAGCALGLRLGRGQGAADRGALIWLCYDALVHFALEGPFVYLSLVGNVANSDGLIASLWKEYGKADARWVYFDPTIVSVEILTVALDGSLALFLIYAIVKEKYYRHFLQITLCVCELYGCWMTFLPEWLTRSPNLNTSNWLYCWLYLFFFNGVWVLIPGLLLWQSWLELKKMHQKETSSVKKFQ

SEQ ID NO: 3916 - DNA, 548 bp, Homo sapiens
gccattttgtatgccaagagggccagtgtcttcgtcaaattacagaagccaaatgcagccatccgagactgtgacagagccattgaaataaatcctgattcagctcagccttacaagaggcgggggaaagcacacaggcacagaaaattgcagaacatcagagaaagtatgagcgaaaacgtgaagagtgagagatcaaagaaagaatagaacgagttaagaaggctcgaaaagagcatgagagagcccagagggaggaagaagccagatgacagtcaggagctcagtatggctcttttccaggtggctttcctgggggaatgcctggtaattttcctggaggaatggctggaatgggagggggcatacctggaatggccggaatgcctggactcaatgaaattcttagtgatccagaggttcttgcagccatgcaggatccagaagttatggtggccttccaggatgtggctcagaacccagcaaatatgtcaaagtaccagagcaacccaaaggttatgaatctcatcagtaaattgtcagccaaa

SEQ ID NO: 3917 - DNA, 644 bp, Homo sapiens
gccgacgtagaccctgctctgcacgccagcccgcccgcacccaccatggccacagttcagcagctggaaggaagatggcgcctgctggacagcaaaggctttgatgaatacatgaaggagctaggagtgggaatagctttgcaaaaaatgggcgcaatggccaagccagattgtatcatcacttgtgatggcagaaacctcaccacaaaaaccgagagcactttgaaaacaacacagttttcttgtaccctgggagatgagtttgaagaaaccacagctgatggcagaaaaacacagactgtctgcaactttacagatggtgcattggttcagcatcaggagtgggatgggaaggaaagcacaataacaagaaaattgaaagatgggaaattagtggtggagtgtgtcatgaacaatgtcacctgtactcggatctatgaaaaagtagaataaaaattccatcatcactttggacaggagttaactaagagaatgaccaagctcagttcaatgagcaaatctccatactgtttctttcttttttttttcattactgtgttcaattatctttatcacaaacattttacatgcagttatttcaaagtgtgttggattaattaggattatccctttgtttaataaat

SEQ ID NO: 3918 - DNA, 1349 bp, Homo sapiens
tttctgcccgtggacgccgctgaagaagcatcgttaaagtctctcttcaccttgccgtcatgtctaagtcagcgtctccaaaagagcccgaacagctgaggaagctcttcattggagggttgagctttgaaacaactgatgagagcctgaggagccattttgagcaatggggaacgctcacagactgtgtggtaatgagagatccaaacaccaagcgctccaggggctttgggtttgtcacatatgccactgtggaggaggtggatgcagctatgaatacaacgccacacaaggtggatggaagagttgtggaaccaaagagagctgtctccagagaagattctcaaagaccaggtgcccacttaactgtgaaaaagatatttgttggtggcattaaagaagacactgaagaacatcacctaagagattattttgaacagtatggaaaaattgaagtaattgaaatcatgactgaccgaggcagtggcaagaaaaggggctttgcctttgtaacctttgacgaccatgactccgtggataagattgtcattcagaaataccatactgtgaagggccacaactgtgaagttagaaaagccctgccaaagcaagagatggctagtgcttcatccagccaaagaggtcgaaggggttctggaaactttggtggtggtcgtggagatggtttcggtgggaatgacaactttggtcgtggaggaaacttcagtggtcgtggtggctttggtggcagctgtggtggtggtggatatggtggcagtggggatggctataatggatttggtaatgatggaagcaattttggaggtggtggaagctacaatgattttggcaattacaacaatcagtcttcaaattttggacccatgaagggaggaaattttggaggcagaagctctggcccctatggcggtggaggccaatactttgcaaaaccacaaaaccaaggtggctatggcgtttccagcagcagcagtagctatggcagtggcagaagattttaattaggaaacaaagcttagcaggagaggagagccagagaagtgacagggaagctacaggttacaacagatttgtgaactcagccaagcacagtggtggcagggcctagctgctacaaagaagacatgttttagacaaatactcatgtgtatgggcaaaaaactcgaggactgtatttgtgactaattgtataacaggttattttagtttctgttctgtggaaagtgtaaagcattccaacaaagtgttttaatgtagatttttttttttgcacccatgctgttgattgctaaatgtaatagtctgattgtgacgctgaataaatgtct

SEQ ID NO: 3919 - protein, 320 aa, Homo sapiens
MSKSASPKEPEQLRKLFIGGLSFETTDESLRSHFEQWGTLTDCVVMRDPNTKRSRGFGFVTYATVEEVDAAMNTTPHKVDGRVVEPKRAVSREDSQRPGAHLTVKKIFVGGIKEDTEEHHLRDYFEQYGKIEVIEIMTDRGSGKKRGFAFVTFDDHDSVDKIVIQKYHTVKGHNCEVRKALPKQEMASASSSQRGRRGSGNFGGGRGDGFGGNDNFGRGGNFSGRGGFGGSCGGGGYGGSGDGYNGFGNDGSNFGGGGSYNDFGNYNNQSSNFGPMKGGNFGGRSSGPYGGGGQYFAKPQNQGGYGVSSSSSSYGSGRRF

SEQ ID NO: 3920 - DNA, 645 bp, Homo sapiens
accttgccgtcatgtctaagtcagcgtctccaaaagagcccgaacagctgaggaagctcttcattggagggttgagctttgaaacaactgatgagagcctgaggagccattttgagcaatggggaacgctcacagactgtgtggtaatgagagatccaaacaccaagcgctccaggggctttgggtttgtcacatatgccactgtggaggaggtggatgcagctatgaatacaacgccacacaaggtggatggaagagttgtggaaccaaagagagctgtctccagagaagattctcaaagaccaggtgcccacttaactgtgaaaaagatatttgttggtggcattaaagaagacactgaagaacatcacctaagagattattttgaacagtatggaaaaattgaagtaattgaaatcatgactgaccgaggcagtggcaagaaaaggggctttgcctttgtaacctttgacgaccatgactccgtggtggctttggtggcagctgtggtggtggtggatatggtggcagtggggatggctataatggatttggtaatgatggaagcaattttggaggtggtggaagctacaatgattttggcaattacaacaatcagtcttcaaattttggacccatgaaggg

SEQ ID NO: 3921 - DNA, 1218 bp, Homo sapiens
tgtagtggaaccaaagagagctgtttctagagaggattctgtaaagcccgttgcccatctaacagtgaagaaaatttttgttggtggtattaaagaagatacagaagaatataatttgagagactactttgaaaagtgtagcaagattgaaaccatagaagttatggaagacaggcagagtggaaaaaagagaggatttgcttttgtaacttttgatgatcatgatataattgataaaattgttgttcagaaataccacactattaatgggcataattgtgaagtgaaaaaggccctttctaaacaagagatgcagtctgctggatcacagagaggtcatggaggtggatctggcaattttatgggtcgcggaggaaactttggaggtgctggaggtaattttggccttggtggaaactttggtggaagaggaggctatggtggtggaggtggtggcagcagaggaagttatggaagaggtgatggtggatataatagatttggacgtgacggtggcaactatggtggtggtcctggttatagtagtagagggggctatggtggtggtggaacaggatatggaaaccaaggtggtggatatggtggaggtggtggaggatatgatggttacaatgaaggaggaaattttggcggtggtaactatggtggtggtgggaactataatgattttggaaatcatagtggacaacagcaatcaaattatggacccatgaaagggggcagttttggtggaagaagctcgggcagtccctatggtggtggttatggatctggtggtggaagtggtggatatggtagcagaaggttctaaaaacagcagaaaagggctacagttcttagcaggagagagagcaaggagttgtcaggaaagctgcaggttacctcgagagagttgtcccaaatgcattagaggaactgtaaaaatctgccacagaaggaacaatgatccatagtcagaaaatttactgcagcttaaacaggaaacccttcttgttcaggactctcatagccacagtttgcaaaaagtgcagctattgattaatgcaatatagtgtcaactagatgtagattcctgaggtcttttatctgttgtagctttgtctttttctttttcttttcattacatcaggtatattgccctgtaaattgtggtagtggtaccaggaataaaaaattaaggaatttttaacttttcaa

SEQ ID NO: 3922 - protein, 222 aa, Homo sapiens
MEDRQSGKKRGFAFVTFDDHDIIDKIVVQKYHTINGHNCEVKKALSKQEMQSAGSQRGHGGGSGNFMGRGGNFGGAGGNFGLGGNFGGRGGYGGGGGGSRGSYGRGDGGYNRFGRDGGNYGGGPGYSSRGGYGGGGTGYGNQGGGYGGGGGGYDGYNEGGNFGGGNYGGGGNYNDFGNHSGQQQSNYGPMKGGSFGGRSSGSPYGGGYGSGGGSGGYGSRRF

SEQ ID NO: 3923 - DNA, 3336 bp, Homo sapiens
ggtacgtgcgctcgcggttctctcgcggaggtcggcggtggcgggagcgggctccggagagcctgagagcacggtggggcggggcgggagaaagtggccgcccggaggacgttggcgtttacgtgtggaagagcggaagagttttgcttttcgtgcgcgccttcgaaaactgcctgccgctgtctgaggagtccacccgaaacctcccctcctccgccggcagccccgcgctgagctcgccgacccaagccagcgtgggcgaggtgggaagtgcgcccgacccgcgcctggagctgcgcccccgagtgcccatggctacaagggtgctgagcatgagcgcccgcctgggacccgtgccccagccgccggcgccgcaggacgagccggtgttcgcgcagctcaagccggtgctgggcgccgcgaatccggcccgcgacgcggcgctcttccccggcgaggagctgaagcacgcgcaccaccgcccgcaggcgcagcccgcgcccgcgcaggccccgcagccggcccagccgcccgccaccggcccgcggctgcctccagaggacctggtccagacaagatgtgaaatggagaagtatctgacacctcagcttcctccagttcctataattccagagcataaaaagtatagacgagacagtgcctcagtcgtagaccagttcttcactgacactgaagggttaccttacagtatcaacatgaacgtcttcctccctgacatcactcacctgagaactggcctctacaaatcccagagaccgtgcgtaacacacatcaagacagaacctgttgccattttcagccaccagagtgaaacgactgcccctcctccggccccgacccaggccctccctgagttcaccagtatattcagctcacaccagaccgcagctccagaggtgaacaatattttcatcaaacaagaacttcctacaccagatcttcatctttctgtccctacccagcagggccacctgtaccagctactgaatacaccggatctagatatgcccagttctacaaatcagacagcagcaatggacactcttaatgtttctatgtcagctgccatggcaggccttaacacacacacctctgctgttccgcagactgcagtgaaacaattccagggcatgcccccttgcacatacacaatgccaagtcagtttcttccacaacaggccacttactttcccccgtcaccaccaagctcagagcctggaagtccagatagacaagcagagatgctccagaatttaaccccacctccatcctatgctgctacaattgcttctaaactggcaattcacaatccaaatttacccaccaccctgccagttaactcacaaaacatccaacctgtcagatacaatagaaggagtaaccccgatttggagaaacgacgcatccactactgcgattaccctggttgcacaaaagtttataccaagtcttctcatttaaaagctcacctgaggactcacactggtgaaaagccatacaagtgtacctgggaaggctgcgactggaggttcgcgcgatcggatgagctgacccgccactaccggaagcacacaggcgccaagcccttccagtgcggggtgtgcaaccgcagcttctcgcgctctgaccacctggccctgcatatgaagaggcaccagaactgagcactgcccgtgtgacccgttccaggtcccctgggctccctcaaatgacagacctaactattcctgtgtaaaaacaacaaaaacaaacaaaagcaagaaaaccacaactaaaactggaaatgtatattttgtatatttgagaaaacagggaatacattgtattaataccaaagtgtttggtcattttaagaatctggaatgcttgctgtaatgtatatggctttactcaagcagatctcatctcatgacaggcagccacgtctcaacatgggtaaggggtgggggtggaggggagtgtgtgcagcgtttttacctaggcaccatcatttaatgtgacagtgttcagtaaacaaatcagttggcaggcaccagaagaagaatggattgtatgtcaagattttacttggcattgagtagtttttttcaatagtaggtaattccttagagatacagtatacctggcaattcacaaatagccattgaacaaatgtgtgggtttttaaaaattatatacatatatgagttgcctatatttgctattcaaaattttgtaaatatgcaaatcagctttataggtttattacaagttttttaggattcttttggggaagagtcataattcttttgaaaataaccatgaatacacttacagttaggatttgtggtaaggtacctctcaacattaccaaaatcatttctttagagggaaggaataatcattcaaatgaactttaaaaaagcaaatttcatgcactgattaaaataggattattttaaatacaaaaggcattttatatgaattataaactgaagagcttaaagatagttacaaaatacaaaagttcaacctcttacaataagctaaacgcaatgtcatttttaaaaagaaggacttagggtgtcgttttcacatatgacaatgttgcatttatgatgcagtttcaagtaccaaaacgttgaattgatgatgcagttttcatatatcgagatgttcgctcgtgcagtactgttggttaaatgacaatttatgtggattttgcatgtaatacacagtgagacacagtaattttatctaaattacagtgcagtttagttaatctattaatactgactcagtgtctgcctttaaatataaatgatatgttgaaaacttaaggaagcaaatgctacatatatgcaatataaaatagtaatgtgatgctgatgctgttaaccaaagggcagaataaataagcaaaatgccaaaaggggtcttaattgaaatgaaaatttaattttgtttttaaaatattgtttatctttatttattttgtggtaatatagtaagtttttttagaagacaattttcataacttgataaattatagttttgtttgttagaaaagttgctcttaaaagatgtaaatagatgacaaacgatgtaaataattttgtaagaggcttcaaaatgtttatacgtggaaacacacctacatgaaaagcagaaatcggttgctgttttgcttctttttccctcttatttttgtattgtggtcatttcctatgcaaataatggagcaaacagctgtatagttgtagaattttttgagagaatgagatgtttatatattaacgacaattttttttttggaaaataaaaagtgcctaaaag

SEQ ID NO: 3924 - DNA, 681 bp, Homo sapiens
cgccgacgcagaccactctctgcatgccagcccgcccgcacccaccatggccacagttcagcagctggaaggaagatggcgcctggtggacagcaaaggctttgatgaatacatgaaggagctaggagtgggaatagctttgcgaaaaatgggcgcaatggccaagccagattgtattgtcacttgtgatggcaaaaacctcaccataaaaactgagagcactttgaaaacaacacagttttcttgtcccctgggagagaagtttgaagaaaccacagctgatggcagaaaaactcagactgtctgcaactttacagatggtgcattggttcagcatcaggagtgggatgggaaggaaagcacaataacaagaaaattgaaagatgggaaattagtggtggagtgtgtcatgaaccatgtcgcctgtactcggatctatgaaaaagtagaataaaaattccatcatcactttggacaggagttaactaagagaatgaccaagctcagttcaatgagcaaatctccatactgtttcttttttttttttccattactgcgttcaattatctttatcacgaacattttacatgcagctatttcaaagtgtgttggattaattaggatcatccctttggttaataaataaatgcgtttgtgctaataaaaaaagaaaaagaaaaa

SEQ ID NO: 3925 - DNA, 3468 bp, Homo sapiens
gcggtggcagccgctcgctgaggtagtctctcgcggcgccggggatccctgaacacagacagcgcgggactgagaaggaaagcttctttctgggcagccagagccgcaaaggtggagccgcgttggcgccctccgcgggaccagcgcctcggatgcgggcggagcgcggggggccgcggctgcgggagcgcgaagcggggggccaggggcgcctcatgtgagagccgcgggacctgcagccgccgccgtccccggagcacggggtggtgtgtgggggaagccgcccccggcagcaggatgaaacgaggaggaagagatagtgaccgtaattcatcagaagaaggaactgcagagaaatccaagaaactgaggactacaaatgagcattctcagacttgtgattggggtaatctccttcaggacattattctccaagtatttaaatatttgcctcttcttgaccgggctcatgcttcacaagtttgccgcaactggaaccaggtatttcacatgcctgacttgtggagatgttttgaatttgaactgaatcagccagctacatcttatttgaaagctacccatccagagctgatcaaacagattattaaaagacattcaaaccatctacaatatgtcagcttcaaggtggacagcagcaaggaatcagctgaagcagcttgtgatatactatcgcaacttgtgaattgctctttaaaaacacttggacttatttcaactgctcgaccaagctttatggatttaccaaagtctcactttatctctgcactgacagttgtgttcgtaaactccaaatccctgtcttcgcttaagatagatgatactccagtagatgatccatctctcaaagtactagtggccaacaatagtgatacactcaagctgttgaaaatgagcagctgtcctcatgtctctccagcaggtatcctttgtgtggctgatcagtgtcacggcttaagagaactagccctgaactaccacttattgagtgatgagttgttacttgcattgtcttctgaaaaacatgttcgattagaacatttgcgcattgatgtagtcagtgagaatcctggacagacacacttccatactattcagaagagtagctgggatgctttcatcagacattcacccaaagtgaacttagtgatgtatttttttttatatgaagaagaatttgaccccttctttcgctatgaaatacctgccacccatctgtactttgggagatcagtaagcaaagatgtgcttggccgtgtgggaatgacatgccctagactggttgaactagtagtgtgtgcaaatggattacggccacttgatgaagagttaattcgcattgcagaacgttgcaaaaatttgtcagctattggactaggggaatgtgaagtctcatgtagtgcctttgttgagtttgtgaagatgtgtggtggccgcctatctcaattatccattatggaagaagtactaattcctgaccaaaagtatagtttggagcagattcactgggaagtgtccaagcatcttggtagggtgtggtttcccgacatgatgcccacttggtaaaaactgcatgatgaatagcaccttaatttcaagcaaatgtattataattaaagttttatttgctgtagttctgatataattctactattttgtggcacagaaatttgatatcttcagtcagtatatgtaaagattgtttatcggaagacccatgaatgagttttggtcagaaaattccacttgtttccttagtgtaatagcagtcatatctccgaattttttttaatgtggttcggatgtgaaataaccagttatacgtattaaacagtttacagtctaaaggaaacaaaacctatatgttataatatccaagaagtactaataggttttctgaaatgttatattctctatgcatttaaaaaaaaatgtaaacttgacattttagggtcttcagttacacatacacctgttataaggtgtttaatatagctcaggaaagtgagcattttgtgagaaaaatgaatatatcatatctaatggaaaagattggatgaatgttctcaaatgttacaaagctgtttaaagaaaaaggtatatataagtaatcagaacacttagaagactgatagatgtcacacagtggtattatagaaggataatacagagccaagatcaaattaaaagacaataaatggaacagaagggaggcagtgtttagctttgtataaacttttaggtttgctctgtaatctgctaaaccatatacattcttttgtgatatgttattatgtatgtggcacttgaggcactgtatgtaaagtaaggaatgctttactagttctccttggttttatctttgtttaaactagctttaaagtattaaacaataattgaaatgaaaagcttacctattttaaaaagccaaatttaaataaatatagaactttaaaatgtttatcagttgtttccatgaaagaatattagtttccagtaaattttagtgatggctcactcacttttctattttggaattacatagttatgtaagtaaaatttttaaaaatcataaagggagcaccattgtacagtctagcataaacagcaaattttaaagaggacatatttaagttcataatcatatttttcagtaaatattgctcagtgaactggaaaactttaatagaaaaatgtctgcagttttgtgattgttaatttggttaaaccgatattttatattatttaagttaggtaacattttatattactttcatatgaataaaagtaatccatgcattgtagagtctataaaatgttgagttttaaaagatgatataaactttgatgctgggcactagtgctagtagatattactaccctcctgagggaaatcagaaatgatttaaccccggtggaatacattaattcttaaagcggctcttttcagtggtgtgacttttagattgtgtctcagtggttgaggaagctaacagtcttagatctacttttaaaacggatggccttcttaagaataaagcaaaaggtgattttctacataatttttgctttccaaaagtgatgatatgctctcctacagcaacatatgagaagaaaaaaggcttatctagattcgaaaattaacagcaattatagtaatatatcccctccttctaaatagtaaaaagctctgattgtacaagaattacctgtgctagtcaagttgttgtttttccttgaacaactttggaaaaatggatttgacagtacataatcagttctactaaccaaagcttgtatttggaaatttactttttgtacaaattgaattatataatgcttaaaatactttgtcactttataagcaaaatgcatagtacttaatttgtttatactgtaaagtatatgttaaatgcttttatcactttgagaataaaaagttactaatgc

SEQ ID NO: 3926 - DNA, 713 bp, Homo sapiens
actggctgctctgaaaagccatctttgcattgttcctccttgctcgccgcagccgcctccgccgcgcgcctcctccgccgccgcggactgcggcagctttatcgccagagtccctgaactctcgctttctttttaatcccctgcatcggatcaccggcgtgccccaccatgtcagacgcagccgtagacgccagctccgaaatcaccatcaaggacttaaaggagaagaaggaagttgtggaagaggcagaaaatggaagagacgcccctgctaacgggaatgctaatgaggaaaatggggagcaggaagctgacagtgaagtagatgaagaagaggaagaaggtggggaggaagaggaggaggaagaagaaggtgatggtgaggaagaggatggagatgaagatgaggaagctgagtcacctacgggcaagcgggcagctgaagatgatgatacgcgctctccaccacccaacccaaaccatgagaatttgcaacaggggaggaaaaaagaaccaaaacttccaaggccatgctttttttcttaaaagtactttaaaaaggaaatttgtttgtattttttatttacattttatatttttatacatattgttagggtcagccatttttaatgatctcggatgaccaaaccagccttgggagcgttctgtcctacttctgactttacttgtggtgtgaccatgttcattataat

SEQ ID NO: 3927 - protein, 126 aa, Homo sapiens
MSDAAVDTSSEITTKDLQEKKEVVEEAENGRDAPANGNANEENGEQEADNEVDEEEEEGGEEEEEEEGDGEEEDGDEDEEAETATGKRAAEDDEDDTRSPPPNPNHENLQQGRKKEPKLPRPCFFS

SEQ ID NO: 3928 - DNA, 1179 bp, Homo sapiens
actggctgctctgaaaagccatctttgcattgttcctccttgctcgccgcagccgcctccgccgcgcgcctcctccgccgccgcggactgcggcagctttatcgccagagtccctgaactctcgctttctttttaatcccctgcatcggatcaccggcgtgccccaccatgtcagacgcagccgtagacgccagctccgaaatcaccatcaaggacttaaaggagaagaaggaagttgtggaagaggcagaaaatggaagagacgcccctgctaacgggaatgctaatgaggaaaatggggagcaggaagctgacagtgaagtagatgaagaagaggaagaaggtggggaggaagaggaggaggaagaagaaggtgatggtgaggaagaggatggagatgaagatgaggaagctgagtcacctacgggcaagcgggcagctgaagatgatgaggatgacgatgtcgataccaagaagcagaagaccgacgaggatgactagacagcaaaaaaggaaaagttaaactaaaaaaaaaggccgccgtgacctattcaccctccacttcccgtctcagaatctaaacgtggtcaccttcaagtagagaggcccgcctgcccaccgtgggcagtgccacccacagatgatacgcgctctccaccacccaacccaaaccatgagaatttgcaacaggggaggaaaaaagaaccaaaacttccaaggccatgctttttttcttaaaagtactttaaaaaggaaatttgtttgtattttttatttacattttatatttttatacatattgttagggtcagccatttttaatgatctcggatgaccaaaccagccttgggagcgttctgtcctacttctgactttacttgtggtgtgaccatgttcattataatctcaaaggagaaaaaaaccttgtaaaaaaagcaaaaatgacaacagaaaaacaatcttattctgagcattccagtaacttttttgtgtatgtacttagctgtactataaggagttggtttgtatgagatggttaaaaaggccaaagataaaaggtttattttttttccttttttgtctatgaagttgctgtttattttttttggcctgtttgatgtatgtgtgaaacaatgttgtccaacaataaacaggaattttattttgctgagttgttct

SEQ ID NO: 3929 - protein, 110 aa, Homo sapiens [sequence omitted]

SEQ ID NO: 3930 - DNA, 3294 bp, Homo sapiens
atggcggcggccgcggcggagcagcaacagttctacctgctcctgggaaacctgctcagccccgacaatgtggtccggaaacaggcagaggaaacctatgagaatatcccaggccagtcaaagatcacattcctcttacaagccatcagaaatacaacagctgctgaagaggctagacaaatggccgccgttctcctaagacgtctcttgtcctctgcatttgatgaagtctatccagcacttccctctgatgttcagactgccatcaagagtgagctactcatgattattcagatggaaacacaatctagcatgaggaaaaaagtttgtgatattgcggcagaactggccaggaatttaatagatgaggatggcaataaccagtggcccgaaggtttgaagttcctttttgattcagtcagctctcaaaatgtgggactgcgggaagctgcccttcacattttctggaactttcctggaatttttgggaaccagcaacaacactatttagatgtcatcaaacgaatgttagttcagtgtatgcaagatcaggaacacccgtcgatcaggacgttatctgctagagctacagctgcatttatacttgcaaatgagcataatgttgctctgttcaaacattttgcagacttgctaccgggattcctacaggcggtaaatgactcgtgctaccagaatgatgattctgtcctaaaatccctcgttgagattgcagatactgttccaaagtatttgcgtcctcacttggaagcaactctacagctaagtctaaagttgtgtggagacactagcctcaacaatatgcaacgccagcttgcccttgaagtgatcgtcaccctctctgagactgcagctgctatgttaagaaaacataccaatattgttgcacagactattcctcagatgttagcaatgatggttgatttggaagaagatgaggactgggcaaatgcagatgaactagaagatgatgattttgacagcaatgcagttgcaggcgagagtgctctagatcgaatggcttgcggacttggtggaaagctcgttctgccgatgatcaaggaacacattatgcaaatgcttcaaaatcctgactggaaataccggcatgcaggattgatggccttatctgccattggtgaagggtgccaccagcaaatggaaggaattctaaatgagatcgtaaattttgttttactttttctccaggatcctcatccaagagtaaggtatgcagcctgtaatgccgtgggacagatggctacagattttgcacctggtttccaaaagaaatttcatgagaaggtgattgcagctctgctgcagaccatggaagaccaaggcaatcaacgtgtgcaggcccatgcagctgctgccctcattaactttactgaagactgtcccaagtcactacttattccatacttggataatttggtgaaacatctgcattccattatggtactgaagcttcaagagctgattcagaaaggcaccaagttagttttggaacaagttgtgacatccattgcatcagttgccgatactgcagaagaaaaatttgtcccctactatgatttatttatgccatcactgaagcacatcgttgagaatgcggttcaaaaagaactgagacttctgagaggaaaaactattgaatgcattagcctcattggtctggctgttgggaaggaaaaattcatgcaggatgcatcagatgtgatgcagcttttgttaaagacccagacagacttcaatgatatggaagatgatgatcctcagatctcttacatgatctcagcatgggccagaatgtgcaaaatccttggaaaagaatttcagcaataccttccagtggttatggggcctttaatgaagacggcttcaattaagcccgaagtagcccttttagatacccaagacatggagaatatgagtgatgatgatggttgggaatttgtgaaccttggagatcagcaaagctttggtattaaaactgcaggactagaagaaaaatcaactgcttgccagatgttggtttgctatgctaaggagttaaaggaaggctttgtggagtacaccgaacaggttgtcaaactgatggtccctttactgaaattttatttccacgatggtgttcgagtggcagcagcggaatccatgcctcttctcctggagtgtgcaagagtccgtggtcctgagtatctcacacagatgtggcattttatgtgtgatgctctaattaaggccattggtacagaaccagattcagacgtcctctcagaaataatgcattcttttgcaaagtgcattgaagtaatgggagatggatgccttaataatgaacactttgaagaactgggaggtatattgaaagcaaagcttgaagaacattttaaaaatcaagaattacgacaagttaaaagacaagatgaagactatgatgaacaggtcgaagagtcactacaagatgaggatgataatgatgtttatattctgaccaaagtgtcagatattttacactcaatattcagtagctacaaagaaaaggtgttaccatggtttgaacagctgcttccattaattgtcaacctcatttgtccacatagaccatggccagacagacaatggggattatgcatctttgatgatgtcatagaacactgtagtccagcctcatttaaatacgcagaatatttcttaagaccaatgctccaatatgtatgtgacaacagcccagaagtcaggcaagcagctgcatatggcctgggagtcatggcacagtacggtggagataattatcgccctttttgtacagaagcacttcccctgctggtaagagttattcagtctgcggattctaagaccaaagaaaatgtcaatgctacagagaactgcatctcagcagtagggaaaatcatgaagttcaagcctgactgtgtaaacgttgaagaggtccttccacactggttgtcttggcttccactacatgaagataaagaagaagctgttcagactttcaattatctgtgtgacctgattgaaagtaatcatccaattgttcttggcccaaacaataccaatctgcccaaaatatttagtataattgcggaaggagaaatgcacgaggcaattaaacatgaagatccttgtgccaaacgtctggccaatgtcgttcgccaagtacagacttctggaggactgtggactgagtgcatagcacagctcagtcctgagcagcaggccgccattcaggagctcctgaactctgcgtga

SEQ ID NO: 3931 - DNA, 2532 bp, Homo sapiens
atgttcaccagcaccggctccagtgggctctgtgagtaccggcctccgccatcctggctgccccctacacgccaccctaggcacctctttgaggaggctggggcagcggggaccctcgggtttgccggaggtggtggggccgaccctccagacccgcgtccgaaccctgctagttcccggtcttgggggtcagcggaaaccgcccccatttcggcctggaggggcgaatggggacaaagccccgccgcccgccccgaccccacctggtatccccaggtgctctgcccaggagtctcttggggccgctgcaagtgggcaggtgccctggtgttctcgtgggccggccccaggccctttgcggagcgtgtgccgcgctgaaggaaggggccgtcccccttaccatgccccattcttttaggcttgggggaccgaactaactccccccgcccccacttgcaaagttcagcctccgctttagaagctgacctctcagtttcacttggatgtgtttcttcttcagtctccaagaagagtttttagacaaacacacactgatgagagtgctttcaagtggagggaagttaggaagtcgtggcgagggagcgcagctgtgctgctggatgttgctgttttcctggcgtgttagcggtggtcagcagacaaggcgcctctgtcgaagagccttctgctggtccccagtgccctctccctcctgctcgccctcctcctgcctcactgccagaagctctttgtgtatgaccttcacgcagtcaagaacgacttccagcctggcacctgtgtttgctctgtttgtaccattttactgctccataccaagagtccaagtggcacaaattctgggtccgttgtccatcacaaacaagacattgatttatatattgggactgcagcttttcacctctggttcctacatctggattgtagccataagtggacttatgtccggtctgtgctacgacagcaaaatgttccaggtgcatcaggtgctctgcatccccagctggatggcaaaattcttttcttggacacttgaacccatcttctcttcttcagaacccaccagcgaagccagaattgggatgggagccacgctggacatccagagacagcagagaatggagctgctggaccggcagctgatgttctctcagtttgcacaagggaggcgacagagacagcagcagggaggaatgatcaattggaatcgtctttttcctcctttacgtcagcgacaaaacgtaaactatcagggcggtcggcagtctgagccagcagcgccccctctagaagtttctgaggaacaggtcgcccggctcatggagatgggattttccagaggtgatgctttggaagccctgagagcttcaaacaatgacctcaatgtcgccaccaacttcctgctgcagcactgatagtcccaggccaacactgggaccggaccggcagccgagtgacagtgcgtggtccccaccatcagatcagcccggggaccgagcatctctggtgctgatgttcttgtgggaagagggaggttccaccgcacccctgccctcaaccgcaagactgttgccgttttagtgtggagataagtttgccattacattagcatgtattttctatctatattttttattgggcattttccctaggttggagagtcagcactcgttttgaatgtgtttaaaatgcattaaaatggaagatttctgcaggcagttgaatggcactccagatggggaattgctgtaaccctcttactgtaacatgtcatctcctgcgtcgtgatggggagagggtaatgttacttcacaaaggacatgtcagatccttcttcatggacttttttagttactgttttttctctcaaacttgttttcgaatctcctgggagtgagggagaaacagggagctgaatcctcccccaagctgttccaggccagaggactctgcagtaccttctcctacatctagtaacaaagaatggtgataaccatgcactggttcaaggttctggagttctccatgaaacttgggttaattttgctcagagtatccagagttagccactaggctgcgggtgaaatgggatggagaagaacaacagcaggcttcctggagccacatgggctgactagggcactctgtggctggcctggcatgggctcagcccaggaagaggagaaacgatcccttgcctgcccctccctgtggcagggctaactgcctggccctcctggctcgcagccagccagccccctggcagcaggttctcctcagggcttgggtcttcaacctgtggcgacaggaggcagggcagactgtggaggacaggatgcaggtcagggagagggaaggcaggggtggaccgccatgagcatgaaaagacccgaagcaagttgactcttgcaatgtgcaactgttatgttctgcaaaatgagcaacgatgtatcaaattgatgcaaatttagatgttgatacttacaataaagtttttaatgtgttttactcttc

SEQ ID NO: 3932 - DNA, 436 bp, Homo sapiens
tctccggtccgtgcctccaagatgacaaagaaaagaaggaacaatggtcgtgccaaaaagggccgcggccacgtgcagcctattcgctgcactaactgtgcccgatgcgtgcccaaggacaacgccattaagaaattcgtcattcgaaacatagtggaggccgcagcagtcagggacatttctgaagcgagcgtcttcgatgcctatgtgcttcccaagctgtatgtgaagctacattactgtgtgagttgtgcaattcacagcaaagtagtcaggaatcgatctcgtgaagcccgcaaggaccgaacacccccacctcgatttagacctgcgggtgctgccccacgtcccccaccaaagcccatgtaaggagctgagttcttaaagactgaagacaggctattctctggagaaaaataaaatggaaattgtactt

SEQ ID NO: 3933 - DNA, 2966 bp, Homo sapiens
aggttaccatgaagatcatagcaatgtcgcctgctggcttctggcaaagcagaagaaaccgatacgatctcctggtgacgtcgcttggcgttgtatgggtggtgcttcactttgccctcctgaatgcatatacttacatgatgggcgcttgtgtgattgtatttaggtttttctccatctgtggaaaacatgtaacgctaaagatgctcctcttgacagtggtcgtcagcatgtacaagagcttctttatcatagtaggcatgtttctcttgctgctgtgttacgcttttgctggagttgttttatttggtactgtgaaatatggggagaatattaacaggcatgcaaatttttcttcggctggaaaagctattaccgtactgttccgaattgtcacaggtgaagactggaacaagattatgcatgactgtatggttcagcctccgttttgtactccagatgaatttacatactgggcaacagactgtggaaattatgctggggcacttatgtatttctgttcattttatgtcatcattgcctacatcatgctaaatctgcttgtagccataattgtggagaatttctccttgttttattccactgaggaggaccagcttttaagttacaatgatcttcgccactttcaaataatatggaacatggtggatgataaaagagagggggtgatccccacgttccgcgtcaagttcctgctgcggctactgcgtgggaggctggaggtggacctggacaaggacaagctcctgtttaagcacatgtgctacgaaatggagaggctccacaatggcggcgacgtcaccttccatgatgtcctgagcatgctttcataccggtccgtggacatccggaagagcttgcagctggaggaactcctggcgagggagcagctggagtacaccatagaggaggaggtggccaagcagaccatccgcatgtggctcaagaagtgcctgaagcgcatcagagctaaacagcagcagtcgtgcagtatcatccacagcctgagagagagtcagcagcaagagctgagccggtttctgaacccgcccagcatcgagaccacccagcccagtgaggacacgaatgccaacagtcaggacaacagcatgcaacctgagacaagcagccagcagcagctcctgagccccacgctgtcggatcgaggaggaagtcggcaagatgcagccgacgcagggaaaccccagaggaaatttgggcagtggcgtctgccctcagccccaaaaccaataagccattcagtgtcctcagtcaacttacggtttggaggaaggacaaccatgaaatctgtcgtgtgcaaaatgaaccccatgactgacgcggcttcctgcggttctgaagttaagaagtggtggacccggcagctgactgtggagagcgacgaaagtggggatgaccttctggatatttaggtggatgtcaatgtagatgaatttctagtggtggaaaccgttttctaataatgtccttgattgtccagtgagcaatctgtaattgatctataactgaattccagcttgtcacaagatgtttataaattgattttcatcctgccacagaaaggcataagctgcatgtatgatgggttactatcaatcattgctcaaaaaaatttttgtataatgacagtactgataatattagaaatgataccgcaagcaaatgtatatcacttaaaaatgtcatatattctgtctgcgtaaactaaggtatatattcatatgtgctctaatgcagtattatcaccgccccgcaaaagagtgctaagcccaaagtggctgatatttagggtacaggggttatagctttagttcacatctttcccatttccactagaaatatttctcttgagagaatttattatttatgattgatctgaaaaggtcagcactgaacttatgctaaaatgatagtagttttacaaactacagattctgaattttaaaaagtatcttctttttctcgtgttatatttttaaatatacacaagacatttggtgaccagaacaagttgatttctgtcctcagttatgttaatgaaactgttgcctccttctaagaaaattgtgtgtgcaagcaccaggcaaagaaatggactcaggatgcttagcggtttaaaacaaacctgtagataaatcacttgagtgacatagttgcgcaaagatgttaagtttcttaagaaaccttttaataactgagtttagcaaaaagaataaaactatatagctcaatttatttaaaaaaatctttgcatgtgtgatgttatcattggcttcatttcttacccaaggtatgtctgttttgccataaatcagcagagtcatttcattctgggtgatcctaacacaccattgctacgttagatttgaaatgacatctctgttaaaagaatcttctatggaaataatggtgccctgcaaaatcttcctttgaactcacaggttagggatcacacaacttacttaatcgttttttgtttttgttttttttccttatatgtcaatggcccatgtcctccgggaaaattagaaaagcaaaatgattacaaagtgctgttagatttcttgtgctgggccagccaagtagaagtggacttgacttggacctttaactattttattacagattggacatttgctgttcagatgttttttaacagagggattatctcagaatcctgtgacctccaggttgttttataatctatttttctctatttaacattcctcagatagataggcaaataggacattccttctgtgtcacagaagtatcgtggtagtggcagtctacagtttatatgattcattgtaactatgagataaagaacaaccagtcatgtggccaaaaggattagatttgatttgatgttcacttggagtttactttttgtacatacaagataaaataaatattggatttgt

SEQ ID NO: 3934 - protein, 481 aa, Homo sapiens [sequence omitted]

SEQ ID NO: 3935 - DNA, 2082 bp, Homo sapiens
cttggctggaacctgagacggattcgctcccaaatgatgctccagtggctggagcaactcaagttcatcattgtcctgagagagaggagcagcgcggttctcggccgggacagcagaacgccaggggaccctcacctgggcgcgccggggcacgggctttgattgtcctggggtcgcggagacccgcgcgcctgccctgcacgccgggcggcaacctttgcagtcgcgttggctgctgcgatcggccggcgggtccctgccgaaggctcggctgcttctgtccacctcttacacttcttcatttatcggtggatcatttcgagagtccgtcttgtaaatgtttggcactttgctactttattgcttctttctggcgacagttccagcactcgccgagaccggcggagaaaggcagctgagcccggagaagagcgaaatatggggacccgggctaaaagcagacgtcgtccttcccgcccgctatttctatattcaggcagtggatacatcagggaataaattcacatcttctccaggcgaaaaggtcttccaggtgaaagtctcagcaccagaggagcaattcactagagttggagtccaggttttagaccgaaaagatgggtccttcatagtaagatacagaatgtatgcaagctacaaaaatctgaaggtggaagttaaattccaagggcaacatgtggccaaatccccatatattttaaaagggccggtttaccatgagaactgtgactgtcctctgcaagatagtgcagcctggctacgggagatgaactgccctgaaaccattgctcagattcagagagatctggcacatttccctgctgtggatccagaaaagattgcagtagaaatcccaaaaagatttggacagaggcagagcctatgtcactacaccttaaaggataacaaggtttatatcaagactcatggtgaacatgtaggttttagaattttcatggatgccatactactttctttgactagaaaggtgaagatgccagatgtggagctctttgttaatttgggagactggcctttggaaaaaaagaaatccaattcaaacatccatccgatcttttcctggtgtggctccacagattccaaggatatcgtgatgcctacgtacgatttgactgattctgttctggaaaccatgggccgggtaagtctggatatgatgtccgtgcaagctaacacgggtcctccctgggaaagcaaaaattccactgccgtctggagagggcgagacagccgcaaagagagactcgagctggttaaactcagtagaaaacacccagaactcatagacgctgctttcaccaactttttcttctttaaacacgatgaaaacctgtatggtcccattgtgaaacatatttcattttttgatttcttcaagcataagtatcaaataaatatcgatggcactgtagcagcttatcgcctgccatatttgctagttggtgacagtgttgtgctgaagcaggattccatctactatgaacatttttacaatgagctgcagccctggaaacactacattccagttaagagcaacctgagcgatctgctagaaaaacttaaatgggcgaaagatcacgatgaagaggccaaaaagatagcaaaagcaggacaagaatttgcaagaaataatctcatgggcgatgacatattctgttattatttcaaacttttccaggaatatgccaatttacaagtgagtgagccccaaatccgagagggcatgaaaagggtagaaccacagactgaggacgacctcttcccttgtacttgccataggaaaaagaccaaagatgaactctgatatgcaaaataacttctattagaataatggtgctctgaagactcttcttaactaaaaagaagaatttttttaagtattaattccatggacaatataaaatctgtgtgattgtttgcagtatgaagacacatttctacttatgcagtattctcatgactgtactttaaagtacatttttagaattttataataaaaccacctttattttaaaggaaaaaaaaaaaaaaaaaaaaaaa

SEQ ID NO: 3936 - protein, 502 aa, Homo sapiens
MFGTLLLYCFFLATVPALAETGGERQLSPEKSEIWGPGLKADVVLPARYFYIQAVDTSGNKFTSSPGEKVFQVKVSAPEEQFTRVGVQVLDRKDGSFIVRYRMYASYKNLKVEVKFQGQHVAKSPYILKGPVYHENCDCPLQDSAAWLREMNCPETIAQIQRDLAHFPAVDPEKIAVEIPKRFGQRQSLCHYTLKDNKVYIKTHGEHVGFRIFMDAILLSLTRKVKMPDVELFVNLGDWPLEKKKSNSNIHPIFSWCGSTDSKDIVMPTYDLTDSVLETMGRVSLDMMSVQANTGPPWESKNSTAVWRGRDSRKERLELVKLSRKHPELIDAAFTNFFFFKHDENLYGPIVKHISFFDFFKHKYQINIDGTVAAYRLPYLLVGDSVVLKQDSIYYEHFYNELQPWKHYIPVKSNLSDLLEKLKWAKDHDEEAKKIAKAGQEFARNNLMGDDIFCYYFKLFQEYANLQVSEPQIREGMKRVEPQTEDDLFPCTCHRKKTKDEL

SEQ ID NO: 3937 - DNA, 6261 bp, Homo sapiens
gagtgtggctgcagtgcgccgggacaccagggctccgcgctccgcactcaagaggctcccgcgtcccaacccctcgcgcccgcgcgttcgcggatccaggccgaggaccgaaaggggccgcccgagcccccggggccggcgcccagagagcccagcaaggccggccgccctgccggtgtgccgccggcgggtgcttctggaagggccaatgcgttcgggcagcagcccctgaagccgagcccgaggctaagtgggactgaccggggcccagagtggacgaaccgccagcatggggagagaccagcgcgcggtggccggccctgccctacggcggtggctgctgctggggacagtgaccgtggggttcctcgcccagagcgtcttggcgggtgtgaagaagtttgatgtgccgtgtggaggaagagattgcagtgggggctgccagtgctaccctgagaaaggtggacgtggtcagcctgggccagtgggcccccaggggtacaatgggccaccaggattacaaggattcccgggactgcagggacgtaaaggagacaagggtgaaaggggagcccccggagtaacgggacccaagggcgacgtgggagcaagaggcgtttctggattccctggtgccgatggaattcctggacacccggggcaaggtgggcccaggggaaggccgggctacgatggctgcaacggaacccagggagactcaggtccacaggggccccccggctctgaggggttcaccgggcctcccgggccccaaggaccaaaagggcagaaaggtgagccttatgcactgcctaaagaggagcgcgacagatatcggggtgaacctggagagcctggattggtcggtttccagggacctcccggccgccctgggcatgtgggacagatgggtccagttggagctccagggagaccaggaccacctggaccccctggaccaaaaggacagcaaggcaacagaggacttggtttctacggagttaagggtgaaaagggtgacgtagggcagccgggacccaacgggattccatcagacaccctccaccccatcatcgcgcccacaggagtcaccttccacccagatcagtacaagggtgaaaaaggcagtgagggggaaccaggaataagaggcatttccttgaagggagaagaaggaatcatgggctttcctggactgaggggttaccctggcttgagtggtgaaaaaggatcaccaggacagaagggaagccgaggcctggatggctatcaagggcctgatggaccccggggacccaagggagaagccggagacccagggccccctggactacctgcctactcccctcacccttccctagcaaaaggtgccagaggtgacccgggattcccaggggcccaaggggagccaggaagccagggtgagccaggagacccgggcctcccaggtccccctggcctctccatcggagatggagatcagaggagaggcctgccgggtgagatgggacccaagggcttcatcggagaccccggcatccctgcgctctacgggggcccacctggacctgatggaaagcgagggcctccaggaccccccgggctccctggaccacctggacctgatggcttcctgtttgggctgaaaggagcaaaaggaagagcaggcttccctgggcttcccggctcccctggagcccgcggaccaaaggggtggaaaggtgacgctggggaatgcagatgtacagaaggcgacgaagctatcaaaggtcttccgggactgccaggacccaagggcttcgcaggcatcaacggggagccggggaggaaaggggacagaggagaccccggccaacacggcctccctgggttcccagggctcaagggagtgcctggcaacattggtgctcccggacccaaaggagcaaaaggagattccagaacaatcacaaccaaaggtgagcggggacagcccggcgtcccaggtgtgcccgggatgaaaggtgacgatggcagcccaggccgcgatgggctcgatggattccccggcctcccaggccctcccggtgatggcatcaagggccctccaggggacccaggctatccaggaatacctggaacgaagggtactccaggagaaatgggccccccaggactgggccttcccggcctcaaaggccaacgtggtttccctggagacgccggcttacctggaccaccaggcttcctgggccctcctggccccgcagggaccccaggacaaatagattgtgacacagatgtgaaaagggccgttggaggtgacagacaggaggccatccagccaggttgcataggagggcccaagggattgccaggcctgccaggacccccaggccccacaggtgccaaaggcctccgaggaatcccaggcttcgcaggagctgatggaggaccagggcccaggggcttgccaggagacgcaggtcgtgaagggttcccaggacccccagggttcataggaccccgaggatccaaaggtgcagtgggcctccctggcccagatggatccccaggtcccatcggcctgccagggccagatgggccccctggggaaaggggcctccctggagaagtcctgggagctcagcccgggccacggggagatgctggtgtgcctggacagcctgggcttaaaggccttcccggagacagaggcccccctggattcagaggaagccaagggatgcctgggatgccagggctgaagggccagccaggcctcccaggaccttccggccagccaggcctgtatgggcctccaggactgcatggattcccaggagctcctggccaagaggggcccttggggctgccaggaatcccaggccgtgaaggtctgcctggtgatagaggggaccctggggacacaggcgctcctggccctgtgggcatgaaaggtctctctggtgacagaggagatgctggcttcacaggggagcaaggccatccaggaagccctggatttaaaggaattgatggaatgcctgggacccccgggctaaaaggagatagaggctcacctgggatggatggtttccaaggcatgcctggactcaaagggagacccgggtttccagggagcaaaggcgaggctggatttttcggaatacccggtctgaagggtctggctggtgagccaggttttaaaggcagccgaggggaccctgggcccccaggaccacctcctgtcatcctgccaggaatgaaagacattaaaggagagaaaggagatgaagggcctatggggctgaaaggatacctgggcgcaaaaggtatccaaggaatgccaggcatcccagggctgtcaggaatccctgggctgcctgggaggcccggccacatcaaaggagtcaagggagacatcggagtccccggcatccccggtttgccaggattccctggggtggctggcccccctggaattacgggattcccaggattcataggaagccggggtgacaaaggtgccccagggagagcaggcctgtatggcgagattggcgcgactggtgatttcggtgacatcggggacactataaatttaccaggaagaccaggcctgaagggggagcggggcaccactggaataccaggtctgaagggattctttggagagaagggaacagaaggtgacatcggcttccctgggataacaggcgtgactggagtccaaggccctcctggacttaaaggacaaacaggctttccagggctgactgggcctccagggtcgcagggagagctggggcggattggactgcctggtggcaaaggagatgatggctggccgggagctccgggcttaccaggttttccgggactccgtgggatccgcggcttacacggcttgccaggcaccaagggctttccaggatccccaggttctgacatccacggagacccaggcttcccaggccctcctggggaaagaggtgacccaggagaggccaacacccttccaggccctgtgggagtcccaggacagaaaggagaccaaggagctccaggggaacgaggcccacctgggagcccaggacttcaggggttccctggtatcacacccccttccaacatctctggggcacctggtgacaaaggggcgccagggatatttggcctgaaaggttatcggggcccaccagggccaccaggttctgctgctcttcctggaagcaaaggtgacacagggaacccaggagctccaggaaccccagggaccaaaggatgggccggggactccgggccccagggcaggcctggtgtgtttggtctcccaggagaaaaagggcccaggggtgaacaaggcttcatggggaacactggacccactggggcggtgggcgacagaggccccaagggacccaagggagacccaggattccctggtgcccccgggactgtgggagcccccgggattgcaggaatcccccagaagattgccgtccaaccagggacagtgggtccccaggggaggcgaggcccccctggggcaccgggggagatggggccccagggcccccccggagaaccaggtttccgtggggctccagggaaagctgggccccaaggaagaggtggtgtgtctgctgttcccggcttccggggagatgaaggacccataggccaccaggggccgattggccaagaaggtgcaccaggccgtccagggagcccgggcctgccgggtatgccaggccgcagcgtcagcatcggctacctcctggtgaagcacagccagacggaccaggagcccatgtgcccagtgggcatgaacaaactctggagtggatacagcctgctgtacttcgagggccaggagaaggcgcacaaccaggacctggggctggcgggctcctgcctggcgcggttcagcaccatgcccttcctgtactgcaaccctggtgatgtctgctactatgccagccggaacgacaagtcctactggctctctaccactgcgccgctgcccatgatgcccgtggccgaggacgagatcaagccctacatcagccgctgttctgtgtgtgaggccccggccatcgccatcgcggtccacagtcaggatgtctccatcccacactgcccagctgggtggcggagtttgtggatcggatattccttcctcatgcacacggcggcgggagacgaaggcggtggccaatcactggtgtcaccgggcagctgtctagaggacttccgcgccacaccattcatcgaatgcaatggaggccgcggcacctgccactactacgccaacaagtacagcttctggctgaccaccattcccgagcagagcttccagggctcgccctccgccgacacgctcaaggccggcctcatccgcacacacatcagccgctgccaggtgtgcatgaagaacctgtgagccggcgcgtgccaggaagggccattttggtgcttattcttaacttattacctcaggtgccaacccaaaaattggttttatttttttcttaaaaaaaaaaaagtctaccaaaggaatttgcatccagcagcagcacttagacctgccagccactgtcaccgagcgggtgcaagcactcggggtccctggagggcaagccctgcccacagaaagccaggagcagccctggcccccatcagccctgctagacgcaccgcctgaaggcacagctaaccacttcgcacacacccatgtaaccactgcactttccaatgccacagacaactcacattgttcaactcccttctcggggtgggacagacgagacaacagcacacaggcagccagccgtggccagaggctcgaggggctcagggcctcaggcacccgtccccacacgagggccccgtgggtgggcctggccctgctttctacgccaatgttatgccagctccatgttctcccaaataccgttgatgtgaattattttaaaggcaaaaccgtgctctttattttaaaaaacactgataatcacactgcggtaggtcattcttttgccacatccctatagaccactgggtttggcaaaactcaggcagaagtggagacctttctagacatcattgtcagccttgctacttgaaggtacaccccatagggtcggaggtgctgtccccactgccccacgttgtccctgagatttaacccctccactgctgggggtgagctgtactcttctgactgccccctcctgtgtaacgactacaaaataaaacttggttctgaatattttt

SEQ ID NO: 3938 - DNA, 1843 bp, Homo sapiens
agtcgtaggcgctggccgctgacatgttgaggactacgcgcggcccaggcctgggccccccgctgctccaggccgcgctgggccttgggcgggctgggtggcactggcctgcgggccgggcggcgagcggggggcgcgggcgggcctggctgcagcccacgggccgggagacgggtgtgcaggtgtacaacagcctcaccgggaggaaggaacccctaatcgtggcgcacgccgaagccgcctcctggtatagctgtggaccaactgtatatgatcatgcgcaccttggccatgcttgctcatatgttagatttgatatcattcgaaggatcctaaccaaggtttttggatgcagcatagtcatggtgatgggtattacagatgtagatgataaaatcatcaaaagagccaatgagatgaatatttcccccgcttccctcgccagtctttatgaggaagacttcaagcaggacatggcagccctgaaggttctcccacccacggtgtacctgagggtaaccgaaaatattcctcagataatttctttcattgaaggaatcattgctcgtgggaacgcttattcaacggcaaaaggcaatgtctacttcgatctgaagtctagaggagacaagtatggcaaattggtcggcgtggtccctggtccagtcggagagccagcggactctgacaagcgtcatgccagtgacttcgccctgtggaaggcggccaaaccccaggaggtgttctgggcctctccctggggacccgggaggccgggctggcacatcgagtgctctgccatcgctagtatggtatttggaagtcaactggatatccattcaggtgggatagatttagcttttccacatcatgagaacgaaattgcacagtgcgaagtctttcatcagtgcgagcagtggggaaattattttctgcattctgggcatttgcacgccaaaggcaaagaagaaaaaatgtccaaatcattaaagaactacattactattaaggactttctgaagaccttttcccccgatgtcttccggttcttctgcctgcggagcagctaccgctcagccatcgactacagtgacagcgccatgctccaagctcagcagctgctcctggggctgggctctttcctggaggacgcacgtgcctacatgaaggggcagctggcctgcggctccgtcagggaagcgatgctgtgggagaggctctccagcaccaagagggccgtgaaggcggccttggcagatgattttgacacacccagggtggttgatgccatcctgggccttgcacaccacgggaatggacagctcagggcgtccctgaaggaacctgaagggccgagaagtcctgctgtgtttggtgccatcatctcttactttgaacagttttttgaaactgttggaatttctctggcaaatcaacagtacgtttcaggagacggcagcgaggctaccttgcatggtgtggtggacgagctggtgcggttccggcagaaggtccggcagtttgcgctggccatgcccgaggccacgggggacgcccggcggcagcagctcctagaaaggcagcccctgctggaagcatgcgacaccctgcgccggggcctgactgcccacggcatcaacatcaaggacagaagcagtacaacatccacgtgggaactgctggatcaaaggacaaaagaccaaaaatcagcgggctgaggatggagcacagccatgaacctgctcacgacaagacgcacccatgcttctcagggtcaaggctttatgttaaagcttcctgtcggggctgctaggtcagcattaaagtaaggcaaccaacagtg

SEQ ID NO: 3939 - protein, 564 aa, Homo sapiens
MLRTTRGPGLGPPLLQAALGLGRAGWHWPAGRAASGGRGRAWLQPTGRETGVQVYNSLTGRKEPLIVAHAEAASWYSCGPTVYDHAHLGHACSYVRFDIIRRILTKVFGCSIVMVMGITDVDDKIIKRANEMNISPASLASLYEEDFKQDMAALKVLPPTVYLRVTENIPQIISFIEGIIARGNAYSTAKGNVYFDLKSRGDKYGKLVGVVPGPVGEPADSDKRHASDFALWKAAKPQEVFWASPWGPGRPGWHIECSAIASMVFGSQLDIHSGGIDLAFPHHENEIAQCEVFHQCEQWGNYFLHSGHLHAKGKEEKMSKSLKNYITIKDFLKTFSPDVFRFFCLRSSYRSAIDYSDSAMLQAQQLLLGLGSFLEDARAYMKGQLACGSVREAMLWERLSSTKRAVKAALADDFDTPRVVDAILGLAHHGNGQLRASLKEPEGPRSPAVFGAIISYFEQFFETVGISLANQQYVSGDGSEATLHGVVDELVRFRQKVRQFALAMPEATGDARRQQLLERQPLLEACDTLRRGLTAHGINIKDRSSTTSTWELLDQRTKDQKSAG

SEQ ID NO: 3940 - DNA, 2381 bp, Homo sapiens
cgggggctggcggctgcggctcggcggagagtgcggcatgcgctcggaaaaggagggggccggaggccttcgggcggccgttgccgcgcggggcccgagcgggagggagaagctgtcggccctagaagtgcagttccaccgcgactcgcagcagcaggaggctgagacgccgccaacttcgtcctccggttgcgggggcggtgcgggcaaacctcgcgaggagaagaggacggccctgagcaaggtggtcatccgccgcctgcctccgggcctcaccaaggagcagctggaggagcagctgcgcccgctgccagcacacgactacttcgagttcttcgccgccgacctgagtctttatcctcatctctactcaagagcatacattaattttaggaatcctgatgacatccttctttttagagatcgttttgatggatatatcttccttgacagcaaaggcctagaatatcctgcagtggtagagtttgctccattccagaagatagccaaaaagaagctgagaaaaaaagatgccaagactggaagcatcgaagatgatccagaatataagaagtttttagaaacctactgtgtggaggaagagaagaccagtgccaaccctgagactctgctgggggagatggaggcgaagacaagagagctcattgctagaagaaccacacctcttttggaatatattaaaaatagaaaattagaaaagcagagaattcgagaagagaagcgagaagaacggaggaggagagagttagaaaagaaacgtttgcgggaagaggaaaaaagaagaagaagagaagaagaaagatgcaaaaaaaaagagacagataaacagaagaaaattgcagagaaagaagtaaggattaagcttcttaagaaaccagaaaagggagaggaaccaaccacagagaaaccaaaagaaagaggagaggagattgatactggaggtggcaagcaggaatcctgtgcccccggtgcagtcgtaaaagccaggcccatggaaggctcgctggaggagccccaggagacgtcacacagcggcagtgataaagagcacagggatgtggagagatctcaagaacaagaatctgaagcacaaagataccatgtggatgacggcaggaggcacagagctcaccacgagcctgaacggctttccagaaggagtgaggatgagcagagatgggggaaaggacctggccaagacagagggaagaaggggagccaggacagcggggctccgggggaggccatggagagactgggaagagcgcagaggtgtgacgacagtccagcacccagaaaagagcgactggcaaacaaggaccggccagccttgcagctgtatgatccaggagctcgcttccgagcgcgagagtgtggcggaaacaggaggatctgcaaggcagaaggttcggggactggtcctgagaagagggaagaggcagagtgagtcactgcacgcacctggcctccatggacgagcaagggcatcccagaaacgtgtaaatgaccccgagtgtgactgggaaggagaacttattccttaccaggaaactggaagctaaaaatacagagggtgacgtagaaacacgcagaaaccattctaaagaaagtagtgatcttgtattaaattgagcagaattctcacagattttaccattcctgttataaactagtatttgttgtttagccaaaacagaaaatgatttccactggacagtagaaaaatatgtgtaaaatagggaagaaagttagtattggatcagtgtgagtcctgaagcactttcagtgctgtgagaacgacatccactttgggtttcattcgtttgtaagcagaggagctgtcagtcactcgtgcttctcggtggcctctgagccatggtgtcgagtgaagagtagttcttgtttgttacaacctttgtgagtcagccatgcccgcaaagcgtgctgtgttttagtcctggtaggaatatttatcagagttcacactatataaaacccaacagcttcaactattgccctttcaacagttttgccactgaccggatagaaacggtttcagtctctggatggatgtgtttgtggtttgtaaccattacggtttaaaccatggtttaagaatttgcccaaataacagaaattttgttcgggaagggataaactagatatagcatacagagcctgtttttgagttttagatactttatttgtaaataacttaaaatagctttctgaaaccgtgcattctgtagtttcttcctttcagtgaaattgctaaatgtcaatgtatttttggcactgcgattttaaccatttattaaataaaaattttgttaaagaaaaaaaaaaaaaaaaaaaaaaaa

SEQ ID NO: 3941 - protein, 476 aa, Homo sapiens
MRSEKEGAGGLRAAVAARGPSGREKLSALEVQFHRDSQQQEAETPPTSSSGCGGGAGKPREEKRTALSKVVIRRLPPGLTKEQLEEQLRPLPAHDYFEFFAADLSLYPHLYSRAYINFRNPDDILLFRDRFDGYIFLDSKGLEYPAVVEFAPFQKIAKKKLRKKDAKTGSIEDDPEYKKFLETYCVEEEKTSANPETLLGEMEAKTRELIARRTTPLLEYIKNRKLEKQRIREEKREERRRRELEKKRLREEEKRRRREEERCKKKETDKQKKIAEKEVRIKLLKKPEKGEEPTTEKPKERGEEIDTGGGKQESCAPGAVVKARPMEGSLEEPQETSHSGSDKEHRDVERSQEQESEAQRYHVDDGRRHRAHHEPERLSRRSEDEQRWGKGPGQDRGKKGSQDSGAPGEAMERLGRAQRCDDSPAPRKERLANKDRPALQLYDPGARFRARECGGNRRICKAEGSGTGPEKREEAE

SEQ ID NO: 3942 - DNA, 2282 bp, Homo sapiens
cgggggctggcggctgcggctcggcggagagtgcggcatgcgctcggaaaaggagggggccggaggccttcgggcggccgttgccgcgcggggcccgagcgggagggagaagctgtcggccctagaagtgcagttccaccgcgactcgcagcagcaggaggctgagacgccgccaacttcgtcctccggttgcgggggcggtgcgggcaaacctcgcgaggagaagaggacggccctgagcaaggtggtcatccgccgcctgcctccgggcctcaccaaggagcagctggaggagcagctgcgcccgctgccagcacacgactacttcgagttcttcgccgccgacctgagtctttatcctcatctctactcaagagcatacattaattttaggaatcctgatgacatccttctttttagagatcgttttgatggatatatcttccttgacagcaaagatccagaatataagaagtttttagaaacctactgtgtggaggaagagaagaccagtgccaaccctgagactctgctgggggagatggaggcgaagacaagagagctcattgctagaagaaccacacctcttttggaatatattaaaaatagaaaattagaaaagcagagaattcgagaagagaagcgagaagaacggaggaggagagagttagaaaagaaacgtttgcgggaagaggaaaaaagaagaagaagagaagaagaaagatgcaaaaaaaaagagacagataaacagaagaaaattgcagagaaagaagtaaggattaagcttcttaagaaaccagaaaagggagaggaaccaaccacagagaaaccaaaagaaagaggagaggagattgatactggaggtggcaagcaggaatcctgtgcccccggtgcagtcgtaaaagccaggcccatggaaggctcgctggaggagccccaggagacgtcacacagcggcagtgataaagagcacagggatgtggagagatctcaagaacaagaatctgaagcacaaagataccatgtggatgacggcaggaggcacagagctcaccacgagcctgaacggctttccagaaggagtgaggatgagcagagatgggggaaaggacctggccaagacagagggaagaaggggagccaggacagcggggctccgggggaggccatggagagactgggaagagcgcagaggtgtgacgacagtccagcacccagaaaagagcgactggcaaacaaggaccggccagccttgcagctgtatgatccaggagctcgcttccgagcgcgagagtgtggcggaaacaggaggatctgcaaggcagaaggttcggggactggtcctgagaagagggaagaggcagagtgagtcactgcacgcacctggcctccatggacgagcaagggcatcccagaaacgtgtaaatgaccccgagtgtgactgggaaggagaacttattccttaccaggaaactggaagctaaaaatacagagggtgacgtagaaacacgcagaaaccattctaaagaaagtagtgatcttgtattaaattgagcagaattctcacagattttaccattcctgttataaactagtatttgttgtttagccaaaacagaaaatgatttccactggacagtagaaaaatatgtgtaaaatagggaagaaagttagtattggatcagtgtgagtcctgaagcactttcagtgctgtgagaacgacatccactttgggtttcattcgtttgtaagcagaggagctgtcagtcactcgtgcttctcggtggcctctgagccatggtgtcgagtgaagagtagttcttgtttgttacaacctttgtgagtcagccatgcccgcaaagcgtgctgtgttttagtcctggtaggaatatttatcagagttcacactatataaaacccaacagcttcaactattgccctttcaacagttttgccactgaccggatagaaacggtttcagtctctggatggatgtgtttgtggtttgtaaccattacggtttaaaccatggtttaagaatttgcccaaataacagaaattttgttcgggaagggataaactagatatagcatacagagcctgtttttgagttttagatactttatttgtaaataacttaaaatagctttctgaaaccgtgcattctgtagtttcttcctttcagtgaaattgctaaatgtcaatgtatttttggcactgcgattttaaccatttattaaataaaaattttgttaaagaaaaaaaaaaaaaaaaaaaaaaaa

SEQ ID NO: 3943 - protein, 443 aa, Homo sapiens
MRSEKEGAGGLRAAVAARGPSGREKLSALEVQFHRDSQQQEAETPPTSSSGCGGGAGKPREEKRTALSKVVIRRLPPGLTKEQLEEQLRPLPAHDYFEFFAADLSLYPHLYSRAYINFRNPDDILLFRDRFDGYIFLDSKDPEYKKFLETYCVEEEKTSANPETLLGEMEAKTRELIARRTTPLLEYIKNRKLEKQRIREEKREERRRRELEKKRLREEEKRRRREEERCKKKETDKQKKIAEKEVRIKLLKKPEKGEEPTTEKPKERGEEIDTGGGKQESCAPGAVVKARPMEGSLEEPQETSHSGSDKEHRDVERSQEQESEAQRYHVDDGRRHRAHHEPERLSRRSEDEQRWGKGPGQDRGKKGSQDSGAPGEAMERLGRAQRCDDSPAPRKERLANKDRPALQLYDPGARFRARECGGNRRICKAEGSGTGPEKREEAE

SEQ ID NO: 3944 - DNA, 1599 bp, Homo sapiens
cggaagtgcggatcccagcggcggtcgtgtagctgagcaggcctggggcttggttctatgtccctgtggctatgtttccagtgtcctctgggtgtttccaagagcaacaagaaacgaataaatctctgccccgcagcgcctccaccccagagacccggaccaagttcacacaggacaatctgtgccacgcccagcgcgagcgcctggactcggccaacctgtgggtgctggtggactgcatccttcgcgacacctccgaggacctgggactccagtgtgacgccgtgaacctggccttcgggcgccgctgtgaggaactggaggacgcgcggcacaagctgcagcaccacctgcacaagatgctgcgggaaatcacagatcaggaacacaacttggtggcactgaaggaggccatcaaggacaaggaggaacctctgcacatagcccagacccggctgtagctgctctcacaccggcccaacatgcagctgtgccgcgatgcagcccagttcaggtactgcctgggcctctgaggcagtcccaggtgcccccatccacctcctcgctgcgaccctctccaataaacactccaatctccacacacacatcccccacaggtgctgagaggggagggagactctgcggccacacacaacatgcaagcacgccttaaacacacagatatagacatgacactgggcaggtcatgggtcgggggcctccccgtgccagggacctgtgcccacgtggtctcaccccaccctgtgctacctcatcttcccgggaggaagctccttcagacaaggtgagctcctggaggccacggggccagagaggccagagagggccattccctgctgccctgagggtgctgtccccacctctggtggaaagtatgacctacgcctgggctacaggcatagatgggccgtccttttgtttcccttgttaacggatgcctggtggccccttctgagcctaagtacctttcttccttccctgcccctcagttccttcaaggaactgggtgcctccttccgtcaaatatcaggaatggaaagaactgagcctggtcggctgaggccagtcctgtcctgtcagggtcgagattgcacgcgggtcactcattcccactcaggcccgcgctccctgggaggaccctcgtaatttatgctctgccctagagccgctttcctggtaggatcctttcatggcgtcttcccaggacctcctgccagctcccattgggagttttgggtcccctccaccccagtaggtgcatacttctgccctccccagccccagctcacaccccccaacacccccaagctggtgagtgaggtggaggagctgtacaagtccatcacagcgctgcgggagaagcttctacaagcggagcagtccctgcgcaacctcaaggacatccacatgagcctggagaaggacgtcactgccatgaccaacagtctcttcatcgaccgccagaagtgcatggcccatcgtacttgctaccccaccattctgcagctggctggctaccagtgagcagcggcacggtgcttccccccaatcccccaaataaacagtgcgttagctttc

SEQ ID NO: 3945 - protein, 129 aa, Homo sapiens
MFPVSSGCFQEQQETNKSLPRSASTPETRTKFTQDNLCHAQRERLDSANLWVLVDCILRDTSEDLGLQCDAVNLAFGRRCEELEDARHKLQHHLHKMLREITDQEHNLVALKEAIKDKEEPLHIAQTRL

SEQ ID NO: 3946 - DNA, 4496 bp, Homo sapiens
ctgaccacacacactcctcactcccctggccctgatgggcggcagacaccatggtgcagacggatgtgctcctaccagagccagcaccgcagacagtgtcaccctgcgagctgccctgcaaagagtatgacgtggcccgcaacatgggcgtctacacgtcctccagcctggccaccgccagctggaggtgtggttccagaactgctatgctcgctaccaccaggccttcgccgactgcaaccagtcggagcgggagctgcaggggcgcgagagccagcagctggccgcagagacccaggcgctggcacagccgacacagcaagactccacgtgcagggtgggcgagcgactgcaagacacgcacagctggaagtcagagctgcagcacgaggtggaggtgctggctgcagagaccgacctgctgctggcccagaagcaacggctggagcgtgccctggatgccatggaggtgcccttctccatcgccactgacaacatgcagtgcagccagcgccaccagcacgccaaccttgtgcgtgactatgtggagacggagctgctgaaggtgccagcagccttgggtggccaggacttgtgggcacagagaggaggagcccccggcagttcatgtggacaagccacgtggctgctgcaagcacacgggagaccagccctctgtgcgtgagacacctgagtcctgaaatctggccccttagtgacaggaggcagttttgccccagaaggcccctgacttccaagcagctgtttctcctctcctccaatacctttgagtcctggcacagtcatcctgaccctgggctccccagagaccctccctgattgggacagttgctcccgaggtggaaacccaggtctgggccagcactgcgggtgtggacaggtagggtgggataggctgggagccactgctcccattcatcctatacagagccggggacacgaagatctgcacccacaggtccccttctccttgtcacctgtaacttcccaatccagcccagcttgtctatggggcaaccccatagggtgagagagtaactcagtcctggcactgatgctggctctggagaattccctgagctctcagagcctggggcctccatgagaaccactacaggcctgtagacatttgtgaaagatgtggggtggaggcagctggtctcctgccatacccccaaattcaggcaagaacccttgaatccctcccccccttcatgccttccctcctccctcccttccccttctgcaggcctatccccctgcaccctctcagtgcctcaagaactgctgcagctcccgcaaaccctctgcctgcaacaagggtgcctgtgaagtgatggagacactgacagtgcaggaagaggcaaacccagggacagaggggtgcaggactcgggccctggcacacaaggaggtgttgacaaaggccttcagcagctgggcctcctgggatcctcaccaaggaccggatctggtgctcagggcgtctcctccctcaggaagctgagcccatccggaacattcaggagctgctgaagagagccatcgtgcaagcagtgagccagatccagtgggtcgagggctgcccaagggatgactcctgaccccacccacggctggtcctggggcaaggcattgaacgacagaaccctgaagctcagagccagcaggggctgtcccaggtcacagtgggagcacagggctgggtgggggaggttctggcccagcctgagtttgagtggccaaagcccagggccacaactgatctgcagcctcccagcatgggcggcagctcttcgtcactgctgagcacaaggacagccggcccagaactccctcctgaagcgggcatgaaggcctagcctgcagcatggagggtccccagtggggccctccctggccacacaccaaggccctgccccacctcgccccagactgaaccgagagcacacggagatctgcgagatggactggttggacaaggtggaggcctacaacctcgacgagacttgcgggcgccaccacagccagagcaccgaggtgcaggctcatccggcactccaccaccttccaagagaggggggccccagctctgcccccgtgcttgccctggctgtggtctcgcctccctctgcctgggggccccagcggcgctgcttcccccagcctggcccagaggccctcgcccccgagggcacttgggcaactgtctgcccctggcatgagaaagcgtgcaagacctcctcaagtgcccagcgcgtgcacagcctggttgcccgtagacaggacagggtgggatgcggtcagccccaggcgccggcaggattgcatttccaccgaaggccagcagagggagcacgaccaccgcccacttgagcatggcaaactcctggccccgcagcgcctccaccccagagacccggaccaagttcacacaggacaatctgtgccacgcccagcgcgagcgcctggactcggccaacctgtgggtgctggtggactgcatccttcgcgacacctccgaggacctgggactccagtgtgacgccgtgaacctggccttcgggcgccgctgtgaggaactggaggacgcgcggcacaagctgcagcaccacctgcacaaggtggggcaccctgaaccccgaagacagctccggcgcctgcccaccactctgccccctctcatcacctggcctgggccctcaacacctttctcctctgtcccacttatcccgagggaccccagaagcaagtgtcacctctccgtaaacctatgtaaaaccaggtgacactgggtatgatcgcagtgtgttgcaacccccatgactgagcaggaggagctgtggggaggatggaggcaggagctggtctggggagcattgactgcctgggaggtccccaagagtcctggcctggcaggcagggctctgactctagggcctcagcatggcctttaccacctctgagtccccagtccttgagcaggatttgggtcctggtgaccaccaaggatgggggttcttggaccagagctaagagacaacaggctgcctgactctccagagcccgctgggggccctgtgcacattgttcccctcatccacgcctccccagagccactggtcaggaccaccctctggacacagccccaggagctgggtaggaccagactggtctccacattccatatgcccgggcatgggggcacaggcccaaggggcactgtcctgtctgcagatgctgcgggaaatcacagatcaggaacacaacgtggtggcactgaaggaggccatcaaggacaaggaggaacctctgcacatagcccagacccggctgtacctgctctcacaccggcccaacatgcagctgtgccgcgaagcagcccagttcaggtactgcctgggcctctgaggcagtcccaggtgcccccgtccacctcctcgctgtgacccctctcataaacactccaatctccacacacacatcccccacaggtgctgagaggggagggagagtttgcggccacacacaacacgcaagcacgccttaaacacacagatatagacatgacactgggcaggtcatgggtcgggggccttccagtgccagggacctgtgcccacgtggtctcaccccaccctgtgctacctcatcttcccgggaggaagctccttcagacaaggtgagctcctggaggccacggggacagagaggccagagagggccattccctgctgccttgagggtgctgtccccacctctggtggaaagtatgacctacgcctgggctacaggcatagatgggccgtccttttgtttcccttgttaacggatgcctggtggccccttctgagcctaagtacctttcttccttccctgcccctcagttccttcaaggaactgggtgcctccttccgtcaaatatcaggaatgaaaagaactgagcctggtcggctgaggccagtcctgtcctgtcagggtcgagattgcacgcgggtcactcattcccactgaggcccgcgctccctgggaggaccctcgtaatttatgctctgccctagagccgctttcctggtgggatcctttcatggcgtcttcccaggacctcctgccagctcccattgggagttttgggtcccctgcaccccggtaggtgcatacttctgccctccccagccccagctcacacacccaacacccccaagctggtgagtgaggtggaggagctgaacatgtccatcacagcgctgtgggagaagcttctagaaggggagcagtccctttgcaacctcgaggacatccacatgagcctggagaaggatgttaccgccatgaccaacagtctcttcatcgaccgccagaagtgcatggcccatcgtacttgctacacccccatcctgcagctggctggctaccagtgagcagcggcacggtgcttccccccaatcccccaaataaacagtgcattagctttc

SEQ ID NO: 3947 - protein, 150 aa, Homo sapiens
MFPVSSGCFQEQQETNKSLPRSASTPETRTKFTQDNLCHAQRERLDSANLWVLVDCILRDTSEDLGLQCDAVNLAFGRRCEELEDVRHKLQHHLHKVGHPEPRRRLRRLPTTLPPLITWPGPSTPFSSVPLIPRDPRSKCHLSVNLCKTR

SEQ ID NO: 3948 - DNA, 687 bp, Homo sapiens
atgcttccggctcccgctctggagacacgggccggccccctgcgtgtggcacgggcggccgggagggcgtccccggcccggcgctgctcccgcgtgtgtcctggggttgaccagagggccccgggcgctccgtgtgtggctgcgatggtggcgtttttggggacaggcgtccctcggcgcctctgcgggcccgaggaggagcggctggcgggtggggggagtgtgacccaccctcgttacgcgacccccgagcggtcggcgtcccccaacttcttagagggacaagtggcgttcagccacccgagattgagcaataacaggtctgtgatgcccttagatgtccggggctgcacgcgcgctacactgactggctcagcgtgtgcctaccctacgccggcaggcgcgggtaacccgttgaaccccattcgtgatggggatcggggattgcaattattccccatgaacgaggaattcccactggcctttgccgggcgaccccaggggaaccgcgttgatgctgccttcggatcctccggcgaagacttccaccggatgccccggaaactcatacccaaggggcagctcgtcaccagggatgtggaagtactctacatcatctcacacggctttaccactttcacctccgtcatcgacagaatttcacaactctacgtttccctttcataa

SEQ ID NO: 3949 - DNA, 3013 bp, Homo sapiens
cgggagaaagccccgcccccggcgcccgctcccactcctgattggccgggccagcccggggaggcccggcgggaccccggcccgcgtctcagctataaagatagccccggcatgacagccgcggcgaagctcttctagttcatctgctggccggctctcagtccccgtggcgccccctttcctcttgtcccagagcgctctcgactccaccatgccaaggggattcctggtgaagcgaactaaacggacaggcggcttgtaccgagttcgccttgcggagcgtgtcttccctctgctggggccccagggggcgccgcccttcttggaggaggctcccagcgcctccttgcccggcgcggagcgggcgacaccccccacccgagaggaaccaggaaaggggttgacggcggaggcggcccgggaacagtcggggtcgccatgtcgggcggctggggtgagcccggggacgggcgggcgggaaggcgcggagtggcgggcgggtggcagggaaggtcccgggcccagccccagccccagccccagtccagcgaagccggcaggcgcagagctgcgtcgggcgttcctggagcgctgcctcagctcgcccgtctccgccgagtctttccccgggggcgccgccgccgtggccgctttctcctgctccgtggcgccagcagccgcaccgaccccgggggagcagtttctgctgccgcttcgggcgccgttcccagagcccgcgcttcagccggaccctgcgcccctctcggccgcccttcagagtctgaagcgggcggccggcggcgagcgccgcggcaaggcacccacggactgcgcgtctggacccgcggccgcgggaatcaagaagccaaaggccatgaggaagttgagctttgccgatgaggtgaccacatcccctgtcctgggcctgaagatcaaggaggaggagcccggagcgccgtcccggggcttggggggcagccgcacgccactgggggagttcatctgccagctgtgcaaggagcagtacgcagaccccttcgcgctggcccagcaccgctgctcccgcatcgtgcgcgtagagtaccgctgccctgagtgcgacaaggtgttcagctgtcctgcgaacctggcctcccatcgccgctggcataagccgcgtcctgcggctgcaaacgccgccacagtctcctccgccgacgggaagccgccttcttcgtcgtcttcgtcctcccgggactccggggccattgcatcttttctggcggagggaaaggagaacagccgaatagagcggactgcggatcagcacccgcaggccagggacagctccggggcggatcagcacccggacagcgccccgaggcagggcctccaggtgctgacgcatccagagccaccgctgcctcagggcccctacacggagggggtgttggggcgccgggtacctgtgccgggcagtaccagtggtggcaggggatccgagattttcgtgtgcccatattgccacaaaaagtttcgtcgccaagcctatctgcgcaagcacctgagcactcacgaggcgggctcggcccgtgcgctagcgccgggctttggctccgaacgcggtgccccacttgccttcgcttgcccattgtgcggagcgcacttccctacagcagatatcagggagaagcaccggctgtggcatgctgtccgcgaggagctgctcctgcccgctctggcgggggctcctcccgaaacgtcgggccctagcgggccatctgacgggagtgcccagcaaattttctcgtgcaagcactgcccgtccactttttttagctctccagggctgacccggcacatcaataagtgccacccctcagaaagccggcaagtgctgctgctgcagatgccactgcggcctggctgctgagggacgagagaccaggatgatttcgaggttggccttagaggaaacagatcatgggaatttctgtggggctttcttcaacttgcaagtttactttcattccttcctatgttttaatcccctaaaattctccctgtagtcaatgttccaccagaggagcggacagtgaaatgtaatatccctctctagagcaggtatgtatatggtataaaccttgagatcaaagactgtcagctttaaatccttctcactttccccactaaaataggatttttccccttaaaactctggagaccctaacgaatcctatatgatttgtaattcctatggaaagtcgcggtgaatgcgtgcatgtctcaatgtccacaaaggattctggctaccctttggtagccaatgttttttttgtcttgtcatcacaggcgcctatacagcttctgtctcaatagggtcagatattttgcactgtatattctgtgaattaaaagttatgtgattggtgtcaaacttaaggagattcaagacctggcagaaaatgtaagaggatttttgctgcttttggggtgcatggggatctcccctgtaaactttcctttgcccaattatatgtacatgtccattcttaagttggtgtttggaggtggggaggatgctactttactggagttgagacaccccctaaaattctcaccctcagctattttgtgggcagtattcaggaagagctacttcaaacctttctttaaatggctttttggaaatacagaagtcgtttcctcaagtttgactgttttaatggggtttcacccaaattgtttaatgcttctgctgtaaatgtcatactgtgtattcattatgaaaatatgtacagcttaaggaagatgttaacacctgtaatccactaaggaactgaatggcaatttgctcaatattcagtattttcttttcagcggcaacttgtttttgatttttttaaaaaaccatttcagtgtacattgtgtactaattccctactagccagtttgggacattggctgagcactgcctgacagaaagcccgtatttgtaagatgcttaccaccaaataaatgtacatagactgtg

SEQ ID NO: 3950 - DNA, 1550 bp, Homo sapiens
tgccgccgtcccgcccgccagcgccccagcgaggaagcagcgcgcagcccgcggcccagcgcacccgcagcagcgcccgcagctcgtccgcgccatgttccaggcggccgagcgcccccaggagtgggccatggagggcccccgcgacgggctgaagaaggagcggctactggacgaccgccacgacagcggcctggactccatgaaagacgaggagtacgagcagatggtcaaggagctgcaggagatccgcctcgagccgcaggaggtgccgcgcggctcggagccctggaagcagcagctcaccgaggacggggactcgttcctgcacttggccatcatccatgaagaaaaggcactgaccatggaagtgatccgccaggtgaagggagacctggccttcctcaacttccagaacaacctgcagcagactccactccacttggctgtgatcaccaaccagccagaaattgctgaggcacttctgggagctggctgtgatcctgagctccgagactttcgaggaaatacccccctacaccttgcctgtgagcagggctgcctggccagcgtgggagtcctgactcagtcctgcaccaccccgcacctccactccatcctgaaggctaccaactacaatggccacacgtgtctacacttagcctctatccatggctacctgggcatcgtggagcttttggtgtccttgggtgctgatgtcaatgctcaggagccctgtaatggccggactgcccttcacctcgcagtggacctgcaaaatcctgacctggtgtcactcctgttgaagtgtggggctgatgtcaacagagttacctaccagggctattctccctaccagctcacctggggccgcccaagcacccggatacagcagcagctgggccagctgacactagaaaaccttcagatgctgccagagagtgaggatgaggagagctatgacacagagtcagagttcacggagttcacagaggacgagctgccctatgatgactgtgtgtttggaggccagcgtctgacgttatgagcgcaaaggggctgaaagaacatggacttgtatatttgtacaaaaaaaaagttttatttttctaaaaaaagaaaaaagaagaaaaaatttaaagggtgtacttatatccacactgcacactgcctggcccaaaacgtcttattgtggtaggatcagccctcattttgttgcttttgtgaactttttgtaggggacgagaaagatcattgaaattctgagaaaacttcttttaaacctcacctttgtggggtttttggagaaggttatcaaaaatttcatggaaggaccacattttatatttattgtgcttcgagtgactgaccccagtggtatcctgtgacatgtaacagccaggagtgttaagcgttcagtgatgtggggtgaaaagttactacctgtcaaggtttgtgttaccctcctgtaaatggtgtacataatgtattgttggtaattattttggtacttttatgatgtatatttattaaacagatttttacaaatg

SEQ ID NO: 3951 - DNA, 1039 bp, Rattus norvegicus
gagttcggcatgcaagagcggaagaaacgcggctggtaccccggaagcagtcgctgcaacttccgggaggtgcttgtgtgcctggtgcgggagctacggggcccagggattgtgtttaaagtagtgcttctaccaacatgtcccgtggttccagcgccggttttgaccgccacattaccattttttcacccgagggtcggctctaccaagtagaatatgcttttaaggctattaaccagggtggccttacatcagtagctgtcagagggaaagactgtgcagtaattgtcacacagaagaaagtacctgacaaattattggattccagcacagtgactcacttattcaagataactgaaaacattggttgtgtgatgaccggaatgacagctgacagcagatcccaggtacagagggcacgctatgaggcagctaactggaaatacaagtatggctatgagattcctgtggacatgctgtgtaaaagaattgccgatatttctcaggtctacacacagaatgctgaaatgaggcctcttggttgttgtatgattttaattggtatagatgaagagcaaggccctcaggtatataagtgtgatcctgcaggttactactgtgggtttaaagccactgcagcgggagttaaacaaactgagtcaaccagcttccttgaaaaaaaagtgaagaagaaatttgattggacatttgaacagacagtggaaactgcaattacatgcctgtctactgttctatcaattgatttcaaaccttcagaaatagaagttggagtagtgacagttgaaaatcctaaattcaggattcttacagaagcagagattgatgctcaccttgttgctctagcagagagagactaaacattgtcgttagtttaccagatccgtgatgccacttacctgtgtgtttggtaacaacaaaccaacatcatggaggtccctggattgaaaaaggagcctctcccactcctcctaccaccgaagtggttaggactctatataaataaaaacaaggcttttgg

SEQ ID NO: 3952 - protein, 246 aa, Rattus norvegicus
MSRGSSAGFDRHITIFSPEGRLYQVEYAFKAINQGGLTSVAVRGKDCAVIVTQKKVPDKLLDSSTVTHLFKITENIGCVMTGMTADSRSQVQRARYEAANWKYKYGYEIPVDMLCKRIADISQVYTQNAEMRPLGCCMILIGIDEEQGPQVYKCDPAGYYCGFKATAAGVKQTESTSFLEKKVKKKFDWTFEQTVETAITCLSTVLSIDFKPSEIEVGVVTVENPKFRILTEAEIDAHLVALAERD

SEQ ID NO: 3953 - DNA, 615 bp, Homo sapiens
ctctcggctttcggcttggaggaggccaaggtgcaactttctttggtcattccgcaccagccgcctccaccatgccgccaaagttcgaccccaacgaaatcaaagtcgtatacctgaggtgcaccggaggtgaagtcggtgccacttctgccctggcccccaagatcggccccctgggtctgtctccaaaaaaggttggtgatgacattgccaaggcaacgggtgactggaagggcctgaggattacagtgaaactgaccattcagaacagacaggcccagattgaagtggtgccttctgcctctgccctaatcatcaaagctcttaaggaaccaccaagacacagaaagaaatagaaaaacattaaacaccgtgggaatatcacttttgatgagatcgtcaacattgcttgacagatgcggcactgatccttagccagagaactctctggaaccattaaagagatcctggggactgcccagtctgtgggctgtaacgttgatggccgccaccctcatgacatcatagatcacatcaacattggtgctgtggaatgcccagccagttaagcacaaaggaaaatatttcagtaaagaatcatttgacaactggtga

SEQ ID NO: 3954 - protein, 165 aa, Homo sapiens
MPPKFDPNEIKVVYLRCTGGEVGATSALAPKIGPLGLSPKKVGDDIAKATGDWKGLRITVKLTIQNRQAQIEVVPSASALIIKALKEPPRHRKKRKTLNTVGISLLMRSSTLLDRCGTDSLARELSGTIKEILGTAQSVGCNVDGRHPHDIIDHINIGAVECPAS

SEQ ID NO: 3955 - DNA, 794 bp, Homo sapiens
gaagaggcgagaacgacccccggactgaccaaagcccgcgcgcagctgcatcccgcatccagcacctacatcccgccaccgtcgtggccgtcaccatgcccaagagaaaggctgaaggggatgctaagggagataaagccaaggtgaaggacgaaccgcagagaagatccgcgaggttgtctgccaaacctgctcctccaaagccagagcccaagcctagaaagtcccctgtaaagaagggagagaaggtacccaaagggaaaaagggaaaagctgatgcccaggaggagggattccctgactctgacacacatggccaccttggcacaaaagccttgtggtatagaaaaacaaattcgtttttatgtcctcttctccttttccatctttcagcatagacttaactcccttgagccgagacatctgttgggacctgacccccagtcattgattaccagtgtgtcaggcaatctggactttccagtgatgccactgagatggcacctgtcaaaagagcagtggttccatttctagattgtggatcttcagataaattctgccattttcatttcacttcctgaaagtcagggtcggcttgtgaaaagttgttaaacaacatgctaaatgtgaaatgtcaaccctcactctaaactttccctgttcagagcatcagatgaagacttcattgggttttatagtggctttctgatttttggtagtccattgaagaagggagtttgaaagttgttgtatactgttaacaattgtctgcccatgtcctgcctgaaatacca

SEQ ID NO: 3956 - protein, 100 aa, Homo sapiens
MPKRKAEGDAKGDKAKVKDEPQRRSARLSAKPAPPKPEPKPRKSPVKKGEKVPKGKKGKADAEEEGFPDSDTHGHLGTKALWYRKTNSFLCPLLLFHLSA

SEQ ID NO: 3957 - DNA, 1229 bp, Homo sapiens
actttacgcaggcgcgttaggtcctagtcgctatgcgtgtgcttgtgggtggcgggacaggcttcattgggacagccctaacccagctgctgaatgccagaggccacgaagtgacgttggtctcccgaaagcccgggcccggccggatcacgtgggatgagctcgctgcatcggggctgccgagctgcgatgccgccgtcaacctggccggagagaacatcctcaaccctctccgaagatggaatgaaaccttccaaaaagaggtaatcggcagccgcctagagaccacccaattgctggctaaagccatcaccaaagccccacaaccccccaaggcctgggtcttagtcacaggtgtagcttactaccagcccagtctgactgcggagtatgatgaagacagcccaggaggggactttgactttttctccaacctcgtaaccaaatgggaagctgcagccaggcttcctggagattctacacgccaggtggtggtgcgctcaggggttgtgctgggccgtgggggtggtgccatgggccacatgctgctgccctttcgcctgggcctggggggccccatcggctcaggccaccaattcttcccctggatacacatcggggacctggcaggaatcctgacccatgcccttgaagcaaaccacgtgcacggggtcctgaatggagtggctccatcctccgccactaatgctgagtttgcccagaccttgggtgctgccctgggccgccgagccttcatccctctccccagcgctgtggtgcaagctgtctttgggcgacagcgtgccatcatgctgctggagggccagaaggtgatcccacagcgaacactggccactggctaccagtattccttcccagagctaggggctgccttaaaggaaattgtagcctaagtaggtcgtggcaagggcctgaggcctgttcctcacaggcttccaggttaggcactgtgaataggctcagctcctctagagagctgaagccatctggttcttagattcctctcccagtcctctttcccattgttctgttgctccaccttattgtctcaaggccgtaatctcatcaggttgggacattaatcttttcaactccttgtaagatttcccagtttggtttctctacatgtcctgcagctgccccacttctcctttacgctgtgtagagaatgctctgcagtttaggcaataaaaataaattgtctcact

SEQ ID NO: 3958 - DNA, 1557 bp, Homo sapiens
atgtcgtgcgtcaagttatggcccagcggtgcccccgcccccttggtgtccatcgaggaactggagaaccaggagctcgtcggcaaaggcgggttcggcacagtgttccgggcgcaacataggaagtggggctacgatgtggcggtcaagatcgtaaactcgaaggcgatatccagggaggtcaaggccatggcaagtctggataacgaattcgtgctgcgcctagaaggggttatcgagaaggtgaactgggaccaagatcccaagccggctctggtgactaaattcatggagaacggctccttgtcggggctgctgcagtcccagtgccctcggccctggccgctcctttgccgcctgctgaaagaagtggtgcttgggatgttttacctgcacgaccagaacccggtgctcctgcaccgggacctcaagccatccaacgtcctgctggacccagagctgcacgtcaagctggcagattttggcctgtccacatttcagggaggctcacagtcagggacagggtccggggagccagggggcaccctgggctacttggccccagaactgtttgttaacgtaaaccggaaggcctccacagccagtgacgtctacagcttcgggatcctaatgtgggcagtgcttgctggaagagaagttgagttgccaaccgaaccatcactcgtgtacgaagcagtgtgcaacaggcagaaccggccttcattggctgagctgccccaagccgggcctgagactcccggcttagaaggactgaaggagctaatgcagctctgctggagcagtgagcccaaggacagaccctccttccaggaatgcctaccaaaaactgatgaagtcttccagatggtggagaacaatatgaatgctgctgtctccacggtaaaggatttcctgtctcagctcaggagcagcaataggagattttctatcccagagtcaggccaaggagggacagaaatggatggctttaggagaaccatagaaaaccagcactctcgtaatgatgtcatggtttctgagtggctaaacaaactgaatctagaggagcctcccagctctgttcctaaaaaatgcccgagccttaccaagaggagcagggcacaagaggagcaggttccacaagcctggacagcaggcacatcttcagattcgatggcccaacctccccagactccagagacctcaactttcagaaaccagatgcccagccctacctcaactggaacaccaagtcctggaccccgagggaatcagggggctgagagacaaggcatgaactggtcctgcaggaccccggagccaaatccagtaacagggcgaccgctcgttaacatatacaactgctctggggtgcaagttggagacaacaactacttgactatgcaacagacaactgccttgcccacatggggcttggcaccttcgggcaaggggaggggcttgcagcaccccccaccagtaggttcgcaagaaggccctaaagatcctgaagcctggagcaggccacagggttggtataatcatagcgggaaataa

SEQ ID NO: 3959 - DNA, 1830 bp, Homo sapiens
ggggcaagggaagctagtagcggagccggaagtgaggcaccctcgggctcgagacagcggcgacgtttaaagctgagcgacccagtgccactggagacggtcagcttctccactcaggctcctccagcccgagccagaagaccccctcccccagaattctgggggccgatggaagggagccgagtcagatcgcgaggtacccagagccgacagaccggagcgacagggagttgccagaagccccgcccctaggagtgatcggaaagcctcacccatccgggtgaggaacccggagggaccgcctccgggcggagcccgccgaccatggctacgcccctggtggcgggtcccgcagctctacgcttcgccgccgcggctagctggcaggttgtgcgcggacgctgcgtggaacattttccgcgagtactggagtttctgcgatctctgcgcgctgttgcccctggcttggttcgctaccggcaccacgaacgcctttgtatgggcctaaaggccaaggtggtggtggagctgatcctgcagggccggccttgggcccaagtcctgaaagccctgaatcaccactttccagaatctggacctatagtgcgggatcccaaggctacaaagcaggatctgaggaagattttggaggcacaggaaactttttaccagcaggtgaagcagctgtcagaggctcctgtggatttggcctcgaagctgcaggaacttgaacaagagtatggggaaccctttctggctgccatggaaaagctgctttttgagtacttgtgtcagctggagaaagcactgcctacaccgcaggcacagcagcttcaggatgtgctgagttggatgcagcctggagtctctatcacctcttctcttgcctggagacaatatggtgtggacatggggtggctgcttccagagtgctctgttactgactcagtgaacctggctgagcccatggaacagaatcctcctcagcaacaaagactagcactccacaatcccctgccaaaagccaagcctggcacacatcttcctcagggaccatcttcaaggacgcacccagaacctctagctggccgacacttcaatctggcccctctaggccgacgaagagttcagtcccaatgggcctccactaggggaggccataaggagcgccccacagtcatgctgtttccctttaggaatctcggctcaccaacccaggtcatatctaagcctgagagcaaggaagaacatgcgatatacacagcagacctagccatgggcacaagagcagcctccactgggaagtctaagagtccatgccagaccctggggggaagggctctgaaggagaacccagttgacttgcctgccacagagcaaaaggagaattgcttggattgctacatggaccccctgagactatcattattacctcctagggccaggaagccagtgtgtcctccgtctctgtgcagctccgtcattaccataggggacttggttttagactctgatgaggaagaaaatggccagggggaaggaaaggaatctctggaaaactatcagaagacaaagtttgacaccttgatacccactctctgtgaatacctacccccttctggccacggtgccatacctgtttcttcctgtgactgtagagacagttctagacctttgtgatagaactaaaatgctctctgtactctagtctcctgcctcctcagctctgcaagtagtttagtaggaatgaagtggaagtccaggcttggattgcctaactacactgctaaaaatatttgtaatccttaataattaaactttggatttgtt

SEQ ID NO: 3960 - DNA, 3290 bp, Homo sapiens
ccatggagtcagccgggctagagcagctcctacgggagctgctgctaccggacaccgagcgcatccgtcgggccacggaacagctccagatcgttcttcgggcccccgccgctttgccggctctctgcgacctgctagcctcggcggccgacccccagatccgccagtttgcggccgtgctgacccgcagacgactgaacacccgctggcgacggctggcggcggagcaacgggagagcctcaagtccctgatcctgacggccctgcagagagaaacagagcactgtgtgagcctcagcctggcccagctctcagccaccatttttcgaaaggaaggcttggaggcctggccacagcttttgcagctgcttcagcacagtacccacagcccccacagcccagagagagagatggggcttttgctgctaagtgtggtggtgacctcccggcccgaggccttccaaccccaccaccgggagcttcttcggcttctgaatgagactcttggtgaggtgggctctcctgggctgctcttctactccctgcgcactctgaccaccatggctccctacctcagcactgaagatgtgcctctcgctcggatgttggtgcccaagctgatcatggccatgcagactctgatccccatagatgaggcaaaggcctgtgaggcccttgaggctttggatgaactgttggagtcagaggtgccggtcatcaccccctacctctctgaagtcctcacattctgcctggaggtagctagaaatgtggccctgggcaatgcgatacgcatacgtattctctgctgcctcactttcttggtcaaagtcaagagcaaggccttactgaagaatcgtctcctgccacccttgctgcacacccttttccccattgtggctgctgagcccccaccaggccagttggatcccgaggaccaggattcagaagaggaagagttggagattgagctgatgggggagactcccaagcatttcgctgtacaagttgtggacatgctggcactacacctgccccccgagaagctctgtccccagctgatgcccatgttggaagaggctttgcggagcgagagcccataccagcgcaaagctggactcctggtgctggccgtgctgtctgacggagctggcgaccacatcaggcagagactgctgcccccactgctgcagattgtgtgcaagggcctggaggacccctcgcaagttgtacgcaatgctgcgctgtttgccctgggccagttctcagaaaacctacagccccatatcagcagctattcaagggaggtaatgccactgctcctcgcctacttgaagtcggtgcctcttggacacacacaccacctagccaaggcctgctatgccctggagaattttgtggagaacctagggcccaaggtgcagccctaccttccggagcttatggaatgcatgctgcagcttctgaggaaccccagcagtccccgggccaaggagctggctgtgagcgccctgggagccattgctacggctgcccaggtctcgctgctgccctacttccctgccatcatggagcacctgcgggaattcctgttaacaggccgtgaggaccttcagcctgtgcagatccagagcctggagacactgggggtgctggcacgagcagtgggggagcccatgaggccgctggctgaggaatgctgccagctgggtctgggcctctgcgaccaggtagacgacgctgacttgcggcgctgcacgtacagcctatttgcagccttatcgggtctgatgggtgagggcctggcgccccacttggaacagatcaccacgctcatgctgctgtcactgcgttccaccgagggcattgtgcctcagtatgacgggagcagctccttccttctgtttgacgatgagagtgatggggaagaagaggaggagctcatggatgaggatgtggaagaagaggatgactcagagatctcagggtacagcgtggagaatgccttcttcgatgagaaggaagacacctgtgctgccgtgggggagatctctgtgaacaccagtgtggccttccttccatacatggaaagtgtctttgaagaagtatttaaactgctggagtgccctcacctgaatgtgcggaaggcagcccatgaggctctgggtcagttttgctgtgcactgcacaaggcctgtcaaagctgcccctcggaacccaacactgctgctttgcaggctgccctggcccgagtcgtgccatcctacatgcaggcagtgaacagggagcgggaacgccaggtggtgatggccgtgctggaggccctgacaggggtgctccgcagctgtgggaccctcacactgaagccccctgggcgcctcgctgagctctgtggcgtgctcaaggctgtgctgcagaggaagacagcctgtcaggatactgacgaggaggaggaagaggaagatgatgatcaggctgaatacgacgccatgttgctggagcacgctggagaggccatccctgccctggcagccgcggctgggggagactcctttgccccattctttgccggtttcctgccattattggtgtgcaagacaaaacagggctgcacagtggcagagaagtcctttgcagtggggaccttggcagagactattcagggcctgggtgctgcctcagcccagtttgtgtctcggctgctccctgtgctgttgagcaccgcccaagaggcagaccccgaggtgcgaagcaatgccatcttcgggatgggcgtgctggcagagcatgggggccaccctgcccaggaacacttccccaagctgctggggctcctttttcccctcctggcgcgggagcgacatgatcgtgtccgtgacaacatctgtggggcacttgcccgcctgttgatggccagtcccaccaggaaaccagagccccaggtgctggctgccctactgcatgccctgccactgaaggaggacttggaggagtgggtcaccattgggcgcctcttcagcttcctgtaccagagcagccctgaccaggttatagatgtggctcccgagcttctgcgtatctgcagcctcattctggctgacaacaagatcccaccagacaccaaggccgcactgttgctgctcctgacgttcctggccaaacagcacaccgacagctttcaagcagctctgggctcactgcctgttgacaaggctcaggagctccaggctgtactgggcctctcctagactgcaggctgcagccagtccagagagaatagagcctgccca

SEQ ID NO: 3961 - protein, 1081 aa, Homo sapiens
MESAGLEQLLRELLLPDTERIRRATEQLQIVLRAPAALPALCDLLASAADPQIRQFAAVLTRRRLNTRWRRLAAEQRESLKSLILTALQRETEHCVSLSLAQLSATIFRKEGLEAWPQLLQLLQHSTHSPHSPEREMGLLLLSVVVTSRPEAFQPHHRELLRLLNETLGEVGSPGLLFYSLRTLTTMAPYLSTEDVPLARMLVPKLIMAMQTLIPIDEAKACEALEALDELLESEVPVITPYLSEVLTFCLEVARNVALGNAIRIRILCCLTFLVKVKSKALLKNRLLPPLLHTLFPIVAAEPPPGQLDPEDQDSEEEELEIELMGETPKHFAVQVVDMLALHLPPEKLCPQLMPMLEEALRSESPYQRKAGLLVLAVLSDGAGDHIRQRLLPPLLQIVCKGLEDPSQVVRNAALFALGQFSENLQPHISSYSREVMPLLLAYLKSVPLGHTHHLAKACYALENFVENLGPKVQPYLPELMECMLQLLRNPSSPRAKELAVSALGAIATAAQVSLLPYFPAIMEHLREFLLTGREDLQPVQIQSLETLGVLARAVGEPMRPLAEECCQLGLGLCDQVDDADLRRCTYSLFAALSGLMGEGLAPHLEQITTLMLLSLRSTEGIVPQYDGSSSFLLFDDESDGEEEEELMDEDVEEEDDSEISGYSVENAFFDEKEDTCAAVGEISVNTSVAFLPYMESVFEEVFKLLECPHLNVRKAAHEALGQFCCALHKACQSCPSEPNTAALQAALARVVPSYMQAVNRERERQVVMAVLEALTGVLRSCGTLTLKPPGRLAELCGVLKAVLQRKTACQDTDEEEEEEDDDQAEYDAMLLEHAGEAIPALAAAAGGDSFAPFFAGFLPLLVCKTKQGCTVAEKSFAVGTLAETIQGLGAASAQFVSRLLPVLLSTAQEADPEVRSNAIFGMGVLAEHGGHPAQEHFPKLLGLLFPLLARERHDRVRDNICGALARLLMASPTRKPEPQVLAALLHALPLKEDLEEWVTIGRLFSFLYQSSPDQVIDVAPELLRICSLILADNKIPPDTKAALLLLLTFLAKQHTDSFQAALGSLPVDKAQELQAVLGLS

SEQ ID NO: 3962 - DNA, 2232 bp, Homo sapiens
atctaatgaggagcgaggtgcggtgccccgaagcgctcgcttcccgcggtgcgatctagtcctgcagtaggcggcccggggccacaccgcggccgcccaagccagtgcaaggcccaggggcctgacatcgctcccagcgctcgaggaccgaggcctgctgtggaggacaccgtgctccctcgggacctgctctggattccggcccggacgtccccttggagctctgcatctccaacctggaacccaacccagaagtctcaagtttgacgcatcacgtggcgtgcggatccactgagggtccacagagaggggcgcccatctcctgcgtctcagttatcctggtgttgggaattctgtgccctaaagaattccgactcagatccgaacggggatctggtggaatcgagggtgaaagaccagagggacaatgttctactatcccaacgtgcttcagcgccacaccggctgctttgccaccatctggctggcggcgactcgcggcagccggttggtgaagcgcgaatacctgagggtgaatgtggtgaaaacctgcgaggaaatcctcaattacgtgctggtacgagtgcaacccccgcagcccggcctgccgcggccccgcttctccctctatctctcagcccaacttcagatcggtgtgatccgcgtctattctcaacaatgccagtacctcgcggaggacatccagcacatcttggagcgcctccaccgtgcccagctgcagatccgaatagatatggagactgagctacccagcctgctgcttcctaaccacctggccatgatggagaccctagaagatgctccagatcccttttttgggatgatgtctgtggatcccagacttcctagtcctttcgatatccctcagattcgacacctcttagaggctgcaatcccagagagagttgaagagatccctcctgaagttcctacagagcccagggagccagagaggattccggtcactgtgctgccacctgaggccatcacgatcctggaggcagagcccatacggatgctggagattgagggtgaacgggagctcccagaggtcagccgccgagaactggacctgctgatcgcagaggaagaagaagctatcttgttagaaatcccgcggctcccacctccagctcctgcagaggtggaaggaataggagaggcactgggtcctgaggagctgaggctgacaggctgggaacctggggccctactcatggaggtgacccccccggaggagctgcgtctgccagccccacccagcccagagaggaggcccccagtccccccacctcctcgccgccgccgtcgtcgccggttactgttctgggacaaggagactcagatctccccggagaaattccaggaacaactgcaaaccagagcccactgctgggaatgtcctatggtgcagccgcccgagaggaccatcagaggccctgcggagttgttcagaaccccaactctctctggctggctaccccctgaactactgggtctctggacccattgtgcccagccacccccaaaagccctcaggcgagagctgcctgaggaggcagccgctgaggaggaaaggagaaagattgaagttccaagtgagattgaggtcccgagggaggccctggagcccagtgttccccttatggtgtctttagagatctccctagaggcagctgaagaggagaagtcccgcatcagcctcatcccaccagaagaacggtgggcctggcctgaggtggaggcgccagaagctcctgcattgcccgtggtgcctgaactccctgaggtgcccatggagatgcctttggtgctgcccccagagctcgagctgctctcactggaagcagtgcacagggcagtggcactggagctgcaggctaacagggagcccgacttcagcagcctggtgtcacctctcagcccccgcaggatggctgcccgggtcttctacctgctcctggtgctctcagcgcaacagattcttcacgtgaaacaagaaaagccatatggtcgcctcctgatccagccggggcccagattccactgaggttagagtccatttacaaagctgccaggaaaccggccacttctagtaaaccacgtcgtgcctcactgggtcctgcttacctcatttctgaatgtgcatttccagccttcttgctctcagagctattgttcaagcagaaaacaagctgcttttattacagt

SEQ ID NO: 3963 - protein, 547 aa, Homo sapiens
MFYYPNVLQRHTGCFATIWLAATRGSRLVKREYLRVNVVKTCEEILNYVLVRVQPPQPGLPRPRFSLYLSAQLQIGVIRVYSQQCQYLAEDIQHILERLHRAQLQIRIDMETELPSLLLPNHLAMMETLEDAPDPFFGMMSVDPRLPSPFDIPQIRHLLEAAIPERVEEIPPEVPTEPREPERIPVTVLPPEAITILEAEPIRMLEIEGERELPEVSRRELDLLIAEEEEAILLEIPRLPPPAPAEVEGIGEALGPEELRLTGWEPGALLMEVTPPEELRLPAPPSPERRPPVPPPPRRRRRRRLLFWDKETQISPEKFQEQLQTRAHCWECPMVQPPERTIRGPAELFRTPTLSGWLPPELLGLWTHCAQPPPKALRRELPEEAAAEEERRKIEVPSEIEVPREALEPSVPLMVSLEISLEAAEEEKSRISLIPPEERWAWPEVEAPEAPALPVVPELPEVPMEMPLVLPPELELLSLEAVHRAVALELQANREPDFSSLVSPLSPRRMAARVFYLLLVLSAQQILHVKQEKPYGRLLIQPGPRFH

SEQ ID NO: 3964 - DNA, 2149 bp, Homo sapiens
cccgccttccatacctccccggctccgctcggttcctggccaccccgcagcccctgcccaggtgccatggccgcattgtaccgccctggcctgcggcttaactggcatgggctgagccccttgggctggccatcatgccgtagcatccagaccctgcgagtgcttagtggagatctgggccagcttcccactggcattcgagattttgtagagcacagtgcccgcctgtgccaaccagagggcatccacatctgtgatggaactgaggctgagaatactgccacactgaccctgctggagcagcagggcctcatccgaaagctccccaagtacaataactgctggctggcccgcacagaccccaaggatgtggcacgagtagagagcaagacggtgattgtaactccttctcagcgggacacggtacaactcccgcctggtggggcccgtgggcagctgggcaactggatgtccccagctgatttccagcgagctgtggatgagaggtttccaggctgcatgcagggccgcaccatgtatgtgcttccattcagcatgggtcctgtgggctccccgctgtcccgcatcggggtgcagctcactgactcagcctatgtggtggcaagcatgcgtattatgacccgactggggacacctgtgcttcaggccctgggagatggtgactttgtcaagtgtctgcactccgtgggccagcccctgacaggacaaggggagccagtgagccagtggccgtgcaacccagagaaaaccctgattggccacgtgcccgaccagcgggagatcatctccttcggcagcggctatggtggcaactccctgctgggcaagaagtgctttgccctacgcatcgcctctcggctggcccgggatgagggctggctggcagagcacatgctgatcctgggcatcaccagccctgcagggaagaagcgctatgtggcagccgccttccctagtgcctgtggcaagaccaacctggctatgatgcggcctgcactgccaggctggaaagtggagtgtgtgggggatgatattgcttggatgaggtttgacagtgaaggtcgactccgggccatcaaccctgagaacggcttctttggggttgcccctggtacctctgccaccaccaatcccaacgccatggctacaatccagagtaacactatttttaccaatgtggctgagaccagtgatggtggcgtgtactgggagggcattgaccagcctcttccacctggtgttactgtgacctcctggctgggcaaaccctggaaacctggtgacaaggagccctgtgcacatcccaactctcgattttgtgccccggctcgccagtgccccatcatggacccagcctgggaggccccagagggtgtccccattgacgccatcatctttggtggccgcagacccaaaggggtacccctggtatacgaggccttcaactggcgtcatggggtgtttgtgggcagcgccatgcgctctgagtccactgctgcagcagaacacaaagggaagatcatcatgcacgacccatttgccatgcggcccttttttggctacaacttcgggcactacctggaacactggctgagcatggaagggcgcaagggggcccagctgccccgtatcttccatgtcaactggttccggcgtgacgaggcagggcacttcctgtggccaggctttggggagaatgctcgggtgctagactggatctgccggcggttagagggggaggacagtgcccgagagacacccattgggctggtgccaaaggaaggagccttggatctcagcggcctcagagctatagacaccactcagctgttctccctccccaaggacttctgggaacaggaggttcgtgacattcggagctacctgacagagcaggtcaaccaggatctgcccaaagaggtgttggctgagcttgaggccctggagagacgtgtgcacaaaatgtgacctgaggccctagtctagcaagaggacatagcaccctcatctgggaatagggaaggcaccttgcagaaaatatgagcaatttgatattaactaacatcttcaatgtgccatagaccttcccacaaagactgtccaataataagagatgcttatctatttt

SEQ ID NO: 3965 - protein, 640 aa, Homo sapiens
MAALYRPGLRLNWHGLSPLGWPSCRSIQTLRVLSGDLGQLPTGIRDFVEHSARLCQPEGIHICDGTEAENTATLTLLEQQGLIRKLPKYNNCWLARTDPKDVARVESKTVIVTPSQRDTVQLPPGGARGQLGNWMSPADFQRAVDERFPGCMQGRTMYVLPFSMGPVGSPLSRIGVQLTDSAYVVASMRIMTRLGTPVLQALGDGDFVKCLHSVGQPLTGQGEPVSQWPCNPEKTLIGHVPDQREIISFGSGYGGNSLLGKKCFALRIASRLARDEGWLAEHMLILGITSPAGKKRYVAAAFPSACGKTNLAMMRPALPGWKVECVGDDIAWMRFDSEGRLRAINPENGFFGVAPGTSATTNPNAMATIQSNTIFTNVAETSDGGVYWEGIDQPLPPGVTVTSWLGKPWKPGDKEPCAHPNSRFCAPARQCPIMDPAWEAPEGVPIDAIIFGGRRPKGVPLVYEAFNWRHGVFVGSAMRSESTAAAEHKGKIIMHDPFAMRPFFGYNFGHYLEHWLSMEGRKGAQLPRIFHVNWFRRDEAGHFLWPGFGENARVLDWICRRLEGEDSARETPIGLVPKEGALDLSGLRAIDTTQLFSLPKDFWEQEVRDIRSYLTEQVNQDLPKEVLAELEALERRVHKM

SEQ ID NO: 3966 - DNA, 2593 bp, Homo sapiens
tacattgggtctactgcacaaattacagggctccaagtgtcttatgagagcaggacttgggctgaccatgtctctctgccctcacccatgctctgctctgatttcagatcctaagtgtgaacgtgaagtccccagccctgctgctgagccagttgctgccctacatggagaacaggtatggcagggcgggggtggggaccagtcggagttggggacctgaggtgggcacagaaatacagtcggtagcacagccagtagtgggtagaggacagaagaggtctgggatctccacatccctcatcttcttgtcctgcctccccatctgtgtggctgccattcccaattccagtggctgcaggatgagagtagtattccaggggcccaggcatagcctccttggccttgacatcagcaggtttgggacaaggctatgctttaactccttgaccttgtgggctggtcattgtcaccttacctgctctctgttcttaccaacttaaaaccaatgacagggttagccccattcctctccataggaaaaagcctgtcccagacctctcctcatgcctgcgcttggtctccagggaccctgcctgtgttccaggtcctgcagatctgactgtacccctcacagacacacccttaggaactggccaggggctgtcttcagtagaaggaaagttcctgactgtcacttctggtctcccttaccccatctgctccttagaggttgctcattgataggcactcaccatcagccttgggtgcctcttcacaaagcccaccctgccctctccttcaagcacctggcaagagaggaagcagaagataagggttctgagcatggacatcgtatttatgagaaataggcatggaatcctagctctgccgtgtattggctggtactaaacctttctgagcctcagttttctgaactctgagatggggacagtaataggacctgtgttgcttctgtgagggttgcatcatttaatgaactcatgatagtgtcaccatcagtggtaagctcttagcttcagcttctcttatgtttgtcttgtctcaggaggggtgctgtcatcctggtctcttccattgcagcttataatccagtagtggtaagtgcttggtccttgtgctcctgagtggtatagggtgaggggcaactttgttcttttcctcagagccttacagacaaagtgcctgggacagacccccaccatcctcctgctgccctgggctgagcttgtctccatgtgggtgggagggctgctgggcctgtgagatccctgtaggtgagaaatccaactgatgctttcccccactctcccatatcctaatcactctgtcaattcccttcccaggcgctgggtgtctacaatgtcagcaagacagcgctgctgggtctcactagaacactggcattggagctggcccccaaggacatccgggtaaactgcgtggttccaggaattatcaaaactgacttcagcaaagtggtgaggattgggtgtgtcttccatctcccagtctggctcagtgggaacccttcccagtgaataagggatcaaggggtgactgaatccttaggtcagcatgcctatgactgaggtcctcattgttctctgaactcagccatggtgcagtccatccatcctgaaaagatgctccttcttttgagaagggcaaagctgccctaggtgttctgcctggtggccttcccggggccctgcccatcttgttttagtagcactgactccttcatttcttccctttgcccagtttcatgggaatgagtctctctggaagaacttcaaggaacatcatcagctgcagaggcaagtggggtttggagatttggtggtccatgtgtggctaggcaggggcagttgagtctattgcaagagcagacccctccctgtcatctggccattgtttttgctgaaatctggagtccacatggccctggagggtgcaagtagccctgctgcatccaccttgttccccatggagcccactcccacctgtcatccgtgagccccagagcagcagaatcagagtacaagatgcttgacactgtgtccttcttccatccaggattggggagtcagaggactgtgcaggaatcgtgtccttcctgtgctctccagatgccagctacgtcaacggggagaacattgcggtggcaggctactccactcggctctgagaggagtgggggcggctgcgtagctgtggtcccaggcccaggagcctgagggggtgtctaggtgatcatttggatctggaggcagagtctgccattctgccagactagcaatttgggggcttactcatgctaggcttgaggaagaagaaaaacgcttcggcattctccttaggacttatctgcttgtagatttggctgatccaattaacatgtggggttcttggtgtgggtctggggagctgaaggattttatggagctggtgctttggaggaatcttaagggaaaggagtagaagctcaggcctttgaaggatttcagctcctcctctctgtaatttgtgctttaagcattttttttcctaaaataaactcaaatttatcctc

SEQ ID NO: 3967 - DNA, 1445 bp, Homo sapiens
ggttcccttccacgctgtggaagctttgttcttttggtcttcatgataaatcttgctgctgctcactcgttgggtccgtgccacctttaagagctgtaacactcaccgcgaaggtctgcaacttcactcctggggccagcaagaccacgaatgcaccgagaggaatgaacaactctggacacaccatctttaagaaccgtaatactcaccgcaagggtctgcaacttcattcttgaagtcagtgaggccaagaacccatcaattccgtacacattttggtgactttgaagagactgtcacctatcaccaagtggtgagactattgccaagcagtgagactattgccaagtggtgagaccatcaccaagcggtgagactatcacctatcgccaagtggcctgattcagcaggaagcatctcagacaccaaccactatgctgtcagcagttgcccggggctaccagggctggtttcatccctgtgctaggctttctgtgaggatgagcagcaccgggatagacaggaagggcgtcctggctaaccgggtagccgtggtcacggggtccaccagtgggatcggctttgccatcgcccgacgtctggcccgggacggggcccacgtggtcatcagcagccggaagcagcagaacgtggaccgggccatggccaagctgcagggggaggggctgagtgtggcgggcattgtgtgccacgtggggaaggctgaggaccgggagcagctggtggccaaggccctggagcactgtgggggcgtcgacttcctggtgtgcagcgcaggggtcaaccctctggtagggagcactctggggaccagtgagcagatctgggacaagatcctaagtgtgaacgtgaagtccccagccctgctgctgagccagttgctgccctacatggagaacaggaggggtgctgtcatcctggtctcttccattgcagcttataatccagtagtggcgctgggtgtctacaatgtcagcaagacagcgctgctgggtctcactagaacactggcattggagctggcccccaaggacatccgggtaaactgcgtggttccaggaattatcaaaactgacttcagcaaagtgtttcatgggaatgagtctctctggaagaacttcaaggaacatcatcagctgcagaggattggggagtcagaggactgtgcaggaatcgtgtccttcctgtgctctccagatgccagctacgtcaacggggagaacattgcggtggcaggctactccactcggctctgagaggagtgggggcggctgcgtagctgtggtcccaggcccaggagcctgagggggtgtctaggtgatcatttggatctggaggcagagtctgccattctgccagactagcaatttgggggcttactcatgctaggcttgaggaagaagaaaaacgcttcggcattctcc

SEQ ID NO: 3968 - DNA, 1206 bp, Homo sapiens
tcttgtgcccggggccggtggggaggccggggagggggccccggggggcgcaggggactacgggaacggcctggagtctgaggaactggagcctgaggagctgctgctggagcccgagccggagcccgagcccgaagaggagccgccccggccccgcgcccccccgggagctccgggccctgggcctggttcgggagcccccggcagccaagaggaggaggaggagccgggactggtcgagggtgacccgggggacggcgccattgaggacccggtgagggaaggagggcgagcgagcaggccggcggctggccggccgggtcactggaggcccagagctcgggcgagcgggtggcaggcggggggtggggttgggcggggaataacgtggctggggccgggtcgggccggggatgggtcagcgatcactacaaggggcccgactggcttgattcgggcgtcacggttgcctagtgttgttctagagagggtagcttttcttttatcacgaccctcgcatggggcgagggaaatggccgagcatggctgaggccgcgctctggccgagagcagggcacagcccctgcgttggttcctcttaagctgtcctccataccctccccacttatattaggagctggaagctatcaaagctcgagtcagggagatggaggaagaagctgagaagctaaaggagctacagaacgaggtagagaagcagatgaatatgagtccacctccaggcaatgctggcccggtgatcatgtccattgaggagaagatggaggctgatgcccgttccatctatgttggcaatgtggactatggtgcaacagcagaagagctggaagctcactttcatggctgtggttcagtcaaccgtgttaccatactgtgtgacaaatttagtggccatcccaaagggtttgcgtatatagagttctcagacaaagagtcagtgaggacttccttggccttagatgagtccctatttagaggaaggcaaatcaaggtgatcccaaaacgaaccaacagaccaggcatcagcacaacagaccggggttttccacgagcccgctaccgcgcccggaccaccaactacaacagctcccgctctcgattctacagtggttttaacagcaggccccggggtcgcgtctacaggtcaggatagatgggctgctcctctttcccccgcctcccgtg

SEQ ID NO: 3969 - DNA, 4495 bp, Homo sapiens
cacgctcagagcagaccgctagcaggaggcaggatgtgatagtctaagaccctggaagctgacggccagagggagggaagggtggtcacagaggagaggcaaagcaacgggaggtggaggatcctggaggtgtctgcaaggagaatacacagcagcgaggggctgcagaagcggacccagcgacttctgcgctgacgcggggcgggcgggagagaggaagagaggggagcgcggtggcgctgcgagctggccccgccggggaaggggctgccatgtcccgtgagcggcccccgggcaccgacattccccgcaacctgagcttcatcgccgcgctaacggagcgcgcctactaccgtagccagcggcccagcctcgaggaggagccggaggaggagccaggcgagggcgggacgcggttcggggcccgatcccgcgctcacgcaccgagtcggggccgccgggcccgatctgcaccagccggaggcggcggggcccgggcgccccgcagccgtagcccagacacccgcaagagagtgcgtttcgccgacgcactggggttggagctggctgtcgtgcgccgcttccgtcccggtgagctgccccgggtgccccgccacgtgcagatccaattgcagagggacgccctccgccacttcgcgccctgccagccccgcgcccgcggcctccaggaggcgcgcgccgccctggagccggccagcgagcccggcttcgccgcccgcttgctgacgcagcgcatctgcctggaacgcgccgaggcgggcccgctgggcgtggccgggagcgcgcgcgtggtggacctggcctacgagaagcgcgtgagcgtgcgctggagcgccgacggctggcggagccaacgcgaggcgccagccgcctacgccggtccggccccgcccccgccgcgcgccgaccgcttcgccttccgcctgcccgcgccgccgattgggggcgccctgctcttcgccttgcgctaccgtgtgacaggtcacgagttctgggacaacaacggcggccgtgactatgctctacgtgggcccgagcacccgggcagtggcggagctccggagccgcagggctggatccactttatctgagacgaggcgcctgcggccgacggcggaaaacaccaaaggcacccgggggcggggcgacccgatgtggcggggaggagtaggagagaccaggattggcgggagcggtccaagggagtcaagccggggagggcgaaaagggaacctggccactgctccttggtccttggcattatgacgggattcccttgtcacctctgacagttcctggctgcggtgtccgcggactggctggggagtgatgacagaagggatggaaaccctattttcttttctccaagaccatggttggtctgcttccctcactcgggctccttgacagtcttctagaagagagaaggaggaaaagaagcagttcctgatgttacaaatgaacaaggatctcccagccttagtctttgagaaaagatggctgaaagagaggaactctccaagtcattccgcaaacaaatgcccatttaaacatcatccttgtcttgtgaagaaaacaggaagaatgtcatgtaccatgtggatcaccttcagttcaaagttgcagcaaagtgaagaaagaaactactggaagccacccagcaatgcactgtttagtcatcaattaggagcccatgggaggataatagggagactgggtggaggctcagtgtgtaataatctcttgtctaatgtatgtgtgtcactgccatgttgtatgaacaatagtgagggctcacatttacttaacacttgtgtgcgcaaatctgggtttttcttcctttccagaactatgactcgatcataaaatctgttttgtttgcatgcatgcccaaaacaaccctgtaagtagaacattgtcattatctctgttttagagatgaggaaacaggctcagagaagctcagaaatttgttcaagatcgcacagctagtaaatggcagaagtaggattgtgaacccagggaatctccagagcctctgtgtaaccatgatgttatattttttttcctctttaaaaacaaaatttaaaaccttgctataatctcttattaggaaatgatcatagtttctgactgtgctctgccttcccatcctgccaatctcctggactggcttggagaagacagggggcccccgagcttcatctgtgactcgaaggagtttgctgctgtctcctgtgtcagtgtcccatctatgcaggatcagcacaggacccccctcaccttcccacttacactctagcctttccatacattggaattctctcctggccctagccagcgctccacacctgttggtgtgccacctccctccctcttcccccactggccttgaacaggcaaaccccctaatgtcgccactaggttgggtccgtgactaggacacctgctagagggtctgtgcttgggccttttctaggaatcccgatgttactgggtaagtgccaactctgtgggcagaatgctaatgataatcctgttccctgacctctttctcagaagtaccctggctcactctccccaatctcagctttatagaacaacattttggtcttgattattcccatatcaagctgccccagggcttcggtaagctgttagttgccccactgcctcaaggctgggtctggctgagctacttcttaggcacacaaatagtgggtgtctccttggaacctgacacaaaactatcagtgctaccaagccttgtaaaatagggaggaaactaatatttcttgagtggcttctgagtgcctggtgctttcgcggctctctggagagattccttgccctgatggctttggtgtgtactcctctcccaggacttcagcactgagattttcccaaccccctggcttttcctcaccttgggttgagttgatccggcactaccacaaaccccaccatctgcaaaccaaccaagattaggcagtatgccctttccgtcttgcactgctcttccaaaacttccatctgtatttctcacaccctcagtaagcaaagctgagtgtgcatggacagagctgcatccactgctttctcccagcgggtgcagtctaatctgacacggggaacactaggagtttagcggaatcttcagccaccctattaatgtgttacgcattaggcattgtagtggaaactcctctgatggctcatgactatatgaacaggagcaatttggaatataacatgtcagctgtggactgggaagtgccgtgagagaaaacactacctgggtcataggcttgggtccctgaggcaacccagcagggacactgttgcccattcctctcatccagactgcaggtgtcttcctacacctccctgtcccatagcctccgtcctgttttttgtttgtttgtttttctttgtgaatgtagaaaaacatttcatcatgagccctagctcctcagttttccacctaacacccacattcccttgtttctaactgccgtgtttttctggagcctgctgggatctttgcagtttgcaggtcatagaatcagacatgaaaaggcttctcttccgacgtcattggttcctggctcctttacagatgagaacacaggtccagaggtgagaaatgactctagcagggtcatagaatttgttagtgcagctcaagatgggacttaaactcaggcctcctgatcacccattcccaggctaggaaacaggtctctgctcggtgtggtggttcatacctgtaatcgcaacactttgggaggctgaggcaggagcattgcttgagcccaggagttcgagaccagtctgagcaacatagtgggaccctgtctctacaaaaacttttaaaattagctgggcatggtggcacacatctgtattcccagctactcaggaagctgagacaggaggatcgcttgagcccaggagttggaggttactgagctatgatcgcaccactgcactccagcttggtgacagtgagaccctcaaaaaaaaaaagaaaagaaagaggtctctacacaagcccgtgattcttcatggcaagggataacatcagaaatgtttcattttctgctattagtttccattcctttccccatccaggcataaagagaaacaaaagacaatgatggtattctctgtgtcctcagctttggcacttttgttgatgttgctaaggagcagtgaccttgctaaaaagactgaataatccacccactgaatagctaacctggggaggaaatgaaaatttcctttgtggatctccccaaatccattgttgtcaccaggccctcccagaacctcctcagttccttcacagtgcaaccctgtgtacttggcccgcaacccaatagtattgtgcctcacttcaccttccatgggcaactgccctcccttctggacataaaacctcatattttaaataaagttgaaatatgaaaag

SEQ ID NO: 3970 - protein, 279 aa, Homo sapiens
MSRERPPGTDIPRNLSFIAALTERAYYRSQRPSLEEEPEEEPGEGGTRFGARSRAHAPSRGRRARSAPAGGGGARAPRSRSPDTRKRVRFADALGLELAVVRRFRPGELPRVPRHVQIQLQRDALRHFAPCQPRARGLQEARAALEPASEPGFAARLLTQRICLERAEAGPLGVAGSARVVDLAYEKRVSVRWSADGWRSQREAPAAYAGPAPPPPRADRFAFRLPAPPIGGALLFALRYRVTGHEFWDNNGGRDYALRGPEHPGSGGAPEPQGWIHFI

SEQ ID NO: 3971 - DNA, 1618 bp, Homo sapiens
ggctccttccccttcccgggcctttcagcttggtctttccgggcctcgcttcccccagcccctgcgcccggcccgaacgagaggttccggagccccggcgcgggcgggttctggggtgtagacgctgctggccagccctccccagccgaggttctcggcaccgccttgagagcttcagctgccccaggattagaatcccaagaaaatcaaatggcatccggggatttctgctcacctggagaagggatggaaatacttcaacaagtgtgcagcaaacaacttcctccttgtaacctgagtaaagaggacctgttacagaacccatacttcagcaagcttctcctgaatctctcacagcatgtggatgagagtggcttaagcctcaccctagcaaaggagcaggctcaggcatggaaggaagttcgactgcataagacaacatggttgaggtctgagattttacacagagtcattcaagagttgcttgtggactactatgtgaagatacaagacacaaatgtaacttctgaggacaaaaagtttcatgagacccttgaacagcggctgcttgtaactgaactgatgcggctcttaggtcctagccaggagagggagatacctccactgctggggctggagaaagcggaccttctggaactcatgccactcacagaggattttgtgtggatgagggctcggctacagcaagaagtagaggagcagctcaaaaagaaatgtttcactctgctctgctactatgatcccaattcagatgctgacagtgaaaccgtgaaggcagcaaaggtgtggaaactcgcagaggtcctggtgggtgagcagcagcagtgccaggatgccaagagccagcagaaggagcagatgttgctgctggagaagaagagtgctgcttactcccaggtgcttctccgctgcctcactttgctgcagaggcttcttcaagaacaccggctgaagactcaatccgagctagaccgcatcaatgcccagtacctggaagtcaagtgcggtgctatgatccttaagctgaggatggaggagctaaagattttgtccgacacttacactgttgagaaagtggaagttcatcgtctgattagggaccgtttggagggagccattcacctacaggagcaggacatggagaactcaagacaggtcctgaactcctatgaggtccttggggaggagtttgacaggctggtgaaagagtacaccgtactcaagcaggcaacagagaacaagcggtgggccctccaggagttcagcaaggtctaccgttgagctctggcagggccaggagacatggcttctgcatagctgctgcctcctaatcttcctgctagtgggaccaccttcacctggggctgccttcagtgcaagggagtgtggaaatgcttacgcttgaaacactgcagtcatttaggcactctcctggtttctctttattttttatgactgggcctcttctggaaaatctagcaaggagatttatataatttttatgcatagctgtgtgtcagtgtcagccctgtattgtatttgattatctcctgaataaagttatgatattatatcttaaaaaaaaaaaaaaaaaaaa

SEQ ID NO: 3972 - protein, 363 aa, Homo sapiens
MASGDFCSPGEGMEILQQVCSKQLPPCNLSKEDLLQNPYFSKLLLNLSQHVDESGLSLTLAKEQAQAWKEVRLHKTTWLRSEILHRVIQELLVDYYVKIQDTNVTSEDKKFHETLEQRLLVTELMRLLGPSQEREIPPLLGLEKADLLELMPLTEDFVWMRARLQQEVEEQLKKKCFTLLCYYDPNSDADSETVKAAKVWKLAEVLVGEQQQCQDAKSQQKEQMLLLEKKSAAYSQVLLRCLTLLQRLLQEHRLKTQSELDRINAQYLEVKCGAMILKLRMEELKILSDTYTVEKVEVHRLIRDRLEGAIHLQEQDMENSRQVLNSYEVLGEEFDRLVKEYTVLKQATENKRWALQEFSKVYR

SEQ ID NO: 3973 - DNA, 2413 bp, Homo sapiens
gcgactcgtcccgccttctggggcactagtttgactttgtgattggctactagtatcaaggaatcccggcgtggacagcgcgaggagaaagatggcggcgatggcggtcgggggtgctggtgggagccgcgtgtccagcgggagggacctgaattgcgtccccgaaatagctgacacactaggggctgtggccaagcaggggtttgatttcctctgcatgcctgtcttccatccgcgtttcaagagggagttcattcaggaacctgctaagaatcggcccggtccccagacacgatcagacctactgctgtcaggaagggactggaatacgctaattgtgggaaagctttctccatggattcgtccagactcaaaagtggagaagattcgcaggaactccgaggcggccatgttacaggagctgaattttggtgcatatttgggtcttccagctttcctgctgccccttaatcaggaagataacaccaacctggccagagttttgaccaaccacatccacactggccatcactcttccatgttctggatgcgggtacccttggtggcaccagaggacctgagagatgatataattgagaatgcaccaactacacacacagaggagtacagtggggaggagaaaacgtggatgtggtggcacaacttccggactttgtgtgactatagtaagaggattgcagtggctcttgaaattggggctgacctcccatctaatcatgtcattgatcgctggcttggggagcccatcaaagcagccattctccccactagcattttcctgaccaataagaagggatttcctgttctttctaagatgcaccagaggctcatcttccggctcctcaagttggaggtgcagttcatcatcacaggcaccaaccaccactcagagaaggagttctgctcctacctccaatacctggaatacttaagccagaaccgtcctccacctaatgcctatgaactctttgccaagggctatgaagactatctgcagtccccgcttcagccactgatggacaatctggaatctcagacatatgaagtgtttgaaaaggaccccatcaaatactctcagtaccagcaggccatctataaatgtctgctagaccgagtaccagaagaggagaaggataccaatgtccaggtactgatggtgctgggagcaggacggggacccctggtgaacgcttccctgcgggcagccaagcaggccgaccggcggataaagctgtatgctgtggagaaaaacccaaatgccgtggtgacgctagagaactggcagtttgaagaatggggaagccaagtgaccgtagtctcatcagacatgagggaatgggtggctccagagaaagcagacatcattgtcagtgagcttctgggctcatttgctgacaatgaattgtcgcctgagtgcctggatggagcccagcacttcctaaaagatgatggtgtgagcatccccggggagtacacttcctttctggctcccatctcttcctccaagctgtacaatgaggtccgagcctgtagggagaaggaccgtgaccctgaggcccagtttgagatgccttatgtggtacggctgcacaacttccaccagctctctgcaccccagccctgtttcaccttcagccatcccaacagagatcctatgattgacaacaaccgctattgcaccttggaatttcctgtggaggtgaacacagtactacatggctttgccggctactttgagactgtgctttatcaggacatcactctgagtatccgtccagagactcactctcctgggatgttctcatggtttcccatcctcttccctattaagcagcccataacggtacgtgaaggccaaaccatctgtgtgcgtttctggcgatgcagcaattccaagaaggtgtggtatgagtgggctgtgacagcaccagtctgttctgctattcataaccccacaggccgctcatataccattggcctctagccctgcgtgccaagtgtccagagccttggaagcagcttcaggttcctgctcctgtagtacagaaggtgcagtacatctatgggctgtgattcccccttgcccatcagagaggagcatttcaatctgctttcctgccttacatcaaggtgggcaagggattataattaattgcagggctcaagccaccaatctatgaagacctcaggccagggggtgaggaattagtgctggatttgaagctacgcactcagcctcaagaactccctggaatatccctgagaacatggggtttgaacggattttcagcctttttctgttcttgttttgatggttttgtgtaagaggaaataccaataaagttatagccctttactgccaaaaaaaaaaaaaaaaaaaaaaaaaaaaaaa

SEQ ID NO: 3974 - protein, 637 aa, Homo sapiens
MAAMAVGGAGGSRVSSGRDLNCVPEIADTLGAVAKQGFDFLCMPVFHPRFKREFIQEPAKNRPGPQTRSDLLLSGRDWNTLIVGKLSPWIRPDSKVEKIRRNSEAAMLQELNFGAYLGLPAFLLPLNQEDNTNLARVLTNHIHTGHHSSMFWMRVPLVAPEDLRDDIIENAPTTHTEEYSGEEKTWMWWHNFRTLCDYSKRIAVALEIGADLPSNHVIDRWLGEPIKAAILPTSIFLTNKKGFPVLSKMHQRLIFRLLKLEVQFIITGTNHHSEKEFCSYLQYLEYLSQNRPPPNAYELFAKGYEDYLQSPLQPLMDNLESQTYEVFEKDPIKYSQYQQAIYKCLLDRVPEEEKDTNVQVLMVLGAGRGPLVNASLRAAKQADRRIKLYAVEKNPNAVVTLENWQFEEWGSQVTVVSSDMREWVAPEKADIIVSELLGSFADNELSPECLDGAQHFLKDDGVSIPGEYTSFLAPISSSKLYNEVRACREKDRDPEAQFEMPYVVRLHNFHQLSAPQPCFTFSHPNRDPMIDNNRYCTLEFPVEVNTVLHGFAGYFETVLYQDITLSIRPETHSPGMFSWFPILFPIKQPITVREGQTICVRFWRCSNSKKVWYEWAVTAPVCSAIHNPTGRSYTIGL

SEQ ID NO: 3975 - DNA, 2409 bp, Homo sapiens
ggttctggaagacggcagagctgccgccattttgcgggaagaggaggctctgtacctgcagtgctgcttttcttgcctagactctaggaactatccgagctccactccccacaacatactcaaaggaacggagagaaccgggacccccctgcggggacccggaactgatctgacaggatggcatctgatgactttgacatagtgattgaggccatgctggaagctccctataaaaaagaagaggatgagcaacaaaggaaagaagttaaaaaggattatcctagcaataccaccagcagcaccagcaacagtggcaatgagaccagtggaagcagcaccatcggggagacaagcaatcgtagtcgagatcgggatcggtatagacggagaaatagtcggagccgaagtccaggtcggcagtgtcgtcaccgtagccgtagctgggatcgtcgacatggtagtgagtcgcgaagtcgggaccatcgtcgtgaggatcgtgtgcattacaggagtcctccacttgccactggttataggtatggacacagtaagagtcctcatttcagagagaagagcccagtcagggagccagttgataatctgagtcctgaggagcgtgatgcccgcacagttttctgtatgcagttagctgcccgaattcggcctcgagatctggaggactttttctctgctgtaggcaaggttcgcgatgtacgtatcatctcagatcggaactcacgtcgttctaagggcattgcctacgtggaattctgtgaaatccagtctgtgccactggccattgggctgactgggcagcggttgctgggagtgcctatcattgtacaggcttcacaggcagagaaaaaccgactggcagccatggccaacaacctgcaaaagggcaatggtggaccaatgcgcctctatgtgggttccctgcacttcaatatcactgaagacatgctccggggcatctttgagccctttggtaaaattgataatattgtcctgatgaaggactcagatacaggccgctctaaaggttatggtttcatcacgttctctgattctgagtgtgcccggcgggccctggaacagttgaatgggtttgagcttgctggtcgacctatgagggttggccatgtgactgagcgactggatggtggcacagacatcacttttcctgatggggaccaggagctggatctgggatcagcaggtggacgttttcagctcatggcaaaactggcagaaggcgctggaatccaactgccaagcactgctgctgctgctgctgccgccgccgcccaggctgctgccttgcaactgaatggagcagttcccttgggggccctgaatccagcagctctgactgctctgagtccagccctgaaccttgcctcccagtgtttccagctctccagcctctttaccccccagaccatgtaaatcagtggcacagtatactgcctccttgtgcctctggatcctgccacttcacatctactcttccatggccccatttctccattttgtggaccaagccatcctgagggcatggacattgtctctgaggaaattggggccacccttaagataccaagaaaagctcctgcccatggtcccactggaaatggactctgctgagcaaagccaccagttgaagagaacagaatccacacctgcattgaatacctgtttctccatgtgtatcgtctctgagattaccttcttgccctttccaacaccttagtgattcctcaatttctcccccattgggaaggccatagggcatactgaaggaactgacctctctccttttcctgtacctttaacctttagtctgtcaaggaaaacccttaggacctctgaatcaagaggactgagtttgtgggtgaaccttgaaggtgctctttctgctacaagggccctgggagatagcatggacgtgcattgagaagccagcctcagaccttagcttgaagcagcttgaggccagacctactgtagcctcagcatcttgctaggaggcatggaagtgatctatcctgccaggaggcctcagagtgatctgtcctgccaggaggtgtgagagtgatctgtcctgtgaggcatttaggggctttcaggaatttagtaaaaggtggagtatgcctttccagtatcttccatcttcctttgtatacttgtccttcctcccatttcctccctttggcccgaggtaggaggatggagggaggctgctactctaccacttcctgtgtgcctctactgtggcctcaaccctggcaattatagctactcccatcccttacctgggcatgtgtgagcccttctcactggattttatacccttgtgtctgtgtacataaatatatatacatatatatatacataaaaactttgtac

SEQ ID NO: 3976 - DNA, 3558 bp, Homo sapiens
cagaccccagttcgccgactaagcagaagaaagatcaaaaaccggaaaagaggagaagagcaaacaggcactttgaggaacaatcccctttaactccaagccgacagcggtctaggaattcaagttcagtgcctaccgaagacaaaggcgccccgagggagtggcggtgcgaccccagggcgtgggcccggccgcggagcccacactgcccggctgacccggtggtctcggaccatgtctcccgccccaagacccccccgttgtctcctgctccccctgctcacgctcggcaccgcgctcgcctccctcggctcggcccaaagcagcagcttcagccccgaagcctggctacagcaatatggctacctgcctcccggggacctacgtacccacacacagcgctcaccccagtcactctcagcggccatcgctgccatgcagaagttttacggcttgcaagtaacaggcaaagctgatgcagacaccatgaaggccatgaggcgcccccgatgtggtgttccagacaagtttggggctgagatcaaggccaatgttcgaaggaagcgctacgccatccagggtctcaaatggcaacataatgaaatcactttctgcatccagaattacacccccaaggtgggcgagtatgccacatacgaggccattcgcaaggcgttccgcgtgtgggagagtgccacaccactgcgcttccgcgaggtgccctatgcctacatccgtgagggccatgagaagcaggccgacatcatgatcttctttgccgagggcttccatggcgacagcacgcccttcgatggtgagggcggcttcctggcccatgcctacttcccaggccccaacattggaggagacacccactttgactctgccgagccttggactgtcaggaatgaggatctgaatggaaatgacatcttcctggtggctgtgcacgagctgggccatgccctggggctcgagcattccagtgacccctcggccatcatggcacccttttaccagtggatggacacggagaattttgtgctgcccgatgatgaccgccggggcatccagcaactttatgggggtgagtcagggttccccaccaagatgccccctcaacccaggactacctcccggccttctgttcctgataaacccaaaaaccccacctatgggcccaacatctgtgacgggaactttgacaccgtggccatgctccgaggggagatgtttgtcttcaaggagcgctggttctggcgggtgaggaataaccaagtgatggatggatacccaatgcccattggccagttctggcggggcctgcctgcgtccatcaacactgcctacgagaggaaggatggcaaattcgtcttcttcaaaggagacaagcattgggtgtttgatgaggcgtccctggaacctggctaccccaagcacattaaggagctgggccgagggctgcctaccgacaagattgatgctgctctcttctggatgcccaatggaaagacctacttcttccgtggaaacaagtactaccgtttcaacgaagagctcagggcagtggatagcgagtaccccaagaacatcaaagtctgggaagggatccctgagtctcccagagggtcattcatgggcagcgatgaagtcttcacttacttctacaaggggaacaaatactggaaattcaacaaccagaagctgaaggtagaaccgggctaccccaagtcagccctgagggactggatgggctgcccatcgggaggccggccggatgaggggactgaggaggagacggaggtgatcatcattgaggtggacgaggagggcggcggggcggtgagcgcggctgccgtggtgctgcccgtgctgctgctgctcctggtgctggcggtgggccttgcagtcttcttcttcagacgccatgggacccccaggcgactgctctactgccagcgttccctgctggacaaggtctgacgcccaccgccggcccgcccactcctaccacaaggactttgcctctgaaggccagtggcagcaggtggtggtgggtgggctgctcccatcgtcccgagccccctccccgcagcctccttgcttctctctgtcccctggctggcctccttcaccctgaccgcctccctccctcctgccccggcattgcatcttccctagataggtcccctgagggctgagtgggagggcggccctttccagcctctgcccctcaggggaaccctgtagctttgtgtctgtccagccccatctgaatgtgttgggggctctgcacttgaaggcaggaccctcagacctcgctggtaaaggtcaaatggggtcatctgctccttttccatcccctgacataccttaacctctgaactctgacctcaggaggctctgggcactccagccctgaaagccccaggtgtacccaattggcagcctctcactactctttctggctaaaaggaatctaatcttgttgagggtagagaccctgagacagtgtgagggggtggggactgccaagccaccctaagaccttgggaggaaaactcagagagggtcttcgttgctcagtcagtcaagttcctcggagatctgcctctgcctcacctaccccagggaacttccaaggaaggagcctgagccactggggactaagtgggcagaagaaacccttggcagccctgtgcctctcgaatgttagccttggatggggctttcacagttagaagagctgaaaccaggggtgcagctgtcaggtagggtggggccggtgggagaggcccgggtcagagccctgggggtgagcctgaaggccacagagaaagaaccttgcccaaactcaggcagctggggctgaggcccaaaggcagaacagccagagggggcaggaggggaccaaaaaggaaaatgaggacgtgcagcagcattggaaggctggggccgggcaggccaggccaagccaagcagggggccacagggtgggctgtggagctctcaggaagggccctgaggaaggcacacttgctcctgttggtccctgtccttgctgcccaggcagcgtggaggggaagggtagggcagccagagaaaggagcagagaaggcacacaaacgaggaatgaggggcttcacgagaggccacagggcctggctggccacgctgtcccggcctgctcaccatctcagtgaggggcaggagctggggctcgcttaggctgggtccacgcttccctggtgccagcacccctcaagcctgtctcaccagtggcctgccctctcgctcccccacccagcccacccattgaagtctccttgggccaccaaaggtggtggccatggtaccggggacttgggagagtgagacccagtggagggagcaagaggagagggatgtcgggggggtggggcacggggtaggggaaatggggtgaacggtgctggcagttcggctagatttctgtcttgtttgtttttttgttttgtttaatgtatatttttattataattattatatatgaattccaaaaaaaaaaaaaaaaaaaaa

SEQ ID NO: 3977 - protein, 582 aa, Homo sapiens
MSPAPRPPRCLLLPLLTLGTALASLGSAQSSSFSPEAWLQQYGYLPPGDLRTHTQRSPQSLSAAIAAMQKFYGLQVTGKADADTMKAMRRPRCGVPDKFGAEIKANVRRKRYAIQGLKWQHNEITFCIQNYTPKVGEYATYEAIRKAFRVWESATPLRFREVPYAYIREGHEKQADIMIFFAEGFHGDSTPFDGEGGFLAHAYFPGPNIGGDTHFDSAEPWTVRNEDLNGNDIFLVAVHELGHALGLEHSSDPSAIMAPFYQWMDTENFVLPDDDRRGIQQLYGGESGFPTKMPPQPRTTSRPSVPDKPKNPTYGPNICDGNFDTVAMLRGEMFVFKERWFWRVRNNQVMDGYPMPIGQFWRGLPASINTAYERKDGKFVFFKGDKHWVFDEASLEPGYPKHIKELGRGLPTDKIDAALFWMPNGKTYFFRGNKYYRFNEELRAVDSEYPKNIKVWEGIPESPRGSFMGSDEVFTYFYKGNKYWKFNNQKLKVEPGYPKSALRDWMGCPSGGRPDEGTEEETEVIIIEVDEEGGGAVSAAAVVLPVLLLLLVLAVGLAVFFFRRHGTPRRLLYCQRSLLDKV

SEQ ID NO: 3978 - DNA, 1099 bp, Homo sapiens
tcctgctcagcatggctgctttagggactgttctcttcacaggtgtccggaggctgcactgcagcgtagccgcttgggcgggcggccagtggcgactacagcagggactggctgccaacccctccggctacgggccccttaccgagctcccagactggtcatatgcggatggccgccctgctcccccaatgaaaggccagcttcgaagaaaagctgaaagggagacgtttgcaagacgagttgtactgctgtcacaggaaatggacgctggattacaagcatggcagctcaggcagcagaagttgcaggaagaacaaaggaagcaggaaaatgctcttaaacccaaaggggcttcactgaagagcccacttccaagtcaataaaaagcaactcctgcctcccttcctcaccctgtctctggatttcttttctatcacctagatgcttcatccagccagaagatagccttcacgttccccatctgtcttcagagaaaaagagctgggacaccaagaacaagctgttagatcactgcctgggaggcttggcttagtactctcatctctggttccattccagttcagctaagtcttgctttaaaatttttacctcctagctgggtgcggtggctcacgcctgtaatcccagcactttgggaggctgaggcgggcagatcacaagatcaggagttcgagaccagcctggccaacccagcctggtcaacatggtgaaaccctgtccctactaaagatacaaacaattagccgggcgtggtggggtgcgcttgtaatcccagctactcaggaggctgaggcaggagaatcgcttaaactcgggaggtagaggttgcagtgagccaaggtcacaccattgcactccaacctgggcgacagggcgagactccgtctcaaaaaaaaaaaaaaatttacctcctttgcaggccataggactagcccaactatgagaaatagctgttctgtgaacgtgaaaaggggacagcagttttcccagttttggccaggcagtcaagcctttaacagctcatgcacagtttaggccatgtacagctggcatctaataaatgttttcatgaaaaaga

SEQ ID NO: 3979 - protein, 123 aa, Homo sapiens
MAALGTVLFTGVRRLHCSVAAWAGGQWRLQQGLAANPSGYGPLTELPDWSYADGRPAPPMKGQLRRKAERETFARRVVLLSQEMDAGLQAWQLRQQKLQEEQRKQENALKPKGASLKSPLPSQ

SEQ ID NO: 3980 - DNA, 2207 bp, Homo sapiens
agctgttgcagcatgagcgatacgcttggttctcctaactagcaccttcccctctcccctgactcagctggtagcccctcctccccgcacctgcccaaaggtcactggacaggcatttgtctggccttcccttttactgctggctgggaaggaggagcatcagaccacagatcctggaaggcacttctctccctgactgctgctcacactgccgtgagaacctgcttatatccaggaccaaggaggcaatgccaggaagctggtgaagggtttcctctcctccaccatggttgacagcactgagtatgaagtggcctcccagcctgaggtggaaacctcccctttgggtgatggggccagcccagggccggagcaggtgaagctgaagaaggagatctcactgcttaacggcgtgtgcctgattgtggggaacatgatcggctcgggcatctttgtttcccccaagggtgtgctcatatacagtgcctcctttggtctctctctggtcatctgggctgtcgggggcctcttctccgtctttggggccctttgttatgcggaactgggcaccaccattaagaaatctggggccagctatgcctatatcctggaggcctttggaggattccttgctttcatcagactctggacctccctgctcatcattgagcccaccagccaggccatcattgccatcacctttgccaactacatggtacagcctctcttcccgagctgcttcgccccttatgctgccagccgcctgctggctgctgcctgcatttgtctcttaaccttcattaactgtgcctatgtcaaatggggaaccctggtacaagatattttcacctatgctaaagtattggcactgatcgcggtcatcgttgcaggcattgttagacttggccagggagcctctactcattttgagaattcctttgagggttcatcatttgcagtgggtgacattgccctggcactgtactcagctctgttctcctactcaggctgggacaccctcaactatgtcactgaagagatcaagaatcctgagaggaacctgcccctctccattggcatctccatgcccattgtcaccatcatctatatcttgaccaatgtggcctattatactgtgctagacatgagagacatcttggccagtgatgctgttgctgtgacttttgcagatcagatatttggaatatttaactggataattccactgtcagttgcattatcctgttttggtggcctcaatgcctccattgtggctgcttctaggcttttctttgtgggctcaagagaaggccatctccctgatgccatctgcatgatccatgttgagcggttcacaccagtgccttctctgctcttcaatggtatcatggcattgatctacttgtgcgtggaagacatcttccagctcattaactactacagcttcagctactggttctttgtggggctttctattgtgggtcagctttatctgcgctggaaggagcctgatcgacctcgtcccctcaagctcagcgttttcttcccgattgtcttctgcctctgcaccatcttcctggtggctgttccactttacagtgatactatcaactccctcatcggcattgccattgccctctcaggcctgcccttttacttcctcatcatcagagtgccagaacataagcgaccgctttacctccgaaggatcgtggggtctgccacaaggtacctccaggtcctgtgtatgtcagttgctgcagaaatggatttggaagatggaggagagatgcccaagcaacgggatcccaaatctaactaaacaccatctggaatcctgatgtggaaagcaggggtttctggtctactggctagagctaaggaagttgaaaaggaaagctcacttctttggaggcacctgtccagaagcctggcctaggcagcttcaacctttgaacttactttttgaaatgaaaagtaatttatttgttttgctacatactgttccagacttttaaaggggacaatgaaggtgactgtggggaggagcatgtcaggtttgggcttggttgttttagaagcacctgggtgtgcctacctactcctcttttcttttaaaagggcccacaatgctccaatttcctgtctcctttagagagacatgaaactatcacaggtgctggatgacaataaaagtttatgttcct

SEQ ID NO: 3981 - DNA, 1488 bp, Homo sapiens
atggtaacgtggctttacagatttttacccacttcaaatatggccgccaagctccgttctcttttaccgcctgatctacggctacaattctggcttcatgcccgcctccaaaagtgcttcctctcgaggggttgtggttcttactgcgcaggcgcaaaagcaagtcctcttccgggcaaaatggcgatgggactaatgtgcggacgccgggagcttctgcgcttgctacagtccgggcgtcgggtccacagcgtcgcagggccctcgcaatggcttgggaaaccgctgaccacacggctcctattcccagtagccccgtgctgctgtcgcccacactacctcttccttgcggcttccggcccccgcagcctcagtacctctgctatctcttttgcagaagtccaggttcaggcccctcctgttgttgctgcaactccctcacccacagcagtacctgaggtggcttctggagagactgcagatgtagtccaaactgctgcagagcagagcttcgctgaactggggctggggtcatacaccccagtgggactgatccagaatttactggaatttatgcatgttgatctgggcctaccttggtggggggccattgctgcatgtacagtctttgcccgctgcctgatttttcctctcatcgtgacgggccagcgagaggcagccaggatccacaatcacttgccagagatccagaagttttccagtcgaatcagagaggccaagttagcaggagaccatattgagtattacaaggcttcctcggagatggcactttaccagaaaaaacatggtattaaactctataaacctctcattctccctgtgactcaggccccaatcttcatctccttcttcattgctttgagagagatggccaaccttcctgtgcccagcctgcagacaggtggcctctggtggttccaggatctcacggtatccgatcccatctacatattaccactggcagtcactgctacaatgtgggctgttcttgagctaggtgctgagacaggtgtgcaaagttctgaccttcagtggatgagaaatgtcatcagaatgatgcccctgataaccttgcccataaccatgcatttccccacggcagtgtttatgtactggctctcctccaatttgttttccctggtccaagtatcctgtctccggattccagcagtacgcactgtacttaaaatcccccagcgtgttgtacatgacctggacaaattacctccacgggaaggcttcctagagagcttcaaaaaaggctggaaaaatgctgaaatgacgcgtcagctgcgagagcgtgaacaacgcatgcggaatcagttggagctagcagccaggggtcctttacgacagacctttacccacaaccctctcctacaacctggaaaggataaccctcccaatatccctagcagcagcagcaaaccaaagtcaaagtatccctggcacgacacacttggctga

SEQ ID NO: 3982 - protein, 495 aa, Homo sapiens
MVTWLYRFLPTSNMAAKLRSLLPPDLRLQFWLHARLQKCFLSRGCGSYCAGAKASPLPGKMAMGLMCGRRELLRLLQSGRRVHSVAGPSQWLGKPLTTRLLFPVAPCCCRPHYLFLAASGPRSLSTSAISFAEVQVQAPPVVAATPSPTAVPEVASGETADVVQTAAEQSFAELGLGSYTPVGLIQNLLEFMHVDLGLPWWGAIAACTVFARCLIFPLIVTGQREAARIHNHLPEIQKFSSRIREAKLAGDHIEYYKASSEMALYQKKHGIKLYKPLILPVTQAPIFISFFIALREMANLPVPSLQTGGLWWFQDLTVSDPIYILPLAVTATMWAVLELGAETGVQSSDLQWMRNVIRMMPLITLPITMHFPTAVFMYWLSSNLFSLVQVSCLRIPAVRTVLKIPQRVVHDLDKLPPREGFLESFKKGWKNAEMTRQLREREQRMRNQLELAARGPLRQTFTHNPLLQPGKDNPPNIPSSSSKPKSKYPWHDTLG

SEQ ID NO: 3983 - DNA, 2509 bp, Homo sapiens
ctcccgggtcagctggtgctggcgtcaggcgctgggcgggctcgccaggacctggcaaggcttgtttactatggccgatgatctggagcagcagtctcaaggctggctgagtagctggctgcccacgtggcgccccacttccatgtctcagctgaagaatgtggaagccaggatcctccagtgtctccagaataagttcctggccagatatgtatccctcccaaaccagaataagatctggacggtgactgtgagccccgagcaaaacgaccgcacccccttggtgatggtgcatggttttgggggcggcgtgggtctctggatcctcaacatggactcactgagtgcccgccgcacactgcacaccttcgatctgcttggcttcgggcgaagctcaaggccagcattcccaagggacccggagggggctgaggatgagtttgtgacatcgatagagacatggcgggagaccatggggatccccagcatgatcctcctggggcacagtttgggaggattcctggccacttcttactcaatcaagtaccctgatagagttaaacacctcatcctggtggacccatggggctttcccctccgaccaactaaccccagtgagatccgtgcacccccagcctgggtcaaagccgtggcatctgtcctaggacgttccaatccattggctgttcttcgagtagctgggccctgggggcctggtctggtgcagcgattccggccggacttcaaacgcaagtttgcagacttctttgaagatgataccatatcagagtatatttaccactgcaacgcacagaatcccagtggtgagacagcattcaaagccatgatggagtcctttggctgggcccggcgccctatgctggagcgaattcacttgattcgaaaagatgtgcctatcactatgatctacgggtccgacacctggatagataccagtacgggaaaaaaggtgaagatgcagcggccggattcctatgtccgagacatggagattaagggtgcctcccaccatgtctatgctgaccagccacacatcttcaatgctgtggtggaggagatctgcgactcagttgattgagctgctctctgaagaggaagaggagaaagccagagagtcactcttacctccctgtctgcttactcacccactctgtcctttcctcaccaactaacatgtgccagccaggcagagtcttgtgctgttcccagaacaggacgacagtgaaaagaacactcttgaccctacactgaaggctgaaggcagaagccacaagaggccttgagtgccacccccagggaagaacataaagggttgcacaatgccacccatccactccttgccaagtgttacccagatggtggaggatgtgaagggattgcaccaagccacattcactctctctgtggcctttcttcctctgggcaaagaagggcttccagtggcctttcctcactctgtagtgtttgtggggataggttccatgcaagaacaccttcctcctccatcccccacttcaccccatcccataccagttccatccagggtctgcttaactgccaagagcaggtcctggagttcccttcacctgcagagtccttttcatgacctaggaggtcttattcaaagccctcattgacagaggaggaaacaggccaaggcaggacatggctggaccatggtgatacagctctgtgtgattcaagttctggcagagcttgtaaggctagagcccaggtctgccgacaccctgtgcttgttgcacacttgatttgctaaggctggagacaggcaccattgccatggggctggtcctagtcactggccgaggataagcccgtccctgtcccacattctagccccactatgcgggggtgctgttgtcctgcctgtgtctcatccccagctgcctaagctagggacactcaagtgcttccttccttgccccatcttcctcccaactggaggcctctgagcctcccctgtgccttgggccctgaagccccatatgtagtatagagcaaaggtggctcctggtgaagagagggtggaaaggcccttcagccccagggccatgtctgggttctccatgcccatcagtctctgcagtttctctacctgcccccagagctgaggccatctgcaagcccctgcccatggcccaatggggagcctccagccacaagttccctgtccttatcagccactgggtggttcccactgcatgaccctctatccctgccatctgtccccatggtttccagctcaatccacccctgacccatctgtcagctttttcccagggagccgtttcaggggttctgggcagtaggctgggcctggcctcagaacctggtggctcctgcctgctccttcacttttgtaaaaccatccccttcaccagaatggtattaactcctggtgctttgtactactggtccagctgccttgggctccttttctatattaataaagaaacgagtaaaaatt

SEQ ID NO: 3984 - DNA, 699 bp, Homo sapiens
catccggtgtggtcgacgggtcctccaagagtttggggcgcggaccggagtaccttgcgtgcagttatgtcggcgtcggtagtgtctgtcatttcgcggttcttagaagagtacttgagctccactccgcagcgtctgaagttgctggacgcgtacctgctgtatatactgctgaccggggcgctgcagttcggttactgtctcctcgtggggaccttccccttcaactcttttctctcgggcttcatctcttgtgtggggagtttcatcctagcggtttgcctgagaatacagatcaacccacagaacaaagcggatttccaaggcatctccccagagcgagcctttgctgattttctctttgccagcaccatcctgcaccttgttgtcatgaactttgttggctgaatcattctcatttacttaattgaggagtaggagactaaaagaatgttcactctttgaatttcctggataagagttctggagatggcagcttattggacacatggattttcttcagatttgacacttactgctagctctgctttttatgacaggagaaaagcccagagttcactgtgtgtcagaacaactttctaacaaacatttattaatccagcctctgcctttcattaaatgtaaccttttgctttccaaattaaagaactccatgccactcctcaaaaaaaaaaaaaa

SEQ ID NO: 3985 - protein, 113 aa, Homo sapiens
MSASVVSVISRFLEEYLSSTPQRLKLLDAYLLYILLTGALQFGYCLLVGTFPFNSFLSGFISCVGSFILAVCLRIQINPQNKADFQGISPERAFADFLFASTILHLVVMNFVG

SEQ ID NO: 3986 - DNA, 1222 bp, Homo sapiens
gtgttggttcagaggagggaccaggcagaaggtggttgagaggcagagctgcccctgagtgagccatgcagaggatctcctccctcatccatctctctctcttctgggcaggagtcatgtcagccattgagttggtgcctgaacaccaaacagtgcctgtgtcaataggggtccctgccaccctcaggtgctccatgaaaggagaagcgatcggtaactactatatcaactggtacaggaagacccaagatatccagaaccctgaccctgccgtgtaccagctgagagactctaaatccagtgacaagtctgtctgcctattcaccgattttgattctcaaacaaatgtgtcacaaagtaaggattctgatgtgtatatcacagacaaaactgtgctagacatgaggtctatggacttcaagagcaacagtgctgtggcctggagcaacaaatctgactttgcatgtgcaaacgccttcaacaacagcattattccagaagacaccttcttccccagcccagaaagttcctgtgatgtcaagctggtcgagaaaagctttgaaacagatacgaacctaaactttcaaaacctgtcagtgattgggttccgaatcctcctcctgaaagtggccgggtttaatctgctcatgacgctgcggctgtggtccagctgagatctgcaagattgtaagacagcctgtgctccctcgctccttcctctgcattgcccctcttctccctctccaaacagagggaactctcctacccccaaggaggtgaaagctgctaccacctctgtgcccccccggcaatgcaccaactggatcctacccgaatttatgattaagattgctgaagagctgccaaacactgctgccaccccctctgttcccttattgctgcttgtcactgcctgacattcacggcagaggcaaggctgctgcagctccgctggctgtgcacattccctcctgctccccagagactgcctccgccatcccacagatgatggatcttcagtgggttctcttgggctctaggtcccggagaatgttgtgaggggtttatttttttttaatagtgttcataaagaaagacatagtattcttcttctcaagacgtggggggaaattatctcattatcgaggccctgctatgctgtgtgtctgggcgtgttgtatgtcctgctgccgatgccttcattaaaatgatttggaagagc

SEQ ID NO: 3987 - DNA, 345 bp, Homo sapiens
ccttattcgagaggtgtcagggctgggagactaggatgtcggacacgtggagctctatccaggcccacaagaagcagctggactctctgcgggagaggctgcagcggaggcggaagcaggactcggggcacttggcagcagacgttcgcccttctgcaagtagttcgcggttcctcctcacgctgggcctcggttcttccagctcacttttaccggacggacgcttgagccccaccctcgtccgccttgcccactcctcttcagactgcgaggacgtcgcctttgtgaggctgctcagccccctatcccgcgaagcagcaagaacccctttttgttgctgctttg

SEQ ID NO: 3988 - DNA, 1959 bp, Homo sapiens
gagaattggctatatcctggagcgagtgctgggaggtgctagtccgccgcgccttattcgagaggtgtcagggctgggagactaggatgtcggacacgtggagctctatccaggcccacaagaagcagctggactctctgcgggagaggctgcagcggaggcggaagcaggactcggggcacttggatctacggaatccagaggcagcattgtctccaaccttccgtagtgacagcccagtgcctactgcacccacctctggtggccctaagcccagcacagcttcagcagttcctgaattagctacagatcctgagttagagaagaagttgctacaccacctctctgatctggccttaacattgcccactgatgctgtgtccatctgtcttgccatctccacgccagatgctcctgccactcaagatggggtagaaagcctcctgcagaagtttgcagctcaggagttgattgaggtaaagcgaggtctcctacaagatgatgcacatcctactcttgtaacctatgctgaccattccaagctctctgccatgatgggtgctgtggcagaaaagaagggccctggggaggtagcagggactgtcacagggcagaagcggcgtgcagaacaggactcgactacagtagctgcctttgccagttcgttagtctctggtctgaactcttcagcatcggaaccagcaaaggagccagccaagaaatcaaggaaacatgctgcctcagatgttgatctggagatagagagccttctgaaccaacagtccactaaggaacaacagagcaagaaggtcagtcaggagatcctagagctattaaatactacaacagccaaggaacaatccattgttgaaaaatttcgctctcgaggtcgggcccaagtgcaagaattctgtgactatggaaccaaggaggagtgcatgaaagccagtgatgctgatcgaccctgtcgcaagctgcacttcagacgaattatcaataaacacactgatgagtctttaggtgactgctctttccttaatacatgtttccacatggatacctgcaagtatgttcactatgaaattgatgcttgcatggattctgaggcccctggcagcaaagaccacacgccaagccaggagcttgctcttacacagagtgtcggaggtgattccagtgcagaccgactcttcccacctcagtggatctgttgtgatatccgctacctggacgtcagtatcttgggcaagtttgcagttgtgatggctgacccaccctgggatattcacatggaactgccctatgggaccctgacagatgatgagatgcgcaggctcaacatacccgtactacaggatgatggctttctcttcctctgggtcacaggcagggccatggagttggggagagaatgtctaaatctctgggggtatgaacgggtagatgaaattatttgggtgaagacaaatcaactgcaacgcatcattcggacaggccgtacaggtcactggttgaaccatgggaaggaacactgcttggttggtgtcaaaggaaatccccaaggcttcaaccagggtctggattgtgatgtgatcgtagctgaggttcgttccaccagtcataaaccagatgaaatctatggcatgattgaaagactatctcctggcactcgcaagattgagttatttggacgaccacacaatgtgcaacccaactggatcacccttggaaaccaactggatgggatccacctactagacccagatgtggttgcacggttcaagcaaaggtacccagatggtatcatctctaaacctaagaatttatagaagcacttccttacagagctaagaatccatagccatggctctgtaagctaaacctgaagagtgatatttgtacaatagctttcttctttatttaaataaacatttgtattgtaaaaaaaaaaaaaaaaaa

SEQ ID NO: 3989 - protein, 580 aa, Homo sapiens
MSDTWSSIQAHKKQLDSLRERLQRRRKQDSGHLDLRNPEAALSPTFRSDSPVPTAPTSGGPKPSTASAVPELATDPELEKKLLHHLSDLALTLPTDAVSICLAISTPDAPATQDGVESLLQKFAAQELIEVKRGLLQDDAHPTLVTYADHSKLSAMMGAVAEKKGPGEVAGTVTGQKRRAEQDSTTVAAFASSLVSGLNSSASEPAKEPAKKSRKHAASDVDLEIESLLNQQSTKEQQSKKVSQEILELLNTTTAKEQSIVEKFRSRGRAQVQEFCDYGTKEECMKASDADRPCRKLHFRRIINKHTDESLGDCSFLNTCFHMDTCKYVHYEIDACMDSEAPGSKDHTPSQELALTQSVGGDSSADRLFPPQWICCDIRYLDVSILGKFAVVMADPPWDIHMELPYGTLTDDEMRRLNIPVLQDDGFLFLWVTGRAMELGRECLNLWGYERVDEIIWVKTNQLQRIIRTGRTGHWLNHGKEHCLVGVKGNPQGFNQGLDCDVIVAEVRSTSHKPDEIYGMIERLSPGTRKIELFGRPHNVQPNWITLGNQLDGIHLLDPDVVARFKQRYPDGIISKPKNL

SEQ ID NO: 3990 - DNA, 1774 bp, Homo sapiens
ttttgtgaagagacgaagactgagcggttgtggccgcgttgccgacctccagcagcagtcggcttctctacgcagaacccgggagtaggagactcagaatcgaatctcttctccctccccttcttgtgagatttttttgatcttcagctacattttcggctttgtgagaaaccttaccatcaaacacgatggccagcaacgttaccaacaagacagatcctcgctccatgaactcccgtgtattcattgggaatctcaacactcttgtggtcaagaaatctgatgtggaggcaatcttttcgaagtatggcaaaattgtgggctgctctgttcataagggctttgccttcgttcagtatgttaatgagagaaatgcccgggctgctgtagcaggagaggatggcagaatgattgctggccaggttttagatattaacctggctgcagagccaaaagtgaaccgaggaaaagcaggtgtgaaacgatctgcagcggagatgtacgggtcagtaacagaacacccttctccgtcccctctactcagctcctcttttgacttggactatgactttcaacgggactattatgataggatgtacagttacccagcacgtgtacctcctcctcctcctattgctcgggctgtagtgccctcgaaacgtcagcgtgtatcaggaaacacttcacgaaggggcaaaagtggcttcaattctaagagtggacagcggggatcttccaagtctggaaatgaaaggagatgaccttcaggccattaagaaggagctgacccagataaaacaaaaagtggattctctcctggaaaacctggaaaaaattgaaaaggaacagagcaaacaagcagtagagatgaagaatgataagtcagaagaggagcagagcagcagctccgtgaagaaagatgagactaatgtgaagatggagtctgaggggggtgcagatgactctgctgaggagggggacctactggatgatgatgataatgaagatcggggggatgaccagctggagttgatcaaggatgatgaaaaagaggctgaggaaggagaggatgacagagacagcgccaatggcgaggatgactcttaagcacatagtggggtttagaaatcttatcccattatttctttacctaggcgcttgtctaagatcaaatttttcaccagatcctctcccctagtatcttcagcacatgctcactgttctccccatccttgtccttcccatgttcattaattcatattgccccgcgcctagtcccattttcacttcctttgacgctcctagtagttttgttaagtcttaccctgtaatttttgcttttaattttgatacctctttatgacttaacaataaaaaggatgtatggtttttatcaactgtctccaaaataatctcttgttatgcagggagtacagttcttttcattcatacataagttcagtagttgcttccctaactgcaaaggcaatctcatttagttgagtagctcttgaaagcagctttgagttagaagtatgtgtgttacaccctcacattagtgtgctgtgtggggcagttcaacacaaatgtaacaatgtatttttgtgaatgagagttggcatgtcaaatgcatcctctagaaaaataattagtgttatagtcttaagatttgttttctaaagttgatactgtgggttatttttgtgaacagcctgatgtttgggaccttttttcctcaaaataaacaagtccttattaaaccaggaatttggag

SEQ ID NO: 3991 - DNA, 2054 bp, Homo sapiens
cggccccccgcattccccgcccccacctccccgccttgttgtccaacttctcccggagcagccggagagcaggcgtcgggacgcagcaaagagaggagaggccaccatggcggagctgcaggaggtgcagatcacagaggagaagccactgttgccaggacagacgcctgaggcggccaaggaggctgagttagctgcccgaatcctcctggaccagggacagactcactctgtggagacaccatacggctctgtcactttcactgtctatggcacccccaaacccaaacgcccagcgatccttacctaccacgatgtgggactcaactataaatcttgcttccagccactgtttcagttcgaggacatgcaggaaatcattcagaactttgtgcgggttcatgtggatgcccctggaatggaagagggagcccctgtgttccctttgggatatcagtacccatctctggaccagcttgcagacatgatcccttgcgtcctgcagtacctaaatttctctacaataattggagttggtgttggagctggagcctacatcctggcgagatatgctcttaaccacccggacactgttgaaggtcttgtcctcatcaacattgatcccaatgccaagggttggatggattgggcagcccacaagctaacaggcctcacctcttccattccggagatgatccttggacatcttttcagccaggaagagctctctggaaattctgagttgatacaaaagtacagaaatatcattacacatgcacccaacctggataacattgaattgtactggaacagctacaacaaccgccgagacctgaactttgagcgtggaggtgatatcaccctcaggtgtcctgtgatgctggtggtaggagaccaagcacctcatgaagatgcagtggtggaatgtaactcaaaactggaccccacccagacctcgttcctcaagatggctgactccggaggtcagccccagctgactcagccaggcaagctgaccgaggccttcaagtacttcctgcaaggcatgggctacatggcctcatcctgcatgactcgcctgtcccggtctcgtacagcctctctgaccagtgcagcatccgttgatggcaaccggtcccgctctcgcaccctgtcccagagcagcgagtctggaactctttcttcggggcccccggggcacaccatggaggtctcctgttgaatggcccttgttgccctagagtgggacccagccctcacctcccccagagctaacctgggaggtgctgaaggggcattgggccaccgtaagcaagggaaaaagggcagatcatgcggggagatgaccttgatctttgattgctaccctaaccttgacctttaacccgtgattccccccagctcctggaagagatgtcctaatatctcttagggacccagacccctaaattctcctcctcccccattttgatgttaaggtggagagggcatatgcatcctctgtcctgatctaggtgtctatagctgaggggtaagaggttgttgtagttgtcctggtgcctccatcagactctccctacttgtcccatatttgcaaggggaggggatttggggctggggctccattcaccaaagctgaggtggcttctcattaaccctttaggactctgaagggtatggacctacgtgaatgtgtgtcagggggagacttgctggtgggttagtggtcctcaggatgtgatagaaacatccagtgtaaaaaggaagttggaatgggagttggcgggcagtgaacgagtgtggggaaggattggtgctggggcaacaggaaggggcctggggccgtttggctgcactaactttggtagctcagtgtgcatctagagtgggactggggagggagctaagcttgggctgggctgcttggggcttggcatagggtggaaagggctaccctggggctctgaccacactgtagtatgtgtggagggtgccctcccgtctcccacaacttctgctataacaataaactgtagaggaatctgagtaccgtt

SEQ ID NO: 3992 - DNA, 735 bp, Homo sapiens
gctgcccctgaaccccagaacaaccagctggatcagttctcacaggagctacaggccggagactgggaaacatggttccaaaactgttcacttcccaaatttgtctgcttcttctgttggggcttctggctgtggagggctcactccatgtcaaacctccacagtttacctgggctcaatggtttgaaacccagcacatcaatatgacctcccagcaatgcaccaatgcaatgcaggtcattaacaattatcaacggcgatgcaaaaaccaaaatactttccttcttacaacttttgctaacgtagttaatgtttgtggtaacccaaatatgacctgtcctagtaacaaaactcgcaaaaattgtcaccacagtggaagccaggtgcctttaatccactgtaacctcacaactccaagtccacagaatatttcaaactgcaggtatgcgcagacaccagcaaacatgttctatatagttgcatgtgacaacagagatcaacgacgagaccctccacagtatccggtggttccagttcacctggatagaatcatctaagctcctgtatcagcactcctcatcatcactcatctgccaagctcctcaatcatagccaagatcccatctctccatatactttgggtatcagcatctgtcctcatcagtctccataccccttcagctttcctgagctgaagtgccttgtgaaccctgcaataaactgctttgcaaattc

SEQ ID NO: 3993 - protein, 161 aa, Homo sapiens
MVPKLFTSQICLLLLLGLLAVEGSLHVKPPQFTWAQWFETQHINMTSQQCTNAMQVINNYQRRCKNQNTFLLTTFANVVNVCGNPNMTCPSNKTRKNCHHSGSQVPLIHCNLTTPSPQNISNCRYAQTPANMFYIVACDNRDQRRDPPQYPVVPVHLDRII

SEQ ID NO: 3994 - DNA, 1244 bp, Homo sapiens
agagacttgggttttgctccctaggagccctggaatagctttggccagaattccctatctcccattagaacctctcctttgcgtcctttgttaacctccaagtctacttggtgaaaacgcccacgaagaagtaacaaggactttgttcctagtgtgccaggtttgggcaccagtgctgtagtggctttctctgctgctccttgtgcatcagcagacagatgtggttcacataggaagaaagactaacgtaggcaaagatttgctctttcttcagcagccctagaaagacggcggcctgggtgattcaccactccttcctcacgtccttgattttatttgaactgagctccagatgctcctcccacccttttcctcttggaagccaaacccctttgtaatctgtataaggtccacaccccgggagctgagtgattgcagaaactggccttccatctctctcagacaccaagctgcagatccaggcttttctgggaaagtgaggccaccatggctctggagaagtctcttgtccggctccttctgcttgtcctgatactgctggtgctgggctgggtccagccttccctgggcaaggaatcccgggccaagaaattccagcggcagcatatggactcagacagttcccccagcagcagctccacctactgtaaccaaatgatgaggcgccggaatatgacacaggggcggtgcaaaccagtgaacacctttgtgcacgagcccctggtagatgtccagaatgtctgtttccaggaaaaggtcacctgcaagaacgggcagggcaactgctacaagagcaactccagcatgcacatcacagactgccgcctgacaaacggctccaggtaccccaactgtgcataccggaccagcccgaaggagagacacatcattgtggcctgtgaagggagcccatatgtgccagtccactttgatgcttctgtggaggactctacctaaggtcagagcagcgagataccccacctccctcaacctcatcctctccacagctgcctcttccctcttccttccctgctgtgaaagaagtaactacagttagggctcctattcaacacacacatgcttccctttcctgagtcccatccctgcgtgattttgggggtgaagagtgggttgtgaggtgggccccatgttaacccctccactctttctttcaataaaacgcagttgcaaacacctgaaaaaaaaaaaaaaaaaaaaaaaaa

SEQ ID NO: 3995 - protein, 156 aa, Homo sapiens
MALEKSLVRLLLLVLILLVLGWVQPSLGKESRAKKFQRQHMDSDSSPSSSSTYCNQMMRRRNMTQGRCKPVNTFVHEPLVDVQNVCFQEKVTCKNGQGNCYKSNSSMHITDCRLTNGSRYPNCAYRTSPKERHIIVACEGSPYVPVHFDASVEDST

SEQ ID NO: 3996 - DNA, 1428 bp, Homo sapiens
aactgtgcgaaccagacccggcagccttgctcagttcagcatagcggagcggatccgatcggatcggagcggatcggagcacaccggagcaggctcatcgagaaggcgtctgcgagaccatggagaacggatacacctatgaagattataagaacactgcagaatggcttctgtctcacactaagcaccgacctcaagttgcaataatctgtggttctggattaggaggtctgactgataaattaactcaggcccagatctttgactacggtgaaatccccaactttccccgaagtacagtgccaggtcatgctggccgactggtgtttgggttcctgaatggcagggcctgtgtgatgatgcagggcaggttccacatgtatgaagggtacccactctggaaggtgacattcccagtgagggttttccaccttctgggtgtggacaccctggtagtcaccaatgcagcaggagggctgaaccccaagtttgaggttggagatatcatgctgatccgtgaccatatcaacctacctggtttcagtggtcagaaccctctcagagggcccaatgatgaaaggtttggagatcgtttccctgccatgtctgatgcctacgaccggactatgaggcagagggctctcagtacctggaaacaaatgggggagcaacgtgagctacaggaaggcacctatgtgatggtggcaggccccagctttgagactgtggcagaatgtcgtgtgctgcagaagctgggagcagacgctgttggcatgagtacagtaccagaagttatcgttgcacggcactgtggacttcgagtctttggcttctcactcatcactaacaaggtcatcatggattatgaaagcctggagaaggccaaccatgaagaagtcttagcagctggcaaacaagctgcacagaaattggaacagtttgtctccattcttatggccagcattccactccctgacaaagccagttgacctgccttggagtcgtctggcatctcccacacaagacccaagtagctgctaccttctttggccccttgctggagtcatgtgcctctgtccttaggttgtagcagaaaggaaaagattcctgtccttcacctttcccactttcttctaccagacccttctggtgccagatcctcttctcaaagctgggattacaggtgtgagcatagtgagaccttggcgctacaaaataaagctgttctcattcctgttctttcttacacaagagctggagcccgtgccctaccacacatctgtggagatgcccaggatttgactcgggccttagaactttgcatagcagctgctactagctctttgagataatacattccgaggggctcagttctgccttatctaaatcaccagagaccaaacaaggactaatccaatacctcttgga

SEQ ID NO: 3997 - DNA, 1574 bp, Homo sapiens
cagacagaccaatcacgcgcattcttcggccacgacaagcgcgcctctgatcacgtgaccaggtccgctacccacgtgggggctcagcgtgcacccttctttgtgctcgggttaggaggagctaggctgccatcgggccggtgcagatacggggttgctcttttgctcataagaggggcttcgctggcagtctgaacggcaagcttgagtcaggacccttaattaagatcctcaattggctggagggcagatctcgcgagtagggcaacgcggtaaaaatattgcttcggtgggtgacgcggtacagctgcccaagggcgttcgtaacgggaatgccgaagcgtgggaaaaagggagcggtggcggaagacggggatgagctcaggacagagccagaggccaagaagagtaagacggccgcaaagaaaaatgacaaagaggcagcaggagagggcccagccctgtatgaggaccccccagatcagaaaacctcacccagtggcaaacctgccacactcaagatctgctcttggaatgtggatgggcttcgagcctggattaagaagaaaggattagattgggtaaaggaagaagccccagatatactgtgccttcaagagaccaaatgttcagagaacaaactaccagctgaacttcaggagctgcctggactctctcatcaatactggtcagctccttcggacaaggaagggtacagtggcgtgggcctgctttcccgccagtgcccactcaaagtttcttacggcataggcgatgaggagcatgatcaggaaggccgggtgattgtggctgaatttgactcgtttgtgctggtaacagcatatgtacctaatgcaggccgaggtctggtacgactggagtaccggcagcgctgggatgaagcctttcgcaagttcctgaagggcctggcttcccgaaagccccttgtgctgtgtggagacctcaatgtggcacatgaagaaattgaccttcgcaaccccaaggggaacaaaaagaatgctggcttcacgccacaagagcgccaaggcttcggggaattactgcaggctgtgccactggctgacagctttaggcacctctaccccaacacaccctatgcctacaccttttggacttatatgatgaatgctcgatccaagaatgttggttggcgccttgattactttttgttgtcccactctctgttacctgcattgtgtgacagcaagatccgttccaaggccctcggcagtgatcactgtcctatcaccctatacctagcactgtgacaccacccctaaatcactttgagcctgggaaataagccccctcaactaccattccttctttaaacactcttcagagaaatctgcattctatttctcatgtataaaactaggaatcctccaaccaggctcctgtgatagagttcttttaagcccaagattttttatttgagggttttttgttttttaaaaaaaaattgaacaaagactactaatgactttgtttgaattatccacatgaaaataaagagccatagtttcaaaaaaaaaaaaaaaaaaaaaaaaaaa

SEQ ID NO: 3998 - protein, 318 aa, Homo sapiens
MPKRGKKGAVAEDGDELRTEPEAKKSKTAAKKNDKEAAGEGPALYEDPPDQKTSPSGKPATLKICSWNVDGLRAWIKKKGLDWVKEEAPDILCLQETKCSENKLPAELQELPGLSHQYWSAPSDKEGYSGVGLLSRQCPLKVSYGIGDEEHDQEGRVIVAEFDSFVLVTAYVPNAGRGLVRLEYRQRWDEAFRKFLKGLASRKPLVLCGDLNVAHEEIDLRNPKGNKKNAGFTPQERQGFGELLQAVPLADSFRHLYPNTPYAYTFWTYMMNARSKNVGWRLDYFLLSHSLLPALCDSKIRSKALGSDHCPITLYLAL

SEQ ID NO: 3999 - DNA, 1501 bp, Homo sapiens
cagacagaccaatcacgcgcattcttcggccacgacaagcgcgcctctgatcacgtgaccaggtccgctacccacgtgggggctcagcgtgcacccttctttgtgctcgggttaggaggagctaggctgccatcgggccggtgcagatacggggttgctcttttgctcataagaggggcttcgctggcagtctgaacggcaacgcggtaaaaatattgcttcggtgggtgacgcggtacagctgcccaagggcgttcgtaacgggaatgccgaagcgtgggaaaaagggagcggtggcggaagacggggatgagctcaggacagagccagaggccaagaagagtaagacggccgcaaagaaaaatgacaaagaggcagcaggagagggcccagccctgtatgaggaccccccagatcagaaaacctcacccagtggcaaacctgccacactcaagatctgctcttggaatgtggatgggcttcgagcctggattaagaagaaaggattagattgggtaaaggaagaagccccagatatactgtgccttcaagagaccaaatgttcagagaacaaactaccagctgaacttcaggagctgcctggactctctcatcaatactggtcagctccttcggacaaggaagggtacagtggcgtgggcctgctttcccgccagtgcccactcaaagtttcttacggcataggcgatgaggagcatgatcaggaaggccgggtgattgtggctgaatttgactcgtttgtgctggtaacagcatatgtacctaatgcaggccgaggtctggtacgactggagtaccggcagcgctgggatgaagcctttcgcaagttcctgaagggcctggcttcccgaaagccccttgtgctgtgtggagacctcaatgtggcacatgaagaaattgaccttcgcaaccccaaggggaacaaaaagaatgctggcttcacgccacaagagcgccaaggcttcggggaattactgcaggctgtgccactggctgacagctttaggcacctctaccccaacacaccctatgcctacaccttttggacttatatgatgaatgctcgatccaagaatgttggttggcgccttgattactttttgttgtcccactctctgttacctgcattgtgtgacagcaagatccgttccaaggccctcggcagtgatcactgtcctatcaccctatacctagcactgtgacaccacccctaaatcactttgagcctgggaaataagccccctcaactaccattccttctttaaacactcttcagagaaatctgcattctatttctcatgtataaaactaggaatcctccaaccaggctcctgtgatagagttcttttaagcccaagattttttatttgagggttttttgttttttaaaaaaaaattgaacaaagactactaatgactttgtttgaattatccacatgaaaataaagagccatagtttcaaaaaaaaaaaaaaaaaaaa

SEQ ID NO: 4000 - protein, 318 aa, Homo sapiens; identical to SEQ ID NO: 3998

SEQ ID NO: 4001 - DNA, 1511 bp, Homo sapiens
cagacagaccaatcacgcgcattcttcggccacgacaagcgcgcctctgatcacgtgaccaggtccgctacccacgtgggggctcagcgtgcacccttctttgtgctcgggttaggaggagctaggctgccatcgggccggtgcagatacggggttgctcttttgctcataagaggggcttcgctggcagtctgaacggcaagcttgagcaacgcggtaaaaatattgcttcggtgggtgacgcggtacagctgcccaagggcgttcgtaacgggaatgccgaagcgtgggaaaaagggagcggtggcggaagacggggatgagctcaggacagagccagaggccaagaagagtaagacggccgcaaagaaaaatgacaaagaggcagcaggagagggcccagccctgtatgaggaccccccagatcagaaaacctcacccagtggcaaacctgccacactcaagatctgctcttggaatgtggatgggcttcgagcctggattaagaagaaaggattagattgggtaaaggaagaagccccagatatactgtgccttcaagagaccaaatgttcagagaacaaactaccagctgaacttcaggagctgcctggactctctcatcaatactggtcagctccttcggacaaggaagggtacagtggcgtgggcctgctttcccgccagtgcccactcaaagtttcttacggcataggcgatgaggagcatgatcaggaaggccgggtgattgtggctgaatttgactcgtttgtgctggtaacagcatatgtacctaatgcaggccgaggtctggtacgactggagtaccggcagcgctgggatgaagcctttcgcaagttcctgaagggcctggcttcccgaaagccccttgtgctgtgtggagacctcaatgtggcacatgaagaaattgaccttcgcaaccccaaggggaacaaaaagaatgctggcttcacgccacaagagcgccaaggcttcggggaattactgcaggctgtgccactggctgacagctttaggcacctctaccccaacacaccctatgcctacaccttttggacttatatgatgaatgctcgatccaagaatgttggttggcgccttgattactttttgttgtcccactctctgttacctgcattgtgtgacagcaagatccgttccaaggccctcggcagtgatcactgtcctatcaccctatacctagcactgtgacaccacccctaaatcactttgagcctgggaaataagccccctcaactaccattccttctttaaacactcttcagagaaatctgcattctatttctcatgtataaaactaggaatcctccaaccaggctcctgtgatagagttcttttaagcccaagattttttatttgagggttttttgttttttaaaaaaaaattgaacaaagactactaatgactttgtttgaattatccacatgaaaataaagagccatagtttcaaaaaaaaaaaaaaaaaaaa

SEQ ID NO: 4002 - protein, 318 aa, Homo sapiens; identical to SEQ ID NO: 3998

SEQ ID NO: 4003 - DNA, 1394 bp, Homo sapiens
agtgctatctgcaggctggccagcttcctctgcgctccggaaagctgcggcccagcgcggactagtgaggacctccacagctcctgacattgccaggagtcctgtcggcgttttctcccagcctccgccatgccggcggtgctgggttttgaaggcagcgccaataagattggcgtgggcgtggtgcgggatggcaaggtgctggcgaacccgcggcggacttacgtcacgcctcctggcacaggattccttccaggtgatacagccaggcatcaccgagctgttatcctagacctgctgcaggaggcactaacagagtctggattaacctcccaggatatcgactgcattgcatacaccaagggccctggcatgggtgccccactggtttctgtggctgttgtggcccgtactgtggcccaactgtggaataagccattggtgggtgtgaaccactgtataggccacattgagatgggccgcctcatcactggagccaccagcccaaccgtgttgtatgtgagtggaggaaatacgcaggtgattgcatactcggaacatcgttaccgtatctttggggaaaccatcgatattgcagtgggtaattgtctggatcgttttgctcgagtgctgaagatttctaacgacccaagtccaggatacaacattgaacagatggcaaagcgaggcaagaagctagttgagctgccatacactgtaaaggggatggacgtctcattctcagggatcctgtctttcattgaggatgtagcccatcggatgctggccacaggcgagtgtactcctgaggatctgtgtttctccctgcaggaaactgtgtttgcaatgctggtagagatcacagagcgagccatggcacattgtggctcccaggaggccctcattgtgggaggagtggggtgtaatgtgaggctacaggagatgatggcaacaatgtgccaggaacgtggagcccggctttttgctacagatgagagattctgtattgacaatggagcgatgatagcccaggctggctgggagatgtttcgggctggacacaggaccccactcagtgattctggggttacacagaggtatcggacagatgaagtagaggtgacctggagggactaataagatcaacagaatcagagtagatagttccttaatcggaacccaaaggaccccgtgcctcaatctctatcctgatgtcatgggagtcctagcaaagctatagactccaagcaaggcttggggtcctttatggaaccccaggatgactcagcaataaaatatttttggttttttggttttgtaaaaaaaaaaaaaaaaaaaaaaaaaaaaaaaaaaaaaaaaaaaaaaaaaaaaaaaaaaaaaaaaaaaaaaaaaaa

SEQ ID NO: 4004 - protein, 335 aa, Homo sapiens
MPAVLGFEGSANKIGVGVVRDGKVLANPRRTYVTPPGTGFLPGDTARHHRAVILDLLQEALTESGLTSQDIDCIAYTKGPGMGAPLVSVAVVARTVAQLWNKPLVGVNHCIGHIEMGRLITGATSPTVLYVSGGNTQVIAYSEHRYRIFGETIDIAVGNCLDRFARVLKISNDPSPGYNIEQMAKRGKKLVELPYTVKGMDVSFSGILSFIEDVAHRMLATGECTPEDLCFSLQETVFAMLVEITERAMAHCGSQEALIVGGVGCNVRLQEMMATMCQERGARLFATDERFCIDNGAMIAQAGWEMFRAGHRTPLSDSGVTQRYRTDEVEVTWRD

SEQ ID NO: 4005 - DNA, 8595 bp, Homo sapiens
ggaatcggacgccccaggcatatacaagctgagtttcagccatggaaaaactccatgggcatgtgtctgcccatccagacatcctctccttggagaaccggtgcctggctatgctccctgacttacagcccttggagaaactacatcagcatgtatctacccactcagatatcctctccttgaagaaccagtgcctagccacgcttcctgacctgaagaccatggaaaaaccacatggatatgtgtctgcccacccagacatcctctccttggagaaccagtgcctggccacactttctgacctgaagaccatggagaaaccacatggacatgtttctgcccacccagacatcctctccttggagaaccggtgcctggccaccctctctagtctaaagagcactgtgtctgccagccccttgttccagagtctacagatatctcacatgacgcaagctgatttgtaccgtgtgaacaacagcaattgcctgctctctgagcctccaagttggagggctcagcatttctctaagggactagacctttcaacctgccctatagccctgaaatccatctctgccacagagacagctcaggaagcaactttgggtcgttggtttgattcagaagagaagaaaggggcagagacccaaatgccttcttatagtctgagcttgggagaggaggaggaggtggaggatctggccgtgaagctcacctctggagactctgaatctcatccagagcctactgaccatgtccttcaggaaaagaagatggctctactgagcttgctgtgctctactctggtctcagaagtaaacatgaacaatacatctgaccccaccctggctgccatttttgaaatctgtcgtgaacttgccctcctggagcctgagtttatcctcaaggcatctttgtatgccaggcagcagctgaacgtccggaatgtggccaataacatcttggccattgctgctttcttgccggcgtgtcgcccccacctgcgacgatatttctgtgccattgtccagctgccttctgactggatccaggtggctgagctttaccagagcctggctgagggagataagaataagctggtgcccctgcccgcctgtctccgtactgccatgacggacaaatttgcccagtttgacgagtaccagctggctaagtacaaccctcggaagcaccgggccaagagacacccccgccggccaccccgctctccagggatggagcctccattttctcacagatgttttccaaggtacatagggtttctcagagaagagcagagaaagtttgagaaggccggtgatacagtgtcagagaaaaagaatcctccaaggttcaccctgaagaagctggttcagcgactgcacatccacaagcctgcccagcacgttcaagccctgctgggttacagatacccctccaacctacagctcttttctcgaagtcgccttcctgggccttgggattctagcagagctgggaagaggatgaagctgtctaggccagagacctgggagcgggagctgagcctacgggggaacaaagcgtcggtctgggaggaactcattgaaaatgggaagcttcccttcatggccatgcttcggaacctgtgcaacctgctgcgggttggaatcagttcccgccaccatgagctcattctccagagactccagcatgcgaagtcggtgatccacagtcggcagtttccattcagatttcttaacgcccatgatgccattgatgccctcgaggctcaactcagaaatcaagcattgccctttccttcgaatataacactgatgaggcggatactaactagaaatgaaaagaaccgtcccaggcggaggtttctttgccacctaagccgtcagcagcttcggatggcaatgaggatacctgtgttgtatgagcagctcaagagggagaagctgagagtacacaaggccagacagtggaaatatgatggtgagatgctgaacaggtaccgacaggccctagagacagctgtgaacctctctgtgaagcacagcctgcccctgctgccaggccgcactgtcttggtctatctgacagatgctaatgcagacaggctctgtccaaagagcaacccacaagggcccccgctgaactatgcactgctgttgattgggatgatgatcacgagggcggagcaggtggacgtcgtgctgtgtggaggtgacactctgaagactgcagtgcttaaggcagaagaaggcatcctgaagactgccatcaagctccaggctcaagtccaggagtttgatgaaaatgatggatggtccctgaatacttttgggaaatacctgctgtctctggctggccaaagggttcctgtggacagggtcatcctccttggccaaagcatggatgatggaatgataaatgtggccaaacagctttactggcagcgtgtgaattccaagtgcctctttgttggtatcctcctaagaagggtacaatacctgtcaacagatttgaatcccaatgatgtgacactctcaggctgtactgatgcgatactgaagttcattgcagagcatggggcctcccatcttctggaacatgtgggccaaatggacaaaatattcaagattccaccacccccaggaaagacaggggtccagtctctccggccactggaagaggacactccaagccccttggctcctgtttcccagcaaggatggcgcagcatccggcttttcatttcatccactttccgagacatgcatggggagcgggacctgctgctgaggtctgtgctgccagcactgcaggcccgagcggcccctcaccgtatcagccttcacggaatcgacctccgctggggcgtcactgaggaggagacccgtaggaacagacaactggaagtgtgccttggggaggtggagaacgcacagctgtttgtggggattctgggctcccgttatggatacattccccccagctacaaccttcctgaccatccacacttccactgggcccagcagtacccttcagggcgctctgtgacagagatggaggtgatgcagttcctgaaccggaaccaacgtctgcagccctctgcccaagctctcatctacttccgggattccagcttcctcagctctgtgccagatgcctggaaatctgactttgtttctgagtctgaagaggccgcacgtcggatctcagaactgaagagctacctaagcagacagaaagggatcacctgccgcagatacccctgtgagtgggggggtgtggcagctggccggccctatgttggcgggctggaggagtttgggcagttggttctgcaggatgtatggaatatgatccagaagctctacctgcagcctggggccctgctggagcagccagtgtccatcccagacgatgacttggtccaggccaccttccagcagctgcagaagccaccgagtcctgcccggccacgccttcttcaggacacagtgcaacggctgatgctgccccacggaaggctgagcctggtgacggggcagtcaggacagggcaagacagccttcctggcatctcttgtgtcagccctgcaggctcctgatggggccaaggtggcatcattagtcttcttccacttttctggggctcgtcctgaccagggtcttgccctcactctgctcagacgcctctgtacctatctgcgtggccaactaaaagagccaggtgccctccccagcacctaccgaagcctggtgtgggagctgcagcagaggctgctgcccaagtctgctgagtccctgcatcctggccagacccaggtcctgatcatcgatggggctgataggttagtggaccagaatgggcagctgatttcagactggatcccaaagaagcttccccggtgtgtacacctggtgctgagtgtgtctagtgatgcaggcctaggggagacccttgagcagagccagggtgcccacgtgctggccttggggcctctggaggcctctgctcgggcccggctggtgagagaggagctggccctgtacgggaagcggctggaggagtcaccatttaacaaccagatgcgactgctgctggtgaagcgggaatcaggccggccgctctacctgcgcttggtcaccgatcacctgaggctcttcacgctgtatgagcaggtgtctgagagactccggaccctgcctgccactgtccccctgctgctgcagcacatcctgagcacactggagaaggagcacgggcctgatgtccttccccaggccttgactgccctagaagtcacacggagtggtttgactgtggaccagctgcacggagtgctgagtgtgtggcggacactaccgaaggggactaagagctgggaagaagcagtggctgctggtaacagtggagacccctaccccatgggcccgtttgcctgcctcgtccagagtctgcgcagtttgctaggggagggccctctggagcgccctggtgcccggctgtgcctccctgatgggcccctgagaacagcagctaaacgttgctatgggaagaggccagggctagaggacacggcacacatcctcattgcagctcagctctggaagacatgtgacgctgatgcctcaggcaccttccgaagttgccctcctgaggctctgggagacctgccttaccacctgctccagagcgggaaccgtggacttctttcgaagttccttaccaacctccatgtggtggctgcacacttggaattgggtctggtctctcggctcttggaggcccatgccctctatgcttcttcagtccccaaagaggaacaaaagctccccgaggctgacgttgcagtgtttcgcaccttcctgaggcagcaggcttcaatcctcagccagtacccccggctcctgccccagcaggcagccaaccagcccctggactcacctctttgccaccaagcctcgctgctctcccggagatggcacctccaacacacactacgatggcttaataaaccccggaccatgaaaaatcagcaaagctccagcctgtctctggcagtttcctcatcccctactgctgtggccttctccaccaatgggcaaagagcagctgtgggcactgccaatgggacagtttacctgttggacctgagaacttggcaggaggagaagtctgtggtgagtggctgtgatggaatctctgcttgtttgttcctctccgatgatacactctttcttactgccttcgacgggctcctggagctctgggacctgcagcatggttgtcgggtgctgcagactaaggctcaccagtaccaaatcactggctgctgcctgagcccagactgccggctgctagccaccgtgtgcttgggaggatgcctaaagctgtgggacacagtccgtgggcagctggccttccagcacacctaccccaagtccctgaactgtgttgccttccacccagaggggcaggtaatagccacaggcagctgggctggcagcatcagcttcttccaggtggatgggctcaaagtcaccaaggacctgggggcacccggagcctctatccgtaccttggccttcaatgtgcctgggggggttgtggctgtgggccggctggacagtatggtggagctgtgggcctggcgagaaggggcacggctggctgccttccctgcccaccatggctttgttgctgctgcgcttttcctgcatgcgggttgccagttactgacggctggagaggatggcaaggttcaggtgtggtcagggtctctgggtcggccccgtgggcacctgggttccctttctctctctcctgccctctctgtggcactcagcccagatggtgatcgggtggctgttggatatcgagcggatggcattaggatctacaaaatctcttcaggttcccagggggctcagggtcaggcactggatgtggcagtgtccgccctggcctggctaagccccaaggtattggtgagtggtgcagaagatgggtccttgcagggctgggcactcaaggaatgctcccttcagtccctctggctcctgtccagattccagaagcctgtgctaggactggccacttcccaggagctcttggcttctgcctcagaggatttcacagtgcagctgtggccaaggcagctgctgacgcggccacacaaggcagaagactttccctgtggcactgagctgcggggacatgagggccctgtgagctgctgtagtttcagcactgatggaggcagcctggccaccgggggccgggatcggagtctcctctgctgggacgtgaggacacccaaaacccctgttttgatccactccttccctgcctgtcaccgtgactgggtcactggctgtgcctggaccaaagataacctactgatatcctgctccagtgatggctctgtggggctctgggacccagagtcaggacagcggcttggtcagttcctgggtcatcagagtgctgtgagcgctgtggcagctgtggaggagcacgtggtgtctgtgagccgggatgggaccttgaaagtgtgggaccatcaaggcgtggagctgaccagcatccctgctcactcaggacccattagccactgtgcagctgccatggagccccgtgcagctggacagcctgggtcagagcttctggtggtaaccgtcgggctagatggggccacacggttatggcatccactcttggtgtgccaaacccacaccctcctgggacacagcggcccagtccgtgctgctgctgtttcagaaacctcaggcctcatgctgaccgcctctgaggatggttctgtacggctctggcaggttcctaaggaagcagatgacacatgtataccaaggagttctgcagccgtcactgctgtggcttgggcaccagatggttccatggcagtatctggaaatcaagctggggaactaatcttgtggcaggaagctaaggctgtggccacagcacaggctccaggccacattggtgctctgatctggtcctcggcacacaccttttttgtcctcagtgctgatgagaaaatcagcgagtggcaagtgaaactgcggaagggttcggcacccggaaatttgagtcttcacctgaaccgaattctacaggaggacttaggggtgctgacaagtctggattgggctcctgatggtcactttctcatcttggccaaagcagatttgaagttactttgcatgaagccaggggatgctccatctgaaatctggagcagctatacagaaaatcctatgatattgtccacccacaaggagtatggcatatttgtcctgcagcccaaggatcctggagttctttctttcttgaggcaaaaggaatcaggagagtttgaagagaggctgaactttgatataaacttagagaatcctagtaggaccctaatatcgataactcaagccaaacctgaatctgagtcctcatttttgtgtgccagctctgatgggatcctatggaacctggccaaatgcagcccagaaggagaatggaccacaggtaacatgtggcagaaaaaagcaaacactccagaaacccaaactccagggacagacccatctacctgcagggaatctgatgccagcatggatagtgatgccagcatggatagtgagccaacaccacatctaaagacacggcagcgtagaaagattcactcgggctctgtcacagccctccatgtgctacctgagttgctggtgacagcttcgaaggacagagatgttaagctatgggagagacccagtatgcagctgctgggcctgttccgatgcgaagggtcagtgagctgcctggaaccttggctgggcgctaactccaccctgcagcttgccgtgggagacgtgcagggcaatgtgtactttctgaattgggaatgaagatgtgccactcgggaataatgataccccttgtgctagagatgcaaagcctgaagacactggtagcttttaataattataaaattaataatttcttgataattataaaaatgaagtgtcaaaaaatctcaagtgtaggcctgcctgtgttctcatgtggatttagaacaggaggatattctatgtgtatgtatatgtacattctaatgtgtgtctcttcttattcaacattaatccttactagaaccacaagaaagtgaatgaaatctttagtaggtactcttttgaaactaggttttagaattcttgcatcactcgcgggccctaggaccctaggatgccattcttgccaggaggaggaatgagagtgatgttggccaacattcaatttgaacagagcatggaagacctttcagttcatcgggaaagaatgagggagggagaataagtcagtcatgcatcagggcatttagaaagagctatgtttctgtcacagagacagcccttttctcagaactacccagaggaggccgggcatggtggctcacgcttgtaatcccagcactttgggaggccgaggtgggcagatcacgaggtcaggagatcaagaccatcctggctaacatagtgaaaccctgtctctactaaaaaatacaaaaagttagccagg

SEQ ID NO: 4006 - DNA, 1503 bp, Homo sapiens
ggggctccactttctttccctctccgttttggtgggctggttggagatgaaatccactgaggagggaagtccagcaccctgtgtgccagtcctgaactggcccatctgtagaccccctgaaaatcatatgggcttggatttggatattctcaacagaaagggttaaaggctgatggtacctaaagcctggtacttgaattttgatcaagataagctgccttaagttctcttcattacacaaatgatcctagataattgatagatcctgtggttcaactggatttctagatagaagctggattcatgtgatgccagaggagtaaaatttcaagagactgaaaccagatctgagtttcgctgttccagtctggacctctttggagctgtaaatcctggatatactgtagatgagtactgcgtttttcttttatggactctcttcagcttctggagacctcactatcctattatgtctttgtgtgaagacatgctgctttgtaattatcgaaagtgtcgcatcaaactctctggctatgcatgggtcactgcctgctctcacatcttctgtgatcagcatggcagtggtgagtttagtcgctcaccagctatctgtcctgcctgcaacagtaccctttctggaaagctagatattgtccgcacagaactcagtccatcagaggaatataaagctatggtattggcaggactgcgaccagagatcgtgttggacattagctcccgagcgctggccttctggacatatcaggtacatcaggaacgtctctatcaagaatacaatttcagcaaggctgagggccatctgaaacagatggagaagatatatactcagcaaatacaaagcaaggatgtagaattgacctctatgaaaggggaggttacctccatgaagaaagtactagaagaatacaagaaaaagttcagtgacatctctgagaaacttatggagcgcaatcgtcagtatcaaaagctccaaggcctctatgatagccttaggctacgaaacatcactattgctaaccatgaaggcacccttgaaccatccatgattgcacagtctggtgttcttggcttcccattaggtaacaactccaagtttcctttggataatacacctgttcgaaatcggggcgatggagatggagattttcagttcagaccattttttgcgggttctcccacagcacctgaacccagcaacagcttttttagttttgtctctccaagtcgtgaattagagcagcagcaagtttctagcagggccttcaaagtaaaaagaatttgagccacgcatagtgtcacgcacctgtgatcccagctacttaggaggttgaggctgggaggatcacttgagcccaggagtctgaggctttagtgatctaagatcatgccactgcactccagcctgggcaacagagtgagaccctgtttctaaaaaaaaataaagataatttagctaacttcaaaaaaaaaaaaaaaaaaaac

SEQ ID NO: 4007 - protein, 277 aa, Homo sapiens
MSLCEDMLLCNYRKCRIKLSGYAWVTACSHIFCDQHGSGEFSRSPAICPACNSTLSGKLDIVRTELSPSEEYKAMVLAGLRPEIVLDISSRALAFWTYQVHQERLYQEYNFSKAEGHLKQMEKIYTQQIQSKDVELTSMKGEVTSMKKVLEEYKKKFSDISEKLMERNRQYQKLQGLYDSLRLRNITIANHEGTLEPSMIAQSGVLGFPLGNNSKFPLDNTPVRNRGDGDGDFQFRPFFAGSPTAPEPSNSFFSFVSPSRELEQQQVSSRAFKVKRI

SEQ ID NO: 4008 - DNA, 1819 bp, Homo sapiens
gagtggccgggagatgatggctgatgaagaggaagaagtcaagccgatcttgcagaaattgcaggaactcgtggatcagctctactcatttcgagactgctatttcgagacacatagtgttgaggatgctgggaggaagcaacaggatgtgcagaaggagatggagaaaaccctacagcagatggaagaagtagtgggttctgtccagggcaaggcacaagttctaatgctaactgggaaagcactaaatgtgactcctgactatagccctaaggctgaggagcttctgtcaaaggctgtgaagctggagcccgagctggtggaagcctggaaccagctgggtgaggtgtactggaaaaaaggggatgttgcagctgcccacacctgcttctcaggagccctcacccattgcaggaacaaagtctccttgcaaaacctgtcaatggtgcttcgtcagctgcggactgacactgaagatgaacattctcaccatgtcatggacagtgtccgacaggctaagttggctgttcagatggatgtccatgatggccgctcctggtatattcttgggaattcatatctttccctttacttctctactggccagaaccctaagatctcccagcaagccctcagtgcctatgcccaagcagagaaagttgacagaaaagcttctagcaatcctgaccttcatctgaacagggcgacgttgcataaatatgaagagagttatggggaggccctggagggcttctctcgggctgcagccctggaccctgcctggccagagccccggcaacgagagcaacaacttctggaattcctggatagattaaccagcctccttgagagtaagggaaaggtgaagaccaaaaagctgcagagcatgctgggaagcttgcgcccagcccatctaggcccttgcagtgatgggcactatcagtcagcctctgggcagaaagtgaccctggagctcaagccactgagtacgcttcagcctggggtgaacagcggtgccgtcatcctgggaaaggtggtatttagcctcaccacagaggagaaagtcccctttacatttggcctggtagattcagatggaccttgctatgcagtgatggtgtacaatatagtgcagagctggggagtgctcattggagactctgtagccattcctgagcccaacctgcggcttcaccgaattcagcacaaaggaaaggactattccttttccagtgttcgagtggagacgcccctcctgctagtggtgaatgggaagcctcagggatccagcagccaggctgttgccacagtggcatcgcgaccacagtgtgaatgacctttgacttgcatgctcaacagggagtggaggagaggagacaaggctctggacagccggtccagccacatccagtgattcagcagggatgggaggaatgttttaaatgaagactttctctttccctgcctgtattacacttcgtatctcttctctctcctctgtcctcatcatgttccagctctctacagggccacatactcttctggcatatctctcctgtctcttccactgctctctatgttttaagcaaagagcatggaattggtagaagtcttgggatcttgccatgggacagagtccccaaggttcctgttgttgcctccttcctaagcctcatatgtatatatcagttcagtatttattgctaaaggagggggcttaattttgtaatggcttttatttttagcaatttttatttttatttttgaactttaggtccttcctcttctttggggctggaacagaattaaatttgtttgg

SEQ ID NO: 4009 - protein, 440 aa, Homo sapiens
MMADEEEEVKPILQKLQELVDQLYSFRDCYFETHSVEDAGRKQQDVQKEMEKTLQQMEEVVGSVQGKAQVLMLTGKALNVTPDYSPKAEELLSKAVKLEPELVEAWNQLGEVYWKKGDVAAAHTCFSGALTHCRNKVSLQNLSMVLRQLRTDTEDEHSHHVMDSVRQAKLAVQMDVHDGRSWYILGNSYLSLYFSTGQNPKISQQALSAYAQAEKVDRKASSNPDLHLNRATLHKYEESYGEALEGFSRAAALDPAWPEPRQREQQLLEFLDRLTSLLESKGKVKTKKLQSMLGSLRPAHLGPCSDGHYQSASGQKVTLELKPLSTLQPGVNSGAVILGKVVFSLTTEEKVPFTFGLVDSDGPCYAVMVYNIVQSWGVLIGDSVAIPEPNLRLHRIQHKGKDYSFSSVRVETPLLLVVNGKPQGSSSQAVATVASRPQCE

SEQ ID NO: 4010 - DNA, 2686 bp, Homo sapiens
gctgctctcctgatcatggcttctccgagttctttcacctactattgccctccatcttcctcccccgtctggtcagagccgctgtacagtctgaggcccgagcacgcgcgagagcggttgcaggacgactcggtggaaacagtcacgtccatagaacaggcaaaagtagaagaaaagatccaagaggtcttcagttcttacaagttcaaccaccttgtaccaaggcttgttttgcagagggagaagcacttccattatctgaaaagaggccttcgacaactgacagatgcctatgagtgtctggatgccagccgcccatggctctgctattggatcctgcacagcttggaactgctagatgaacccatcccccagatagtggctacagatgtgtgtcagttcctggagctgtgtcagagcccagaaggtggctttggaggaggacccggtcagtatccacaccttgcacccacatatgcagcagtcaatgcattgtgcatcattggcaccgaggaggcctatgacatcattaacagagagaagcttcttcagtatttgtactccctgaagcaacctgacggctcctttctcatgcatgtcggaggtgaggtggatgtgagaagcgcatactgtgctgcctccgtagcctcgctgaccaacatcatcactccagacctctttgagggcactgctgaatggatagcaaggtgtcagaactgggaaggtggcattggcggggtaccagggatggaagcccatggtggctataccttctgtggcctggccgcgctggtaatcctcaagagggaacgttccttgaacttgaagagcttattacaatgggtgacaagccggcagatgcgatttgaaggaggatttcagggccgctgcaacaagctggtggatggctgctactccttctggcaggcggggctcctgcccctgctccaccgcgcactgcacgcccaaggtgaccctgcccttagcatgagccactggatgttccatcagcaggccctgcaggagtacatcctgatgtgctgccagtgccctgcgggggggcttctggataaacctggcaagtcgcgtgatttctaccacacctgctactgcctgagcggcctgtccatagcccagcacttcggcagcggagccatgttgcatgatgtggtcctgggtgtgcccgaaaacgctctgcagcccactcacccagtgtacaacattggaccagacaaggtgatccaggccactacatactttctacagaagccagtcccaggttttgaggagcttaaggatgagacatcggcagagcctgcaaccgactagaggacctgggtcccggcagctctttgctcacccatctccccagtcagacaaggtttatacgtttcaatacatactgcattctgtgctacacaagccttagcctcagtggagctgtggttctcttggtactttcttgtcaaacaaaaccaatggctctgggtttggagaacacagtggctggttttaaaaattctttccacacctgtcaaaccaaaaatctatcagcccacgtggtgtggttggtgaacagtgcatgccaggaggaagcagtccctcctcaccagctctccagccaggacgatcacacagagatgaatggcatctgagtattacggcatccagagccactgctgactcccacttgcacgccaccattcagtcaccagactgggtgccctccgatgggtggaataagtctgcttcatgccaaggctgggctttgggtcccaccaagatgagttctctgtaagactgtggtggagttgcaccaggaggtgcctctgcctctcgacttgcaccctggtcatttgtaagggaaaagagctggaggtggggagagaaagatctccttcagttgggagtccttccacttcaacactggagaactgagccttgcatctctccagggtccaaggccacgcttggtgcacaggcaagacttgcttcagccccaggtgtggtgacttagacctaggaaaccaattatgagtggaaagtgaccctctagttcaactgtgccagaggaaacagccctccagtgcccacctgcctcactcctccctatcatgtaccgtgaaaaccccctctgatggcctcaaggcagtgcctgcaggccgaggcccttctgggggtttctatctttcttccaccagactccaagcccactctcctccaagactgtgttgtcttttctcaccaagagtattaacactactaagtctttcaccttaacttatgactcaggatttattcacgtcctgcccactctaggctcacaggaataaaatcaagtgctagacacactggctgctactaaggcactagcctctgtagctggtggtggcagcgtggggtgccgcccagcgtgctgggtcctggcagtgcctctgctgtgctgcacattgagccctttctcagtcagtggagtatcaagttgggccatctgtctactgacctggccttcatgtaagcagctgtgggctgcgggcagacaggagctcagagatgcagcatgaggcgcttagaaaaacctggccatttgctgcctctaattcccttttgctttgccatattgggctatgtattacctccttgaaataataaaagaataacattttcaaaaaaaaaaaaaaaaaaa

SEQ ID NO: 4011 - protein, 437 aa, Homo sapiens
MASPSSFTYYCPPSSSPVWSEPLYSLRPEHARERLQDDSVETVTSIEQAKVEEKIQEVFSSYKFNHLVPRLVLQREKHFHYLKRGLRQLTDAYECLDASRPWLCYWILHSLELLDEPIPQIVATDVCQFLELCQSPEGGFGGGPGQYPHLAPTYAAVNALCIIGTEEAYDIINREKLLQYLYSLKQPDGSFLMHVGGEVDVRSAYCAASVASLTNIITPDLFEGTAEWIARCQNWEGGIGGVPGMEAHGGYTFCGLAALVILKRERSLNLKSLLQWVTSRQMRFEGGFQGRCNKLVDGCYSFWQAGLLPLLHRALHAQGDPALSMSHWMFHQQALQEYILMCCQCPAGGLLDKPGKSRDFYHTCYCLSGLSIAQHFGSGAMLHDVVLGVPENALQPTHPVYNIGPDKVIQATTYFLQKPVPGFEELKDETSAEPATD

SEQ ID NO: 4012 - DNA, 971 bp, Homo sapiens
  unsure 154: unknown base
cggcctctctgcggggctcactctgcgcttcaccatggctttcattgccaagtccttctatgacctcagtgccatcagcctggatggggagaaggtagatttcaatacgttccggggcagggccgtgctgattgagaatgtggcttcgctctgnggcacaaccacccgggacttcacccagctcaacgagctgcaatgccgctttcccaggcgcctggtggtccttggcttcccttgcaaccaatttggacatcaggagaactgtcagaatgaggagatcctgaacagtctcaagtatgtccgtcctgggggtggataccagcccaccttcacccttgtccaaaaatgtgaggtgaatgggcagaacgagcatcctgtcttcgcctacctgaaggacaagctcccctacccttatgatgacccattttccctcatgaccgatcccaagctcatcatttggagccctgtgcgccgctcagatgtggcctggaactttgagaagttcctcatagggccggagggagagcccttccgacgctacagccgcaccttcccaaccatcaacattgagcctgacatcaagcgcctccttaaagttgccatatagatgtgaactgctcaacacacagatctcctactccatccagtcctgaggagccttaggatgcagcatgccttcaggagacactgctggacctcagcattcccttgatatcagtccccttcactgcagagccttgcctttcccctctgcctgtttccttttcctctcccaaccctctggttggtgattcaacttgggctccaagacttgggtaagctctgggccttcacagaatgatggcaccttcctaaaccctcatgggtggtgtctgagaggcgtgaagggcctggagccactctgctagaagagaccaataaagggcaggtgtggaaacggcaaaaaaaaaaaaaaaaaaaaaaaaaaaaaa

SEQ ID NO: 4013 - protein, 190 aa, Homo sapiens
MAFIAKSFYDLSAISLDGEKVDFNTFRGRAVLLRMWLRSEGTTTRDFTQLNELQCRFPRRLVVLGFPCNQFGHQENCQNEEILNSLKYVRPGGGYQPTFTLVQKCEVNGQNEHPVFAYLKDKLPYPYDDPFSLMTDPKLIIWSPVRRSDVAWNFEKFLIGPEGEPFRRYSRTFPTINIEPDIKRLLKVAI

SEQ ID NO: 4014 - DNA, 4409 bp, Homo sapiens
gtttgatatctacactcagtattgcaacaattaccccaactccgtggccgccctgacggaatgcatgcgggacaagcagcaggccaagttctttcgggaccggcaggagctgctacagcactcgctgcccttgggctcctacctgctgaagccagtccagcgcatcctcaagtaccacctgctgctccaggaaattgccaagcattttgatgaagaagaggatggctttgaggtggtggaggatgccattgacaccatgacctgtgtggcctggtacatcaacgacatgaagaggaggcatgagcacgcggtccggctccaggagattcagtcactcctcatcaactggaaggggcccgacctgaccacctacggggagcttgtcctggagggcacattccgcgtgcatcgcgtgcgcaatgaaaggacctttttcctctttgacaaaacactgcttatcaccaagaagcggggcgatcactttgtctacaagggcaacatcccggtaaccaggccctgccccatctcctctgccatcttctctccttcccaaaggatctgggctccccttcttgtctgcttcttggggctccagcaccacccttctgagatcaccctccctgcttccccaggctgtcaaccttgtgcttgactgtcctttccctctgcccctagtgctcctccctgatgctgatcgaaagcaccagagactccctgtgcttcactgtcacccactacaagcacagcaagcagcagtacagcatccaggccaagacagtggaggagaaacggaactggactcaccacatcaagaggctcatcctagagaaccaccatgccaccattccccagaaggccaaggaagccatcttggaaatggattcctattatcccaatcggtaccgctgcagcccagagcggctgaagaaggcttggtcctcccaggatgaggtgtccaccaatgtgcgccaggggcgccggcaatctgagccaaccaaacacctgctcaggcaactcaacgagaaaggtgagtgtgtgaggtggccagccattcccagtgagcgggggaggaggagggaggaggggaagcagccgacaacctggggtgtgacctgagggtggaggattgtcagaatagtgtagagggaactctgcctccattccccccagaagagggcctcgcccctggctggctgaggagaggggctggagctctcccccatgcacaggcctcatgccctttcctccggaaacaatgagagccgagcaacaggcacagacctgcgctgctctgtggcccctgggcccctgctctgtcagtcattcttttgaaagcccaggagactaggtgagggttctgggagcaggagcccccagtgaggacttccccagggagctgtccagaggtctttttcctgcttactgatctcttcccctcccctcccctgcccctcgcccgtgtgctgggggacccggtggtgatgtctgcagcccgagcagcaggaatgaagggaaaggggcgcagggagtctgaaagctccaggagcagcagaaggcccagtggccggtctccaaccagtactgagaagcgcatgagcttcgagtccatttcttccctgccagaggttgagccggaccctgaggctgggagtgagcaagaggtattttctgctgtggaagggcccagtgccgaggagacgccttcagacacagaatctccagaagtcctggagacacagcttgatgcccaccagggccttctggggatggaccccccaggtgacatggtggacttcgtggcagctgagagcactgaggaccttaaggccctgagcagcgaggaggaagaagaaatgggaggtgccgcccaggagcctgagagccttctgccaccctctgtgctggaccaggccagcgtcattgcggagcgatttgtcagcagcttctctcggcggagcagcgtggcacaggaggacagcaagtccagtggctttgggagcccgcggctggtcagccggagcagcagcgtgctcagcctggagggcagcgagaagggcctggcccggcatggcagtgccacagactccctcagctgtcagctctccccagaagtggacatcagtgtgggggtggccacagaggacagcccttctgtcaatgggatggagcccccaagcccaggctgcccagtggagcctgaccggtcttcctgcaagaagaaggaatcagcactctccacccgagaccggctgttgctagacaagattaagagctattatgaaaatgcagaacaccatgatgcaggcttcagcgtccgtcgccgggagagcctctcctacatccccaaaggactggtaagaaactccatctccaggttcaacagccttccccggccagacccagagccagtacctccagtggggagcaagagacaggtgggctcccggccgacttcgtgggccctgtttgagctcccaggaccaagccaggcagtcaaaggggacccacctcccatctcagatgctgagttccgcccatcttcagaaattgtgaagatctgggagggaatggagtcttccggagggagccctgggaaggggccaggccagggccaggccaatggctttgacctgcatgagccactcttcatcctggaggagcatgagctgggagccatcacagaggagtcggccactgcctccccggaaagctcctctcccactgaggggcgcagcccggcccacctggcccgggagctgaaagagctggtgaaggagctgagcagcagtacccagggggagctggtggccccactgcacccccgcatcgtgcagctctcccacgtaatggacagccacgtgagcgagcgcgtcaagaacaaggtctaccagctggcccgccagtacagcctccggatcaagagcaacaagccagtgatggccaggccaccactgcagtgggaaaaggtggcccctgagagggatgggaagagccccactgtgccctgtctacaggaagaggctggagagccattaggtggcaaaggtaagaggaagccggtgctgtctctatttgactatgagcagctgatggcccaggagcacagccctcccaagccctcctcggctggggagatgtcaccacagcgtttcttcttcaacccgtctgctgtcagccagaggaccacctcgcctgggggccggccctccgcccggagccccctcagccccacagagaccttcagctggcccgacgtccgtgagctctgctccaagtatgcctcccgcgatgaggcacgccgagcagggggcggccggccccgcggcccacccgtcaacaggagccactcggtgccggagaacatggtagagccacctctgtcgggcagggtgggccgctgccgcagcctgagcaccaagaggggccggggaggcggagaggctgcccaatcccctgggcctctgccccagagcaagccggatggaggcgagaccctgtatgtcactgcagacctcaccctggaggacaaccggcgggtgattgtcatggagaagggaccccttcccagccccactgcagggctggaggagagcagtggccagggaccaagctcaccggtggccctgctggggcaggttcaggacttccagcagtctgcagagtgccagccgaaggaagagggttccagggacccggcagacccgagccagcagggcagagtgagaaaccttagagagaagttccaggccttgaactctgtcggttgatgctgactcctgggggagggaggagtcatgttggaggttggggaagaacctgggcatccttcccctcaagcctgggctcatggagcccctgcccagggccctcaggtgggcggaaagtccatcccctccgcccttcaggaaggatgctcccgtgtgcaggggtctcctgcctgtgccatccactggggctcgagacaatttcccactcacctgtgaggccggtgtggctgcttcccttgtaaatagttgttctctggtaagaagccaaatatttaagctcacttcttcccagagagaggaagctctgctcaggcctccagcgttggctggccatggccacagccagatggaggagcccatccccaggagactcaggcagtggcctggagaggctttgttctgtaacggtgccttttcttagggtccaggcaggaatgaagccaataatttattgctttccattctgtggtatgatgtgcgtgtgcgtgagtgtgtggcccctgtttattcccctcctgtcaagaatgaagtggattcagttcaggtacttttgagggttgttgtgctgaccctgtggttgtcgctgatgtacacacatttcattatttgccaatggtgcaataaccactgctgaccaaccca

SEQ ID NO: 4015 - protein, 752 aa, Homo sapiens
MGKGRRESESSRSSRRPSGRSPTSTEKRMSFESISSLPEVEPDPEAGSEQEVFSAVEGPSAEETPSDTESPEVLETQLDAHQGLLGMDPPGDMVDFVAAESTEDLKALSSEEEEEMGGAAQEPESLLPPSVLDQASVIAERFVSSFSRRSSVAQEDSKSSGFGSPRLVSRSSSVLSLEGSEKGLARHGSATDSLSCQLSPEVDISVGVATEDSPSVNGMEPPSPGCPVEPDRSSCKKKESALSTRDRLLLDKIKSYYENAEHHDAGFSVRRRESLSYIPKGLVRNSISRFNSLPRPDPEPVPPVGSKRQVGSRPTSWALFELPGPSQAVKGDPPPISDAEFRPSSEIVKIWEGMESSGGSPGKGPGQGQANGFDLHEPLFILEEHELGAITEESATASPESSSPTEGRSPAHLARELKELVKELSSSTQGELVAPLHPRIVQLSHVMDSHVSERVKNKVYQLARQYSLRIKSNKPVMARPPLQWEKVAPERDGKSPTVPCLQEEAGEPLGGKGKRKPVLSLFDYEQLMAQEHSPPKPSSAGEMSPQRFFFNPSAVSQRTTSPGGRPSARSPLSPTETFSWPDVRELCSKYASRDEARRAGGGRPRGPPVNRSHSVPENMVEPPLSGRVGRCRSLSTKRGRGGGEAAQSPGPLPQSKPDGGETLYVTADLTLEDNRRVIVMEKGPLPSPTAGLEESSGQGPSSPVALLGQVQDFQQSAECQPKEEGSRDPADPSQQGRVRNLREKFQALNSVG

SEQ ID NO: 4016 - DNA, 3933 bp, Homo sapiens
cacgaggcagcactctcttcgtcgcttcggccagtgtgtcgggctgggccctgacaagccacctgaggagaggctcggagccgggcccggaccccggcgattgccgcccgcttctctctagtctcacgaggggtttcccgcctcgcacccccacctctggacttgcctttccttctcttctccgcgtgtggagggagccagcgcttaggccggagcgagcctgggggccgcccgccgtgaagacatcgcggggaccgattcaccatggagggcgccggcggcgcgaacgacaagaaaaagataagttctgaacgtcgaaaagaaaagtctcgagatgcagccagatctcggcgaagtaaagaatctgaagttttttatgagcttgctcatcagttgccacttccacataatgtgagttcgcatcttgataaggcctctgtgatgaggcttaccatcagctatttgcgtgtgaggaaacttctggatgctggtgatttggatattgaagatgacatgaaagcacagatgaattgcttttatttgaaagccttggatggttttgttatggttctcacagatgatggtgacatgatttacatttctgataatgtgaacaaatacatgggattaactcagtttgaactaactggacacagtgtgtttgattttactcatccatgtgaccatgaggaaatgagagaaatgcttacacacagaaatggccttgtgaaaaagggtaaagaacaaaacacacagcgaagcttttttctcagaatgaagtgtaccctaactagccgaggaagaactatgaacataaagtctgcaacatggaaggtattgcactgcacaggccacattcacgtatatgataccaacagtaaccaacctcagtgtgggtataagaaaccacctatgacctgcttggtgctgatttgtgaacccattcctcacccatcaaatattgaaattcctttagatagcaagactttcctcagtcgacacagcctggatatgaaattttcttattgtgatgaaagaattaccgaattgatgggatatgagccagaagaacttttaggccgctcaatttatgaatattatcatgctttggactctgatcatctgaccaaaactcatcatgatatgtttactaaaggacaagtcaccacaggacagtacaggatgcttgccaaaagaggtggatatgtctgggttgaaactcaagcaactgtcatatataacaccaagaattctcaaccacagtgcattgtatgtgtgaattacgttgtgagtggtattattcagcacgacttgattttctcccttcaacaaacagaatgtgtccttaaaccggttgaatcttcagatatgaaaatgactcagctattcaccaaagttgaatcagaagatacaagtagcctctttgacaaacttaagaaggaacctgatgctttaactttgctggccccagccgctggagacacaatcatatctttagattttggcagcaacgacacagaaactgatgaccagcaacttgaggaagtaccattatataatgatgtaatgctcccctcacccaacgaaaaattacagaatataaatttggcaatgtctccattacccaccgctgaaacgccaaagccacttcgaagtagtgctgaccctgcactcaatcaagaagttgcattaaaattagaaccaaatccagagtcactggaactttcttttaccatgccccagattcaggatcagacacctagtccttccgatggaagcactagacaaagttcacctgagcctaatagtcccagtgaatattgtttttatgtggatagtgatatggtcaatgaattcaagttggaattggtagaaaaactttttgctgaagacacagaagcaaagaacccattttctactcaggacacagatttagacttggagatgttagctccctatatcccaatggatgatgacttccagttacgttccttcgatcagttgtcaccattagaaagcagttccgcaagccctgaaagcgcaagtcctcaaagcacagttacagtattccagcagactcaaatacaagaacctactgctaatgccaccactaccactgccaccactgatgaattaaaaacagtgacaaaagaccgtatggaagacattaaaatattgattgcatctccatctcctacccacatacataaagaaactactagtgccacatcatcaccatatagagatactcaaagtcggacagcctcaccaaacagagcaggaaaaggagtcatagaacagacagaaaaatctcatccaagaagccctaacgtgttatctgtcgctttgagtcaaagaactacagttcctgaggaagaactaaatccaaagatactagctttgcagaatgctcagagaaagcgaaaaatggaacatgatggttcactttttcaagcagtaggaattggaacattattacagcagccagacgatcatgcagctactacatcactttcttggaaacgtgtaaaaggatgcaaatctagtgaacagaatggaatggagcaaaagacaattattttaataccctctgatttagcatgtagactgctggggcaatcaatggatgaaagtggattaccacagctgaccagttatgattgtgaagttaatgctcctatacaaggcagcagaaacctactgcagggtgaagaattactcagagctttggatcaagttaactgagctttttcttaatttcattcctttttttggacactggtggctcactacctaaagcagtctatttatattttctacatctaattttagaagcctggctacaatactgcacaaacttggttagttcaatttttgatcccctttctacttaatttacattaatgctcttttttagtatgttctttaatgctggatcacagacagctcattttctcagttttttggtatttaaaccattgcattgcagtagcatcattttaaaaaatgcacctttttatttatttatttttggctagggagtttatccctttttcgaattatttttaagaagatgccaatataatttttgtaagaaggcagtaacctttcatcatgatcataggcagttgaaaaatttttacaccttttttttcacattttacataaataataatgctttgccagcagtacgtggtagccacaattgcacaatatattttcttaaaaaataccagcagttactcatggaatatattctgcgtttataaaactagtttttaagaagaaattttttttggcctatgaaattgttaaacctggaacatgacattgttaatcatataataatgattcttaaatgctgtatggtttattatttaaatgggtaaagccatttacataatatagaaagatatgcatatatctagaaggtatgtggcatttatttggataaaattctcaattcagagaaatcatctgatgtttctatagtcactttgccagctcaaaagaaaacaataccctatgtagttgtggaagtttatgctaatattgtgtaactgatattaaacctaaatgttctgcctaccctgttggtataaagatattttgagcagactgtaaacaagaaaaaaaaaatcatgcattcttagcaaaattgcctagtatgttaatttgctcaaaatacaatgtttgattttatgcactttgtcgctattaacatcctttttttcatgtagatttcaataattgagtaattttagaagcattattttaggaatatatagttgtcacagtaaatatcttgttttttctatgtacattgtacaaatttttcattccttttgctctttgtggttggatctaacactaactgtattgttttgttacatcaaataaacatcttctgtggaaaaaaaaaaaaaaaaaaaa

SEQ ID NO: 4017 - protein, 826 aa, Homo sapiens
MEGAGGANDKKKISSERRKEKSRDAARSRRSKESEVFYELAHQLPLPHNVSSHLDKASVMRLTISYLRVRKLLDAGDLDIEDDMKAQMNCFYLKALDGFVMVLTDDGDMIYISDNVNKYMGLTQFELTGHSVFDFTHPCDHEEMREMLTHRNGLVKKGKEQNTQRSFFLRMKCTLTSRGRTMNIKSATWKVLHCTGHIHVYDTNSNQPQCGYKKPPMTCLVLICEPIPHPSNIEIPLDSKTFLSRHSLDMKFSYCDERITELMGYEPEELLGRSIYEYYHALDSDHLTKTHHDMFTKGQVTTGQYRMLAKRGGYVWVETQATVIYNTKNSQPQCIVCVNYVVSGIIQHDLIFSLQQTECVLKPVESSDMKMTQLFTKVESEDTSSLFDKLKKEPDALTLLAPAAGDTIISLDFGSNDTETDDQQLEEVPLYNDVMLPSPNEKLQNINLAMSPLPTAETPKPLRSSADPALNQEVALKLEPNPESLELSFTMPQIQDQTPSPSDGSTRQSSPEPNSPSEYCFYVDSDMVNEFKLELVEKLFAEDTEAKNPFSTQDTDLDLEMLAPYIPMDDDFQLRSFDQLSPLESSSASPESASPQSTVTVFQQTQIQEPTANATTTTATTDELKTVTKDRMEDIKILIASPSPTHIHKETTSATSSPYRDTQSRTASPNRAGKGVIEQTEKSHPRSPNVLSVALSQRTTVPEEELNPKILALQNAQRKRKMEHDGSLFQAVGIGTLLQQPDDHAATTSLSWKRVKGCKSSEQNGMEQKTIILIPSDLACRLLGQSMDESGLPQLTSYDCEVNAPIQGSRNLLQGEELLRALDQVN

SEQ ID NO: 4018 - DNA, 1358 bp, Homo sapiens
gggaagtgctgttggagccgctgtggttgctgtccgtgtagtgaaagcgcgtgcctttgtttgtgtccctggccatgtgtccctggccatggcgctgcagctctcccgggagcagggaatcaccctgcgtgggagtgccgaaatcgtggacgagttcttctcattcggcatcaacagcattttatatcagcgtggcatttatccatctgaaatctttactcgagtgcagaaatacggactcaccttgcttgtaactactgatcttgagctcataaaatacctaaataatgtggtggaacaactaaaagattggttatacaagtgttcagttcagaaactggttgtagttatctcaaatattgaaagtggtgaggtcctggaaagatgacagtttgatattgagtgtgataagactgcaaaagatgacagtgcacccagagaaaagtctcagaaagctattcaggatgaaatccgttcagtcatcagacagatcacagctacagtgacatttctgccactgttggaagtttcttgttcatttgatctgctgatttacacagacaaagatttggttgtacctgaaaaatgggaagagtcgggaccacagtttattaccaattctgaggaagtctgcctttgttcatttactactacaatccacaaagtaaatagcatggtggcctacaaaattcctgtcaatgactgaagatgacatgaggaaataatgtaattgtaattttgaaatgtggttttcctgaaatcaagtcatctatagttgatatgttttatttcattggttaatttatacatggagaaaaccaaaatgatacttactgaactgtgtgtaattgttccttttgtttttttggtacctatttgactcaccatggagttaacatcatgaatttattgtgcattattcaaaaggaaccaggaggttttttttttgtcaacattgtgatgtatattcctttgaagatagtaactgtagatggaaaaacttgtgctataaagctaagtgctttcctaaatcagatgttttggtcaagtagcttgactcagtataggtagggagatatttaattataaaatacagcaaaggaagtctaaatattcagaatctttgttaaagtcctgaaagtaactaataatctataaacaatgaaatattgctgtgtagctccttttgaccttcatttcatgcataattttccctatcgaatcagtttccaattatttgactttaatttatgtaacttgaacctgtgaagggatggatatttgtactgcttgatgttctgtgatacagaactcttaaaaatttttttttgtgttttataaaatcaagttttaagtga

SEQ ID NO: 4019 - DNA, 660 bp, Homo sapiens
ggagccgctgtggttgctgtccgtgtagtgaaagcgcgtgcctttgtttgtgtccctggccatgtgtccctggccatggcgctgcagctctcccgggagcagggaatcaccctgcgtgggagtgccgaaatcgtggacgagttcttctcattcggcatcaacagcattttatatcagcgtggcatttatccatctgaaatctttactcgagtgcagaaatacggactcaccttgcttgtaactactgatcttgagctcataaaatacctaaataatgtggtggaacaactaaaagtgcacccagagaaaagtctcagaaagctattcaggatgaaatccgttcagtcatcagacagatcacagctacagtgacatttctgccactgttggaagtttcttgttcatttgatctgctgatttacacagacaaagatttggttgtacctgaaaaatgggaagagtcgggaccacagtttattaccaattctgaggaagtctgcctttgttcatttactactacaatccacaaagtaaatagcatggtggcctacaaaattcctgtcaatgactgaagatgacatgaggaaataatgtaattgtaattttgaaatgtggttttcctgaaatcaagtcatctatagttgatatgttttatttcat

SEQ ID NO: 4020 - DNA, 894 bp, Homo sapiens
atgatgtcttatcttaagcaaccgccttacgcagtcaatgggctgagtctgaccacttcgggtatggacttgctgcacccctccgtgggctacccggggccctgggcttcttgtcccgcagccaccccccggaaacagcgccgggagaggacgacgttcactcgggcgcagctagatgtgctggaagcactgtttgccaagacccggtacccagacatcttcatgcgagaggaggtggcactgaaaatcaacttgcccgagtcgagggtgcaggtatggtttaagaatcgaagagctaagtgccgccaacaacagcaacaacagcagaatggaggtcaaaacaaagtgagacctgccaaaaagaagacatctccagctcgggaagtgagttcagagagtggaacaagtggccaattcactcccccctctagcacctcagtcccgaccattgccagcagcagtgctcctgtgtctatctggagcccagcttccatctccccactgtcagatcccttgtccacctcctcttcctgcatgcagaggtcctatcccatgacctatactcaggcttcaggttatagtcaaggatatgctggctcaacttcctactttgggggcatggactgtggatcatatttgacccctatgcatcaccagcttcccggaccaggggccacactcagtcccatgggtaccaatgcagtcaccagccatctcaatcagtccccagcttctctttccacccagggatatggagcttcaagcttgggttttaactcaaccactgattgcttggattataaggaccaaactgcctcctggaagcttaacttcaatgctgactgcttggattataaagatcagacatcctcgtggaaattccaggttttgtga

SEQ ID NO: 4021 - protein, 297 aa, Homo sapiens
MMSYLKQPPYAVNGLSLTTSGMDLLHPSVGYPGPWASCPAATPRKQRRERTTFTRAQLDVLEALFAKTRYPDIFMREEVALKINLPESRVQVWFKNRRAKCRQQQQQQQNGGQNKVRPAKKKTSPAREVSSESGTSGQFTPPSSTSVPTIASSSAPVSIWSPASISPLSDPLSTSSSCMQRSYPMTYTQASGYSQGYAGSTSYFGGMDCGSYLTPMHHQLPGPGATLSPMGTNAVTSHLNQSPASLSTQGYGASSLGFNSTTDCLDYKDQTASWKLNFNADCLDYKDQTSSWKFQVL

SEQ ID NO: 4022 - DNA, 914 bp, Homo sapiens
ccagccaacgagcggaaaatggcagacaatttttcgctccatgatgcgttatctgggtctggaaacccaaaccctcaaggatggcctggcgcatgggggaaccagcctgctggggcagggggctacccaggggcttcctatcctggggcctaccccgggcaggcacccccaggggcttatcctggacaggcacctccaggcgcctaccatggagcacctggagcttatcccggagcacctgcacctggagtctacccagggccacccagcggccctggggcctacccatcttctggacagccaagtgcccccggagcctaccctgccactggcccctatggcgcccctgctgggccactgattgtgccttataacctgcctttgcctgggggagtggtgcctcgcatgctgataacaattctgggcacggtgaagcccaatgcaaacagaattgctttagatttccaaagagggaatgatgttgccttccactttaacccacgcttcaatgagaacaacaggagagtcattgtttgcaatacaaagctggataataactggggaagggaagaaagacagtcggttttcccatttgaaagtgggaaaccattcaaaatacaagtactggttgaacctgaccacttcaaggttgcagtgaatgatgctcacttgttgcagtacaatcatcgggttaaaaaactcaatgaaatcagcaaactgggaatttctggtgacatagacctcaccagtgcttcatataccatgatataatctgaaaggggcagattaaaaaaaaaaaaaaagaatctaaaccttacatgtgtaaaggtttcatgttcactgtgagtgaaaatttttacattcatcaatatccctcttgtaagtcatctacttaataaatattacagtgaaag

SEQ ID NO: 4023 - protein, 250 aa, Homo sapiens
MADNFSLHDALSGSGNPNPQGWPGAWGNQPAGAGGYPGASYPGAYPGQAPPGAYPGQAPPGAYHGAPGAYPGAPAPGVYPGPPSGPGAYPSSGQPSAPGAYPATGPYGAPAGPLIVPYNLPLPGGVVPRMLITILGTVKPNANRIALDFQRGNDVAFHFNPRFNENNRRVIVCNTKLDNNWGREERQSVFPFESGKPFKIQVLVEPDHFKVAVNDAHLLQYNHRVKKLNEISKLGISGDIDLTSASYTMI

SEQ ID NO: 4024 - DNA, 1372 bp, Homo sapiens
ctgcgccgcctttctccgctggcaacggcgccgctccccgctcctcctccccagccatggcgttcacgttcgcggccttctgctacatgctggcgctgctgctcactgccgcgctcatcttcttcgccatttggcacattatagcatttgatgagctgaagactgattacaagaatcctatagaccagtgtaataccctgaatccccttgtactcccagagtacctcatccacgctttcttctgtgtcatgtttctttgtgcagcagagtggcttacactgggtctcaatatgcccctcttggcatatcatatttggaggtatatgagtagaccagtgatgagtggcccaggactctatgaccctacaaccatcatgaatgcagatattctagcatattgtcagaaggaaggatggtgcaaattagctttttatcttctagcatttttttactacctatatggcatgatctatgttttggtgagctcttagaacaacacacagaagaattggtccagttaagtgcatgcaaaaagccaccaaatgaagggattctatccagcaagatcctgtccaagagtagcctgtggaatctgatcagttactttaaaaaatgactccttattttttaaatgtttccacatttttgcttgtggaaagactgttttcatatgttatactcagataaagattttaaatggtattacgtataaattaatataaaatgattacctctggtgttgacaggtttgaacttgcacttcttaaggaacagccataatcctctgaatgatgcattaattactgactgtcctagtacattggaagcttttgtttataggaacttgtagggctcattttggtttcattgaaacagtatctaattataaattagctgtagatatcaggtgcttctgatgaagtgaaaatgtatatctgactagtgggaaacttcatgggtttcctcatctgtcatgtcgatgattatatatggatacatttacaaaaataaaaagcgggaattttcccttcgcttgaatattatccctgtatattgcatgaatgagagatttcccatatttccatcagagtaataaatatacttgctttaattcttaagcataagtaaacatgatataaaaatatatgctgaattacttgtgaagaatgcatttaaagctattttaaatgtgtttttatttgtaagacattacttattaagaaattggttattatgcttactgttctaatctggtggtaaaggtattcttaagaatttgcaggtactacagattttcaaaactgaatgagagaaaattgtataaccatcctgctgttcctttagtgcaatacaataaaactctgaaattaag

SEQ ID NO: 4025 - DNA, 4804 bp, Homo sapiens
atggagggggaccgggtggccgggcggccggtgctgtcgtcgttaccagtgctactgctgctgccgttgctaatgttgcgggccgcggcgctgcacccagacgagctcttcccacacggggagtcgtggggggaccagctcctgcaggaaggcgacgacgaaagctcagccgtggtgaagctggcgaatcccctgcacttctacgaagcccgattcagcaacctctacgtgggcaccaacggcatcatctccactcaggacttccccagggaaacgcagtatgtggactatgatttccccaccgacttcccggccatcgccccttttctggcggacatcgacacgagccacggcagaggccgagtcctgtaccgagaggacacctcccccgcagtgctgggcctggccgcccgctatgtgcgcgctggcttcccgcgctctgcgcgctttacccccacccacgccttcctggccacctgggagcaggtaggcgcttacgaggaggtcaagcgcggggcgctgccctcgggagagctgaacactttccaggcagttttggcatctgatgggtctgatagctacgccctctttctttatcctgccaacggcctgcagttccttggaacccgccccaaagagtcttacaatgtccagcttcagcttccagctcgggtgggcttctgccgaggggaggctgatgatctgaagtcagaaggaccatatttcagcttgactagcactgaacagtctgtgaaaaatctctatcaactaagcaacctggggatccctggagtgtgggctttccatatcggcagcacttccccgttggacaatgtcaggccagctgcagttggagacctttccgctgcccactcttctgttcccctgggacgttccttcagccatgctacagccctggaaagtgactataatgaggacaatttggattactatgatgtgaatgaggaggaagctgaataccttccgggtgaaccagaggaggcattgaatggccacagcagcattgatgtttccttccaatccaaagtggatacaaagcctttagaggaatcttccaccttggatcctcacaccaaagaaggaacatctctgggagaggtagggggcccagatttaaaaggccaagttgagccctgggatgagagagagaccagaagcccagctccaccagaggtagacagagattcactggctccttcctgggaaaccccaccaccgtaccccgaaaacggaagcatccagccctacccagatggagggccagtgccttcggaaatggatgttcccccagctcatcctgaagaagaaattgttcttcgaagttaccctgcttcaggtcacactacacccttaagtcgagggacgtatgaggtgggactggaagacaacataggttccaacaccgaggtcttcacgtataatgctgccaacaaggaaacctgtgaacacaaccacagacaatgctcccggcatgccttctgcacggactatgccactggcttctgctgccactgccaatccaagttttatggaaatgggaagcactgtctgcctgaaggggcacctcaccgagtgaatgggaaagtgagtggccacctccacgtgggccatacacccgtgcacttcactgatgtggacctgcatgcgtatatcgtgggcaatgatggcagagcctacacggccatcagccacatcccacagccagcagcccaggccctcctccccctcacaccaattggaggcctgtttggctggctctttgctttagaaaaacctggctctgagaacggcttcagcctcgcaggtgctgcctttacccatgacatggaagttacattctacccgggagaggagacggttcgtatcactcaaactgctgagggacttgacccagagaactacctgagcattaagaccaacattcaaggccaggtgccttacgtctcagcaaatttcacagcccacatctctccctacaaggagctgtaccactactccgactccactgtgacctctacaagttccagagactactctctgacttttggtgcaatcaaccaaacatggtcctaccgcatccaccagaacatcacttaccaggtgtgcaggcacgcccccagacacccgtccttccccaccacccagcagctgaacgtggaccgggtctttgccttgtataatgacgaagaaagagtgcttagatttgctgtgaccaatcaaattggcccggtcaaagaggattcagaccccactccggggaatccttgctatgatgggagccacatgtgtgacacaacagcacggtgccatccagggacaggtgtagattacacctgtgagtgcgcatctgggtaccagggagatggacggaactgtgtggatgaaaatgaatgtgcaactggctttcatcgctgtggccccaactctgtatgtatcaacttgcctggaagctacaggtgtgagtgccggagtggttatgagtttgcagatgaccggcatacttgcatcttgatcaccccacctgccaacccctgtgaggatggcagtcatacctgtgctcctgctgggcaggcccggtgtgttcaccatggaggcagcacgttcagctgtgcctgcctgcctggttatgccggcgatgggcaccagtgcactgatgtagatgaatgctcagaaaacagatgtcaccctgcagctacctgctacaatactcctggttccttctcctgccgttgtcaacccggatattatggggatggatttcagtgcatacctgactccacctcaagcctgacaccctgtgaacaacagcagcgccatgcccaggcccagtatgcctaccctggggcccggttccacatcccccaatgcgacgagcagggcaacttcctgcccctacagtgtcatggcagcactggtttctgctggtgcgtggaccctgatggtcatgaagttcctggtacccagactccacctggctccaccccgcctcactgtggaccatcaccagagcccacccagaggcccccgaccatctgtgagcgctggagggaaaacctgctggagcactacggtggcaccccccgagatgaccagtacgtgccccagtgcgatgacctgggccacttcatccccctgcagtgccacggaaagagcgacttctgctggtgtgtggacaaagatggcagagaggtgcagggcacccgctcccagccaggcaccacccctgcgtgtatacccaccgtcgctccacccatggtccggcccacgccccggccagatgtgacccctccatctgtgggcaccttcctgctctatactcagggccagcagattggctacttacccctcaatggcaccaggcttcagaaggatgcagctaagaccctgctgtctctgcatggctccataatcgtgggaattgattacgactgccgggagaggatggtgtactggacagatgttgctggacggacaatcagccgtgccggtctggaactgggagcagagcctgagacgatcgtgaattcaggtctgataagccctgaaggacttgccatagaccacatccgcagaacaatgtactggacggacagtgtcctggataagatagagagcgccctgctggatggctctgagcgcaaggtcctcttctacacagatctggtgaatccccgtgccatcgctgtggatccaatccgaggcaacttgtactggacagactggaatagagaagctcctaaaattgaaacgtcatctttagatggagaaaacagaagaattctgatcaatacagacattggattgcccaatggcttaacctttgaccctttctctaaactgctctgctgggcagatgcaggaaccaaaaaactggagtgtacactacctgatggaactggacggcgtgtcattcaaaacaacctcaagtaccccttcagcatcgtaagctatgcagatcacttctaccacacagactggaggagggatggtgttgtatcagtaaataaacatagtggccagtttactgatgagtatctcccagaacaacgatctcacctctacgggataactgcagtctacccctactgcccaacaggaagaaagtaagtacagtaatgtaaaggaagacttggagtttacaatcagaacctggaccctaaagaacagtgactgcaaaggcaaagaaagtaaaaaaggaattggccattagacgttcctgagcatccaagatgaacattttgtagtgcaaaaagacttttgtgaaaagctgatacctcaatctttactactgtatttttaaaaatgaaggttgttattgcaagtttaaaaaggtaacagaattttaactgttgcttattaaagcaacatcttgtaaacatttatcattaatatttaaaagatcaaattcattcaactaagaattagagtttaagactctaaacctgatttttgccatggattccttctggccaagaaattaaagcacatgtgatcaatataacaatataatcctaaaccttgacagttggagaagccaatgcagaactgatgggaaaggaccaattatttatagtttcccaacaaaagttctaagattttttacctctgcatcagtgcatttctatttatatcaaaaggtgctaaaatgattcaatttgcattttctgatcctgtagtgcctctatagaagtacccacagaaagtaaagtatcacatttataaataccaaagatgtaacaattttaaaattttctagattactccaataaagtgttttaagttt

SEQ ID NO: 4026 - protein, 1375 aa, Homo sapiens
MEGDRVAGRPVLSSLPVLLLLPLLMLRAAALHPDELFPHGESWGDQLLQEGDDESSAVVKLANPLHFYEARFSNLYVGTNGIISTQDFPRETQYVDYDFPTDFPAIAPFLADIDTSHGRGRVLYREDTSPAVLGLAARYVRAGFPRSARFTPTHAFLATWEQVGAYEEVKRGALPSGELNTFQAVLASDGSDSYALFLYPANGLQFLGTRPKESYNVQLQLPARVGFCRGEADDLKSEGPYFSLTSTEQSVKNLYQLSNLGIPGVWAFHIGSTSPLDNVRPAAVGDLSAAHSSVPLGRSFSHATALESDYNEDNLDYYDVNEEEAEYLPGEPEEALNGHSSIDVSFQSKVDTKPLEESSTLDPHTKEGTSLGEVGGPDLKGQVEPWDERETRSPAPPEVDRDSLAPSWETPPPYPENGSIQPYPDGGPVPSEMDVPPAHPEEEIVLRSYPASGHTTPLSRGTYEVGLEDNIGSNTEVFTYNAANKETCEHNHRQCSRHAFCTDYATGFCCHCQSKFYGNGKHCLPEGAPHRVNGKVSGHLHVGHTPVHFTDVDLHAYIVGNDGRAYTAISHIPQPAAQALLPLTPIGGLFGWLFALEKPGSENGFSLAGAAFTHDMEVTFYPGEETVRITQTAEGLDPENYLSIKTNIQGQVPYVSANFTAHISPYKELYHYSDSTVTSTSSRDYSLTFGAINQTWSYRIHQNITYQVCRHAPRHPSFPTTQQLNVDRVFALYNDEERVLRFAVTNQIGPVKEDSDPTPGNPCYDGSHMCDTTARCHPGTGVDYTCECASGYQGDGRNCVDENECATGFHRCGPNSVCINLPGSYRCECRSGYEFADDRHTCILITPPANPCEDGSHTCAPAGQARCVHHGGSTFSCACLPGYAGDGHQCTDVDECSENRCHPAATCYNTPGSFSCRCQPGYYGDGFQCIPDSTSSLTPCEQQQRHAQAQYAYPGARFHIPQCDEQGNFLPLQCHGSTGFCWCVDPDGHEVPGTQTPPGSTPPHCGPSPEPTQRPPTICERWRENLLEHYGGTPRDDQYVPQCDDLGHFIPLQCHGKSDFCWCVDKDGREVQGTRSQPGTTPACIPTVAPPMVRPTPRPDVTPPSVGTFLLYTQGQQIGYLPLNGTRLQKDAAKTLLSLHGSIIVGIDYDCRERMVYWTDVAGRTISRAGLELGAEPETIVNSGLISPEGLAIDHIRRTMYWTDSVLDKIESALLDGSERKVLFYTDLVNPRAIAVDPIRGNLYWTDWNREAPKIETSSLDGENRRILINTDIGLPNGLTFDPFSKLLCWADAGTKKLECTLPDGTGRRVIQNNLKYPFSIVSYADHFYHTDWRRDGVVSVNKHSGQFTDEYLPEQRSHLYGITAVYPYCPTGRK

SEQ ID NO: 4027 - DNA, 1080 bp, Homo sapiens
gcggccaccgcttttaagccacgattggcgaaggccgccgtcatttcggagcgactcagcgcctgcccgccctctcgccgcgtcgccggtgcctgcgcctcccgctccacctcgcttcttctctcccggccgaggcccgggggaccagagcgagaagcggggaccatgttccgacgcaagttgacggctctcgactaccacaaccccgccggcttcaactgcaaagatgaaacagaatttagaaacttcatcgtttggcttgaagaccagaaaatcaggcactacaagattgaagacagagggaatttaagaaacatccacagcagcgactggcccaagttctttgaaaagtatctcagagatgttcactgtcctttcaagattcaagatcgacaagaagctattcactggcttcttggtttagctgttagacttgaatatggagataatgctgaaaaatacaaggatttagtacctgataattcaaaaactgctgacaatgcaactaaaaatgcagaaccattgatcaatttggatgtaaataatcctgattttaaggctggtgtgatggctttggctaacctgcttcagattcagcgtcatgatgattacctggtaatgcttaaggcaattcggattttggttcaggagcgcctgacacaggatgcagttgctaaggcaaatcaaacaaaagagggcttacctgttgctttagacaaacatattcttggttttgacacaggagatgcagttcttaatgaagctgctcaaattctgcgattgctgcacatagaggagctcagagagctacagacaaaaatcaacgaagccatagtagctgttcaggcaattattgctgatccaaagacagaccacagactgggaaaagttggaagatgaacacttgaggacttcagcttctcacctacttagtacagttgggaaccatacacttctggcatgtttggaaatcaaaatgtcacattctcgggggaggaagcccagaaaattgggtatgttctagagatttaccaccattgcttattgcttttttctttaataaagtttaggaaagtagaa

SEQ ID NO: 4028 - protein, 244 aa, Homo sapiens
MFRRKLTALDYHNPAGFNCKDETEFRNFIVWLEDQKIRHYKIEDRGNLRNIHSSDWPKFFEKYLRDVHCPFKIQDRQEAIHWLLGLAVRLEYGDNAEKYKDLVPDNSKTADNATKNAEPLINLDVNNPDFKAGVMALANLLQIQRHDDYLVMLKAIRILVQERLTQDAVAKANQTKEGLPVALDKHILGFDTGDAVLNEAAQILRLLHIEELRELQTKINEAIVAVQAIIADPKTDHRLGKVGR

SEQ ID NO: 4029 - DNA, 2643 bp, Homo sapiens
ccgcacttccagctctctgcgcagcccgccgcgcagcccgccgccccagccatggcgaagcccctgacggaccaggagaagcggcggcagatcagcatccgcggcatcgtgggcgtggagaacgtggcagagctgaagaagagtttcaaccggcacctgcacttcacgctggtcaaggaccgcaacgtggccaccacccgcgactactacttcgcgctggcgcacacggtgcgcgaccacctggtggggcgctggatccgcacgcagcagcactactacgacaagtgccccaagagggtatattacctctctctggaattttacatgggccgaacattacagaacaccatgatcaacctcggtctgcaaaatgcctgtgatgaggccatttaccagcttggattggatatagaagagttagaagaaattgaagaagatgctggacttggcaatggtggtcttgggagacttgctgcctgcttcttggattccatggcaaccctgggacttgcagcctatggatacggcattcggtatgaatatgggattttcaatcagaagatccgagatggatggcaggtagaagaagcagatgattggctcagatatggaaacccttgggagaagtcccgcccagaattcatgctgcctgtgcacttctatggaaaagtagaacacaccaacaccgggaccaagtggattgacactcaagtggtcctggctctgccatatgacacccccgtgcccggctacatgaataacactgtcaacaccatgcgcctctggtctgctcgggcaccaaatgactttaacctcagagactttaatgttggagactacattcaggctgtgctggaccgaaacctggccgagaacatctcccgggtcctctatcccaatgacaatttttttgaagggaaggagctaagattgaagcaggaatactttgtggtggctgcaaccttgcaagatatcatccgccgtttcaaagcctccaagtttggctccacccgtggtgcaggaactgtgtttgatgccttcccggatcaggtggccatccagctgaatgatactcaccctgcactcgcgatccctgagctgatgaggatttttgtggatattgaaaaactgccctggtccaaggcatgggagctcacccagaagaccttcgcctacaccaaccacacagtgctcccggaagccctggagcgctggcccgtggacctggtggagaagctgctccctcgacatttggaaatcatttatgagataaatcagaagcatttagatagaattgtggccttgtttcctaaagatgtggaccgtctgagaaggatgtctctgatagaagaggaaggaagcaaaaggatcaacatggcccatctctgcattgtcggttcccatgctgtgaatggcgtggctaaaatccactcagacatcgtgaagactaaagtattcaaggacttcagtgagctagaacctgacaagtttcagaataaaaccaatgggatcactccaaggcgctggctcctactctgcaacccaggacttgcagagctcatagcagagaaaattggagaagactatgtgaaagacctgagccagctgacgaagctccacagcttcctgggtgatgatgtcttcctccgggaactcgccaaggtgaagcaggagaataagctgaagttttctcagttcctggagacggagtacaaagtgaagatcaacccatcctccatgtttgatgtccaggtgaagaggatacatgagtacaagcgacagctcttgaactgtctgcatgtgatcacgatgtacaaccgcattaagaaagaccctaagaagttattcgtgccaaggacagttatcattggtggtaaagctgccccaggatatcacatggccaaaatgatcataaagctgatcacttcagtggcagatgtggtgaacaatgaccctatggttggaagcaagttgaaagtcatcttcttggagaactacagagtatctcttgctgaaaaagtcattccagccacagatctgtcagagcagatttccactgcaggcaccgaagcctcggggacaggcaatatgaagttcatgctaaatggggccctaactatcgggaccatggatggggccaatgtggaaatggcagaagaagctggggaagagaacctgttcatctttggcatgaggatagatgatgtggctgctttggacaagaaagggtacgaggcaaaagaatactatgaggcacttccagagctgaagctggtcattgatcaaattgacaatggctttttttctcccaagcagcctgacctcttcaaagatatcatcaacatgctattttatcatgacaggtttaaagtctttgcagactacgaagcctatgtcaagtgtcaagataaagtgagtcagctgtacatgaatccaaaggcctggaacacaatggtactcaaaaacatagctgcctcggggaaattctccagtgaccgaacaattaaagaatatgcccaaaacatctggaacgtggaaccttcagatctaaagatttctctatccaatgaatctaacaaagtcaatggaaattgaactctacaatgtctctagaaaacatagcttcttactgaacttgaacat

SEQ ID NO: 4030 - protein, 847 aa, Homo sapiens
MAKPLTDQEKRRQISIRGIVGVENVAELKKSFNRHLHFTLVKDRNVATTRDYYFALAHTVRDHLVGRWIRTQQHYYDKCPKRVYYLSLEFYMGRTLQNTMINLGLQNACDEAIYQLGLDIEELEEIEEDAGLGNGGLGRLAACFLDSMATLGLAAYGYGIRYEYGIFNQKIRDGWQVEEADDWLRYGNPWEKSRPEFMLPVHFYGKVEHTNTGTKWIDTQVVLALPYDTPVPGYMNNTVNTMRLWSARAPNDFNLRDFNVGDYIQAVLDRNLAENISRVLYPNDNFFEGKELRLKQEYFVVAATLQDIIRRFKASKFGSTRGAGTVFDAFPDQVAIQLNDTHPALAIPELMRIFVDIEKLPWSKAWELTQKTFAYTNHTVLPEALERWPVDLVEKLLPRHLEIIYEINQKHLDRIVALFPKDVDRLRRMSLIEEEGSKRINMAHLCIVGSHAVNGVAKIHSDIVKTKVFKDFSELEPDKFQNKTNGITPRRWLLLCNPGLAELIAEKIGEDYVKDLSQLTKLHSFLGDDVFLRELAKVKQENKLKFSQFLETEYKVKINPSSMFDVQVKRIHEYKRQLLNCLHVITMYNRIKKDPKKLFVPRTVIIGGKAAPGYHMAKMIIKLITSVADVVNNDPMVGSKLKVIFLENYRVSLAEKVIPATDLSEQISTAGTEASGTGNMKFMLNGALTIGTMDGANVEMAEEAGEENLFIFGMRIDDVAALDKKGYEAKEYYEALPELKLVIDQIDNGFFSPKQPDLFKDIINMLFYHDRFKVFADYEAYVKCQDKVSQLYMNPKAWNTMVLKNIAASGKFSSDRTIKEYAQNIWNVEPSDLKISLSNESNKVNGN

SEQ ID NO: 4031 - DNA, 732 bp, Homo sapiens
catgcgtgggccagcttcttccttttacctcgttgcactgctgagagcaagatgggtcaccagcagctgtactggagccacccgcgaaaattcggccagggttctcgctcttgtcgtgtctgttcaaaccggcacggtctgatccggaaatatggcctcaatatgtgccgccagtgtttccgtcagtacgcgaaggatatcggtttcattaagaaagacctgagctgtcttccttggcactgcctatggaggtgacacccatctcctccatcatggccatcctgagaccgctcgcgaagcccaagatcatcaaaaagagcaccaagttcactgggaaccagtcagactgatatgtcaaaattaagggtaactggtggaaacacagaggtattaacaacagggttcatagaaggtttgagggccagatctatgcccaacattggttatgggagaaacaaaaagacaaagcacatactgcccagtggcttctggaagttcctggtccacaacgttaaggagctggaagtactgctggtgagcaacaaatcttactgtgttgagatcactcatgatgtttcttccaagaactgcaaagccatcttggaaagagcagcccaggtggtcatcagagtcaccaatgccaatgccagcctgcacagtgcagaaagtgaatagacagtgaatgtgtttgttttattggggtttaaataaaaccaataaaactgtaaaaac

SEQ ID NO: 4032 - DNA, 1353 bp, Homo sapiens
gtagcgggagcggagagcggaccccagagagccctgagcagccccaccgccgccgccggcctagttaccgtcacaccccgggaggagccgcagctgccgcagccggccgcagtcaccatcaccgcaaccatgagcagcgaggccgagacccagcagccgcccgccgcccccgccctcagcgccgccgacaccaagcccggcactaccggcagcggcgcagggagcggtggcccgggcggcctcacatcggcggcgcctgccggcgggcacaaaaaggtcatcgcaacgaaggttttgggaacggtaaaatggttcaatgtaaggaacggatatggtttcatccacaggaacgacaccaaggaagatgtatttgtacaccacactgccatgaagaagaataaccccaggaagtaccttcgcagtgtaggagatggagagactgtggagtttgatgttgttgaaggagaaaagggtgcgaaggcagcaaatgttacaggtcctggtggtgttccagttcaaggcagtaaatatgcagcagaccgtaaccattatagacgctatccacgtcctaggggtcctccacgcaattaccagcaaaattaccagaatagtgagagtggggaaaagaacgagggatcggagagtgctcccgaaggccaggcccaacaacgccggccctaccgcaggcgaaggttcccaccttactacatgcggagaccctatgggcgtcgaccacagtattccaaccctcctgtgcagggagaagtgatggagggtgctgacaaccagggtgcaggagaacaaggtagaccagtgaggcagaatatgtatcggggatatagaccacgattccgcagaggccctcctctccaaagacagcctagagaggacggcaatgaagaagataaagaaaatcaaggagatgagacccaaggtcagcagccacctcaacgtcggtaccgccgcaacttcaattaccgacgccgacgcccagaaaaccctaaaccacaagatggcaaagagacaaaagcagccaatccaccagctgagaattcgtccgctcccgaggctgagcagggcggggcttgagtaaatgccggcttaccatctctaccatcatccggtttagtcatccaacaagaagaaataatgaaattccagcaataagaaatgaacaaaagattggagctgaagaccttaaatgcttgcattttgcccgttgaccagataaatagatctgcattatctatgcagcatggggtttttattatttttacctaaagacgtctctttttggtaataacaaacgtgttttttaaaaaagcctggtttttctgaatacgcctttaaagg

SEQ ID NO: 4033 - DNA, 556 bp, Homo sapiens
aagaataaccccaggaagtaccttcgcaattccaaccctcctgtgcagggagaagtgatggagggtgctgacaaccagggtgcaggagaacaaggtagaccagtgaggcagaatatgtatcggggatatagaccacgattccgcagaggccctcctctccaaagacagcctagagaggacggcaatgaagaagataaagaaaatcaaggagatgagacccaaggtcagcagccacctcaacgtcggtaccgccgcaacttcaattaccgacgccgacgcccagaaaaccctaaaccacaagatggcaaagagacaaaagcagccaatccaccagctgagaattcgtccgctcccgaggctgagcagggcggggcttgagtaaatgccggcttaccatctctaccatcatccggtttagtcatccaacaagaagaaataatgaaattccagcaataagaaatgaacaaaagattgatctgcattatctatgcagcatggggtttttattatttttacctaaagacgtctctttttggtaataacaaacgtgtttttt

SEQ ID NO: 4034 - DNA, 781 bp, Homo sapiens
cgggagcggagagcggaccccagagagccctgagcagccccaccgccgccgccggcctagttaccgtcacaccccgggaggagccgcagctgccgcagccggccgcagtcaccatcaccgcaaccatgagcagcgaggccgagacccagcagcgcggcgcctgccggcgggcacaaaaaggtcatcgcaacgaaggttttgggaacggtaaaatggttcaatgtaaggaacggatatggtttcatccacaggaacgacaccaaggaagatgtatttgtacaccacactgccatgaagaagaataaccccaggaagtaccttcgcagtgtaggagatggagagactgtggagtttgatgttgttgaaggagaaaagggtgcgaaggcagcaaatgttacaggtcctggtggtgttccagttcaaggcagtaaatatgcagcagaccgtaaccattatagacgctatccacgtcctaggggtcctccacgcaattaccagcaaaattaccagaatagtgagagtggggaaaagaacgagggatcggagagtgctcccgaaggccaggcccaacaacgccggccctaccgcaggcgaaggttcccaccttactacatgcggagaccctatgggcgtcgaccacagtattccaaccctcctgtgcagggagaagtgatggagggtgctgacaaccagggtgcaggagaacaaggtagaccagtgaggcagaatatgtatcggggatatagaccacgattccgcagaggccctcctctccaaagac

SEQ ID NO: 4035 - DNA, 1479 bp, Homo sapiens
gcgaggcgcggggaaggcgcacctggggtggccctggcgtgcgggcggcgacatggaggacggcgtgctcaaggagggcttcctggtcaagaggggccacattgtccacaactggaaggcgcgatggttcatccttcggcagaacacgctggtgtactacaagcttgaggggggtcggagagtgacccctcccaagggccggatcctcctggatggctgcaccatcacctgcccctgcctggagtatgaaaaccgaccgctcctcattaagctgaagactcaaacatccacggagtacttcctggaggcctgttctcgagaggagcgggatgcctgggcctttgagatcaccggggctattcatgcagggcagccggggaaggtccagcagctgcacagcctgagaaactccttcaagctgcccccgcacatcagcctgcatcgcattgtggacaagatgcacgatagcaacaccggaatccgttcaagccccaacatggagcagggaagcacctataaaaagaccttcctcggctcctccctggtggactggctcatctccaacagcttcacggccagccgtctggaggcggtgaccctggcctccatgctcatggaggagaacttcctcaggcctgtgggtgtccgaagcatgggagccattcgctctggggatctggccgagcagttcctggatgactccacagccctgtacacttttgctgagagctacaaaaagaagataagccccaaggaagaaattagcctgagcactgtggagttaagtggcacggtggtgaaacaaggctacctggccaagcagggacacaagaggaaaaactggaaggtgcgtcgctttgttctaaggaaggatccagctttcctgcattactatgacccttccaaagaagagaacaggccagtgggtgggttttctcttcgtggttcactcgtgtctgctctggaagataatggcgttcccactggggttaaagggaatgtccagggaaacctcttcaaagtgattactaaggatgacacacactattacattcaggccagcagcaaggctgagcgagccgagtggattgaagctatcaaaaagctaacatgacaaggacctgagggaaccaggattcctccctcctaccagatgacacagacaagagttcctggagaatgggagtgttaagacttttgacttctttgtaagttttgtactgctttggagagtgaatgctgccaagagttcctcagattacaaacagcagtggtgccatttccttccccatcttcatgttacaaacctggaaaggctagaacagccattaggcgtcagcatcttgacttttccccagcatcacaaacagccatttcctcgggcaccaaagtaggttccctttgttggaacaattacactggccatgccataatgttgaataaaactctcttcttatgagaaaaaaaaaaaaaaaaaaa

SEQ ID NO: 4036 - protein, 353 aa, Homo sapiens
MEDGVLKEGFLVKRGHIVHNWKARWFILRQNTLVYYKLEGGRRVTPPKGRILLDGCTITCPCLEYENRPLLIKLKTQTSTEYFLEACSREERDAWAFEITGAIHAGQPGKVQQLHSLRNSFKLPPHISLHRIVDKMHDSNTGIRSSPNMEQGSTYKKTFLGSSLVDWLISNSFTASRLEAVTLASMLMEENFLRPVGVRSMGAIRSGDLAEQFLDDSTALYTFAESYKKKISPKEEISLSTVELSGTVVKQGYLAKQGHKRKNWKVRRFVLRKDPAFLHYYDPSKEENRPVGGFSLRGSLVSALEDNGVPTGVKGNVQGNLFKVITKDDTHYYIQASSKAERAEWIEAIKKLT

SEQ ID NO: 4037 - DNA, 2538 bp, Homo sapiens
gctggagcatcccgctctggtgccgctgcagccggcagagatggttgagctcatgttcccgctgttgctcctccttctgcccttccttctgtatatggctgcgccccaaatcaggaaaatgctgtccagtggggtgtgtacatcaactgttcagcttcctgggaaagtagttgtggtcacaggagctaatacaggtatcgggaaggagacagccaaagagctggctcagagaggagctcgagtatatttagcttgccgggatgtggaaaagggggaattggtggccaaagagatccagaccacgacagggaaccagcaggtgttggtgcggaaactggacctgtctgatactaagtctattcgagcttttgctaagggcttcttagctgaggaaaagcacctccacgttttgatcaacaatgcaggagtgatgatgtgtccgtactcgaagacagcagatggctttgagatgcacataggagtcaaccacttgggtcacttcctcctaacccatctgctgctagagaaactaaaggaatcagccccatcaaggatagtaaatgtgtcttccctcgcacatcacctgggaaggatccacttccataacctgcagggcgagaaattctacaatgcaggcctggcctactgtcacagcaagctagccaacatcctcttcacccaggaactggcccggagactaaaaggctctggcgttacgacgtattctgtacaccctggcacagtccaatctgaactggttcggcactcatctttcatgagatggatgtggtggcttttctcctttttcatcaagactcctcagcagggagcccagaccagcctgcactgtgccttaacagaaggtcttgagattctaagtgggaatcatttcagtgactgtcatgtggcatgggtgtctgtccaagctcgtaatgagactatagcaaggcggctgtgggacgtcagttgtgacctgctgggcctcccaatagactaacaggcagtgccagttggacccaagagaagactgcagcagactacacagtacttcttgtcaaaatgattctccttcaaggttttcaaaacctttagcacaaagagagcaaaaccttccagccttgcctgcttggtgtccagttaaaactcagtgtactgccagattcgtctaaatgtctgtcatgtccagatttactttgcttctgttactgccagagttactagagatatcataataggataagaagaccctcatatgacctgcacagctcattttccttctgaaagaaactactacctaggagaatctaagctatagcagggatgatttatgcaaatttgaactagcttctttgttcacaattcagttcctcccaaccaaccagtcttcacttcaagagggccacactgcaacctcagcttaacatgaataacaaagactggctcaggagcagggcttgcccaggcatggtggatcaccggaggtcagtagttcaagaccagcctggccaacatggtgaaaccccacctctactaaaaattgtgtatatctttgtgtgtcttcctgtttatgtgtgccaagggagtattttcacaaagttcaaaacagccacaataatcagagatggagcaaaccagtgccatccagtctttatgcaaatgaaatgctgcaaagggaagcagattctgtatatgttggtaactacccaccaagagcacatgggtagcagggaagaagtaaaaaaagagaaggagaatactggaagataatgcacaaaatgaagggactagttaaggattaactagccctttaaggattaactagttaaggattaatagcaaaagatattaaatatgctaacatagctatggaggaattgagggcaagcacccaggactgatgaggtcttaacaaaaaccagtgtggcaaaaaaaaaaaaaaaaaaaaaaaaaaaaaatcctaaaaacaaacaaacaaaaaaaacaattcttcattcagaaaaattatcttagggactgatattggtaattatggtcaatttaataatattttggggcatttccttacattgtcttgacaagattaaaatgtctgtgccaaaattttgtattttatttggagacttcttatcaaaagtaatgctgccaaaggaagtctaaggaattagtagtgttcccatcacttgtttggagtgtgctattctaaaagattttgatttcctggaatgacaattatattttaactttggtgggggaaagagttataggaccacagtcttcacttctgatacttgtaaattaatcttttattgcacttgttttgaccattaagctatatgtttagaaatggtcattttacggaaaaattagaaaaattctgataatagtgcagaataaatgaattaatgttttacttaatttatattgaactgtcaatgacaaataaaaattctttttgattattttttgttttcatttaccagaataaaaactaagaattaaaagtttgattacagtcaaaaaaaaaaaaaaaaaaaaaaa

SEQ ID NO: 4038 - protein, 318 aa, Homo sapiens
MVELMFPLLLLLLPFLLYMAAPQIRKMLSSGVCTSTVQLPGKVVVVTGANTGIGKETAKELAQRGARVYLACRDVEKGELVAKEIQTTTGNQQVLVRKLDLSDTKSIRAFAKGFLAEEKHLHVLINNAGVMMCPYSKTADGFEMHIGVNHLGHFLLTHLLLEKLKESAPSRIVNVSSLAHHLGRIHFHNLQGEKFYNAGLAYCHSKLANILFTQELARRLKGSGVTTYSVHPGTVQSELVRHSSFMRWMWWLFSFFIKTPQQGAQTSLHCALTEGLEILSGNHFSDCHVAWVSVQARNETIARRLWDVSCDLLGLPID

SEQ ID NO: 4039 - DNA, 2100 bp, Homo sapiens
gaagccatagtcggcgagcaacgctggagcatcccgctctggtgccgctgcagccggcagagatggttgagctcatgttcccgctgttgctcctccttctgcccttccttctgtatatggctgcgccccaaatcaggtctgtgcaaatgtattgccttctcttgagaattcttgttgcggggcgggagggaaacatagaatccccaccaaagctttcttggaaaactcccctgggggggctccaagatggcggagcccagagttcggtgggttggaggcgaggtccagctgtcctgggtgccaggaggacacccgagaccccaggcggtgagaaagggcggcagtccggggcacactgcttttccctggcctgtttttcttttgtctaagcaccccctgattctggctccagggaatcccgagggtaaggctacctcaaacgcttgagtttcggactcttcaatgggatatggcccgacgctgttttccccttattccccacgccttaaaccagccttcgaggtacaaaggagcgattccacatttcgccctctgaaactgatagcaatcgtaacatctgcggccccatccttgctctctcgttgctgttacaatcgcttgttctgtgggcggatgttgtaaaggagaaaagtgaaaaggaagagtgtttggttatgagctctatcctgccttgcgagcaggagcacgggggatctgagttaggagctagggtactggggcggtgagggctgggagaatggtgggaaggtattgaccaggtgatagatcaatcagcccaaggctggccaagtgccccagtgaatcagcagcgggctgtaaaaccggcagcctgcttattggttctaagtaaatcaccagtggtgacggaccagtgactgaatagacagacacactccttccccaggtgggcggtcttagtcccaatagaacttgaagccaggccagatcacagtcatttcttaccacagtcacctactttccttcttttatttttattttctcttccttctctggtgcccctcttccagttatattttttctgccttctgaacactcagttctcccacctctaggcacacatggtttctcacactcagatgaaaacactgctttttatctttttttcactacaagatcctcttatccacatagaatctcaatgaaaagttgaaccagaactgaaaatagtgctcataccccagagggatttttctggaaaaaaaaaaaatatatgtgtgtatatatatatatatatgtgtgtgtgtgtatatatatatatgtgtgtgtgtgtgtatatatatatatatatatattccaggagctgtattcccaactcagcagggttatgggagtcgggccagagctggacttttatagttgtctctttcattcctgctggttaaggagaagaaagaactaagtacaggtcctactaagttgtcactcctggagctacatacagtaaggggatgtgggaaacagcctagaggcttgttttctgaggagggaggtgatggtttgtggggaccatgagttaatctgcctccctgtcagcattttcgcactatgcaggtagcttcaatggctaagagtatgtaccttgcaattccaagttcaatgaaaaaggctgaaatgctctttaagaatgcatctcctggtcaacagattgttttaaccagagtcccaacattgccaagaagagaataggccagtctgagaaccaccaatctgtgtttgtgcattcattcatttggaaaaggcaatatagtatagtacttagaaacaagcactctaggctgggcttggtgactcacacctgtaatcccagcactttgggaggctgaggtgggcggatcacctgaggtcaggagttcgagaccatcctggccagcgtggtgaaaccctgtctctactaaaaatacaaaaattagctgggcgtggtggcgcatgggtgagggggtgagggatgagaatcgcttgaacctgggagatgggggttgcagtggaggtggaggttgcagtgagccgagatcacaccattgcactccagcctgggcaacaagagcaaaactctgtctc

SEQ ID NO: 4040 - DNA, 3398 bp, Homo sapiens
cgctgtcgccgccagtagcagccttcgccagcagcgccgcggcggaaccgggcgcaggggagcgagcccggccccgccagcccagcccagcccagccctactccctccccacgccagggcagcagccgttgctcagagagaaggtggaggaagaaatccagaccctagcacgcgcgcaccatcatggaccattatgattctcagcaaaccaacgattacatgcagccagaagaggactgggaccgggacctgctcctggacccggcctgggagaagcagcagagaaagacattcacggcatggtgtaactcccacctccggaaggcggggacacagatcgagaacatcgaagaggacttccgggatggcctgaagctcatgctgctgctggaggtcatctcaggtgaacgcttggccaagccagagcgaggcaagatgagagtgcacaagatctccaacgtcaacaaggccctggatttcatagccagcaaaggcgtcaaactggtgtccatcggagccgaagaaatcgtggatgggaatgtgaagatgaccctgggcatgatctggaccatcatcctgcgctttgccatccaggacatctccgtggaagagacttcagccaaggaagggctgctcctgtggtgtcagagaaagacagccccttacaaaaatgtcaacatccagaacttccacataagctggaaggatggcctcggcttctgtgctttgatccaccgacaccggcccgagctgattgactacgggaagctgcggaaggatgatccactcacaaatctgaatacggcttttgacgtggcagagaagtacctggacatccccaagatgctggatgccgaagacatcgttggaactgcccgaccggatgagaaagccatcatgacttacgtgtctagcttctaccacgccttctctggagcccagaaggcggagacagcagccaatcgcatctgcaaggtgttggccgtcaaccaggagaacgagcagcttatggaagactacgagaagctggccagtgatctgttggagtggatccgccgcacaatcccgtggctggagaaccgggtgcccgagaacaccatgcatgccatgcaacagaagctggaggacttccgggactaccggcgcctgcacaagccgcccaaggtgcaggagaagtgccagctggagatcaacttcaacacgctgcagaccaagctgcggctcagcaaccggcctgccttcatgccctctgagggcaggatggtctcggacatcaacaatgcctggggctgcctggagcaggtggagaagggctatgaggagtggttgctgaatgagatccggaggctggagcgactggaccacctggcagagaagttccggcagaaggcctccatccacgaggcctggactgacggcaaagaggccatgctgcgacagaaggactatgagaccgccaccctctcggagatcaaggccctgctcaagaagcatgaggccttcgagagtgacctggctgcccaccaggaccgtgtggagcagattgccgccatcgcacaggagctcaatgagctggactattatgactcacccagtgtcaacgcccgttgccaaaagatctgtgaccagtgggacaatctgggggccctaactcagaagcgaagggaagctctggagcggaccgagaaactgctggagaccattgaccagctgtacttggagtatgccaagcgggctgcacccttcaacaactggatggagggggccatggaggacctgcaggacaccttcattgtgcacaccattgaggagatccagggactgaccacagcccatgagcagttcaaggccaccctccctgatgccgacaaggagcgcctggccatcctgggcatccacaatgaggtgtccaagattgtccagacctaccacgtcaatatggcgggcaccaacccctacacaaccatcacgcctcaggagatcaatggcaaatgggaccacgtgcggcagctggtgcctcggagggaccaagctctgacggaggagcatgcccgacagcagcacaatgagaggctacgcaagcagtttggagcccaggccaatgtcatcgggccctggatccagaccaagatggaggagatcgggaggatctccattgagatgcatgggaccctggaggaccagctcagccacctgcggcagtatgagaagagcatcgtcaactacaagccaaagattgatcagctggagggcgaccaccagctcatccaggaggcgctcatcttcgacaacaagcacaccaactacaccatggagcacatccgtgtgggctgggagcagctgctcaccaccatcgccaggaccatcaatgaggtagagaaccagatcctgacccgggatgccaagggcatcagccaggagcagatgaatgagttccgggcctccttcaaccactttgaccgggatcactccggcacactgggtcccgaggagttcaaagcctgcctcatcagcttgggttatgatattggcaacgacccccagggagaagcagaatttgcccgcatcatgagcattgtggaccccaaccgcctgggggtagtgacattccaggccttcattgacttcatgtcccgcgagacagccgacacagatacagcagaccaagtcatggcttccttcaagatcctggctggggacaagaactacattaccatggacgagctgcgccgcgagctgccacccgaccaggctgagtactgcatcgcgcggatggccccctacaccggccccgactccgtgccaggtgctctggactacatgtccttctccacggcgctgtacggcgagagtgacctctaatccaccccgcccggccgccctcgtcttgtgcgccgtgccctgccttgcacctccgccgtcgcccatctcctgcctgggttcggtttcagctcccagcctccacccgggtgagctggggcccacgtggcatcgatcctccctgcccgcgaagtgacagtttacaaaattattttctgcaaaaaagaaaaaaaagttacgttaaaaaccaaaaaactacatattttattatagaaaaagtattttttctccaccagacaaatggaaaaaaagaggaaagattaactatttgcaccgaaatgtcttgttttgttgcgacataggaaaataaccaagcacaaagttatattccatcctttttactgatttttttttcttctatctgttccatctgctgtattcatttctccaatctcatgtccattttggtgtgggagtcggggtagggggtactcttgtcaaaaggcacattggtgcgtgtgtgtttgctagctcacttgtccatgaaaatattttatgatattaaagaaaatcttttg

SEQ ID NO: 4041 - protein, 892 aa, Homo sapiens
MDHYDSQQTNDYMQPEEDWDRDLLLDPAWEKQQRKTFTAWCNSHLRKAGTQIENIEEDFRDGLKLMLLLEVISGERLAKPERGKMRVHKISNVNKALDFIASKGVKLVSIGAEEIVDGNVKMTLGMIWTIILRFAIQDISVEETSAKEGLLLWCQRKTAPYKNVNIQNFHISWKDGLGFCALIHRHRPELIDYGKLRKDDPLTNLNTAFDVAEKYLDIPKMLDAEDIVGTARPDEKAIMTYVSSFYHAFSGAQKAETAANRICKVLAVNQENEQLMEDYEKLASDLLEWIRRTIPWLENRVPENTMHAMQQKLEDFRDYRRLHKPPKVQEKCQLEINFNTLQTKLRLSNRPAFMPSEGRMVSDINNAWGCLEQVEKGYEEWLLNEIRRLERLDHLAEKFRQKASIHEAWTDGKEAMLRQKDYETATLSEIKALLKKHEAFESDLAAHQDRVEQIAAIAQELNELDYYDSPSVNARCQKICDQWDNLGALTQKRREALERTEKLLETIDQLYLEYAKRAAPFNNWMEGAMEDLQDTFIVHTIEEIQGLTTAHEQFKATLPDADKERLAILGIHNEVSKIVQTYHVNMAGTNPYTTITPQEINGKWDHVRQLVPRRDQALTEEHARQQHNERLRKQFGAQANVIGPWIQTKMEEIGRISIEMHGTLEDQLSHLRQYEKSIVNYKPKIDQLEGDHQLIQEALIFDNKHTNYTMEHIRVGWEQLLTTIARTINEVENQILTRDAKGISQEQMNEFRASFNHFDRDHSGTLGPEEFKACLISLGYDIGNDPQGEAEFARIMSIVDPNRLGVVTFQAFIDFMSRETADTDTADQVMASFKILAGDKNYITMDELRRELPPDQAEYCIARMAPYTGPDSVPGALDYMSFSTALYGESDL

SEQ ID NO: 4042 - DNA, 2669 bp, Homo sapiens
gcctgctgccgcctgggccccgccgagcggagctagcgccgcgcgcagagcacacgctcgcgctccagctcccctcctgcgcggttcatgactgtgtcccctgaccgcagcctctgcgagcccccgccgcaggaccacggcccgctccccgccgccgcgagggccccgagcgaaggaaggaagggaggcgcgctgtgcgccccgcggagcccgcgaaccccgctcgctgccggctgcccagcctggctggcaccatgctgcccgcgcgctgcgcccgcctgctcacgccccacttgctgctggtgttggtgcagctgtcccctgctcgcggccaccgcaccacaggccccaggtttctaataagtgaccgtgacccacagtgcaacctccactgctccaggactcaacccaaacccatctgtgcctctgatggcaggtcctacgagtccatgtgtgagtaccagcgagccaagtgccgagacccgaccctgggcgtggtgcatcgaggtagatgcaaagatgctggccagagcaagtgtcgcctggagcgggctcaagccctggagcaagccaagaagcctcaggaagctgtgtttgtcccagagtgtggcgaggatggctcctttacccaggtgcagtgccatacttacactgggtactgctggtgtgtcaccccggatgggaagcccatcagtggctcttctgtgcagaataaaactcctgtatgttcaggttcagtcaccgacaagcccttgagccagggtaactcaggaaggaaagatgacgggtctaagccgacacccacgatggagacccagccggtgttcgatggagatgaaatcacagccccaactctatggattaaacacttggtgatcaaggactccaaactgaacaacaccaacataagaaattcagagaaagtctattcgtgtgaccaggagaggcagagtgccctggaagaggcccagcagaatccccgtgagggtattgtcatccctgaatgtgcccctgggggactctataagccagtgcaatgccaccagtccactggctactgctggtgtgtgctggtggacacagggcgcccgctgcctgggacctccacacgctacgtgatgcccagttgtgagagcgacgccagggccaagactacagaggcggatgaccccttcaaggacagggagctaccaggctgtccagaagggaagaaaatggagtttatcaccagcctactggatgctctcaccactgacatggttcaggccattaactcagcagcgcccactggaggtgggaggttctcagagccagaccccagccacaccctggaggagcgggtagtgcactggtatttcagccagctggacagcaatagcagcaacgacattaacaagcgggagatgaagcccttcaagcgctacgtgaagaagaaagccaagcccaagaaatgtgcccggcgtttcaccgactactgtgacctgaacaaagacaaggtcatttcactgcctgagctgaagggctgcctgggtgttagcaaagaaggacgcctcgtctaaggagcagaaaacccaagggcaggtggagagtccagggaggcaggatggatcaccagacacctaaccttcagcgttgcccatggccctgccacatcccgtgtaacataagtggtgcccaccatgtttgcacttttaataactcttacttgcgtgttttgtttttggtttcattttaaaacaccaatatctaataccacagtgggaaaaggaaagggaagaaagactttattctctctcttattgtaagtttttggatctgctactgacaacttttagagggttttgggggggtgggggagggtgttgttggggcctgagaagaaagagatttatatgctgtatataaatatatatgtaaattgtatagttcttttgtacaggcattggcattgctgtttgtttatttctctccctctgcctgctgtgggtggtgggcactctggacacatagtccagctttctaaaatccaggactctatcctgggcctactaaacttctgtttggagactgacccttgtgtataaagacgggagtcctgcaattgtactgcggactccacgagttcttttctggtgggaggactatattgccccatgccattagttgtcaaaattgataagtcacttggctctcggccttgtccagggaggttgggctaaggagagatggaaactgccctgggagaggaagggagtccagatcccatgaatagcccacacaggtaccggctctcagagggtccgtgcattcctgctctccggacccccaaagggcccagcattggtgggtgcaccagtatcttagtgaccctcggagcaaattatccacaaaggatttgcattacgtcactcgaaacgttttcatccatgcttagcatctactctgtataacgcatgagaggggaggcaaagaagaaaaggacacacggaagggcctttaaaaaagtagatatttaatatctaagcaggggaggggacaggacagaaagcctgcactgaggggtgcggtgccaacagggaaactcttcacctccctgcaaacctaccagtgaggctcccagagacgcagctgtctcagtgcccaggggcagattgggtgtgacctctcca

SEQ ID NO: 4043 - protein, 434 aa, Homo sapiens
MLPARCARLLTPHLLLVLVQLSPARGHRTTGPRFLISDRDPQCNLHCSRTQPKPICASDGRSYESMCEYQRAKCRDPTLGVVHRGRCKDAGQSKCRLERAQALEQAKKPQEAVFVPECGEDGSFTQVQCHTYTGYCWCVTPDGKPISGSSVQNKTPVCSGSVTDKPLSQGNSGRKDDGSKPTPTMETQPVFDGDEITAPTLWIKHLVIKDSKLNNTNIRNSEKVYSCDQERQSALEEAQQNPREGIVIPECAPGGLYKPVQCHQSTGYCWCVLVDTGRPLPGTSTRYVMPSCESDARAKTTEADDPFKDRELPGCPEGKKMEFITSLLDALTTDMVQAINSAAPTGGGRFSEPDPSHTLEERVVHWYFSQLDSNSSNDINKREMKPFKRYVKKKAKPKKCARRFTDYCDLNKDKVISLPELKGCLGVSKEGRLV

SEQ ID NO: 4044 - DNA, 803 bp, Homo sapiens
aagatgccgaaaggaaagaaggccaagggaaagaaggtggctccggccccagctgtcgtgaagaagcaggaggctaagaaagtggtgaatcccctgtttgagaaaaggcctaagaattttggcattggacaggacatccagcccaaaagagacctcacccgctttgtgaaatggccccgctatatcaggttgcagcggcagagagccatcctctataagcggctgaaagtgcctcctgcgattaaccagttcacccaggccctggaccgccaaacagctactcagctgcttaagctggcccacaagtacaggccagagacaaagcaagagaagaagcagagactgttggcccgggccgagaagaaagctgctggcaaaggggacgtcccgaagaagagaccacctgtccttcgagcaggagttaacactgtcaccaccttggtggagaacaagaaagctcagctggtggtgatttcacacgacatggatcccatcgagggggaaggcaagactgggacgtctagtccacaggaagacctgcaccactgtcgccttcacacaggtgaactcagaagacaaaggcgctttggctaagctggtggaagctatcaggaccaattacaatgacagatacgatgagatccgccgtcactggggtggcaatgtcctgggtcctaagtctgtggctcgtatcgccaagcgcaaaaaggcaaaggctaaagaacttgccactaaactgggttaaatgtacactgttgagttttctgtacataaaaataattaaaataatacaaattttcctt

SEQ ID NO: 4045 - DNA, 2764 bp, Homo sapiens
tgggacaggcagctccggggtccgcggtttcacatcggaaacaaaacagcggctggtctggaaggaacctgagctacgagccgcggcggcagcggggcggcggggaagcgtatacctaatctgggagcctgcaagtgacaacagcctttgcggtccttagacagcttggcctggaggagaacacatgaaagaaagaacctcaagaggctttgttttctgtgaaacagtatttctatacagttgctccaatgacagagttacctgcaccgttgtcctacttccagaatgcacagatgtctgaggacaaccacctgagcaatactgtacgtagccagaatgacaatagagaacggcaggagcacaacgacagacggagccttggccaccctgagccattatctaatggacgaccccagggtaactcccggcaggtggtggagcaagatgaggaagaagatgaggagctgacattgaaatatggcgccaagcatgtgatcatgctctttgtccctgtgactctctgcatggtggtggtcgtggctaccattaagtcagtcagcttttatacccggaaggatgggcagctaatctataccccattcacagaagataccgagactgtgggccagagagccctgcactcaattctgaatgctgccatcatgatcagtgtcattgttgtcatgactatcctcctggtggttctgtataaatacaggtgctataaggtcatccatgcctggcttattatatcatctctattgttgctgttctttttttcattcatttacttgggggaagtgtttaaaacctataacgttgctgtggactacattactgttgcactcctgatctggaattttggtgtggtgggaatgatttccattcactggaaaggtccacttcgactccagcaggcatatctcattatgattagtgccctcatggccctggtgtttatcaagtacctccctgaatggactgcgtggctcatcttggctgtgatttcagtatatgatttagtggctgttttgtgtccgaaaggtccacttcgtatgctggttgaaacagctcaggagagaaatgaaacgctttttccagctctcatttactcctcaacaatggtgtggttggtgaatatggcagaaggagacccggaagctcaaaggagagtatccaaaaattccaagtataatgcagaaagcacagaaagggagtcacaagacactgttgcagagaatgatgatggcgggttcagtgaggaatgggaagcccagagggacagtcatctagggcctcatcgctctacacctgagtcacgagctgctgtccaggaactttccagcagtatcctcgctggtgaagacccagaggaaaggggagtaaaacttggattgggagatttcattttctacagtgttctggttggtaaagcctcagcaacagccagtggagactggaacacaaccatagcctgtttcgtagccatattaattggtttgtgccttacattattactccttgccattttcaagaaagcattgccagctcttccaatctccatcacctttgggcttgttttctactttgccacagattatcttgtacagccttttatggaccaattagcattccatcaattttatatctagcatatttgcggttagaatcccatggatgtttcttctttgactataacaaaatctggggaggacaaaggtgattttcctgtgtccacatctaacaaagtcaagattcccggctggacttttgcagcttccttccaagtcttcctgaccaccttgcactattggactttggaaggaggtgcctatagaaaacgattttgaacatacttcatcgcagtggactgtgtccctcggtgcagaaactaccagatttgagggacgaggtcaaggagatatgataggcccggaagttgctgtgccccatcagcagcttgacgcgtggtcacaggacgatttcactgacactgcgaactctcaggactaccgttaccaagaggttaggtgaagtggtttaaaccaaacggaactcttcatcttaaactacacgttgaaaatcaacccaataattctgtattaactgaattctgaacttttcaggaggtactgtgaggaagagcaggcaccagcagcagaatggggaatggagaggtgggcaggggttccagcttccctttgattttttgctgcagactcatcctttttaaatgagacttgttttcccctctctttgagtcaagtcaaatatgtagattgcctttggcaattcttcttctcaagcactgacactcattaccgtctgtgattgccatttcttcccaaggccagtctgaacctgaggttgctttatcctaaaagttttaacctcaggttccaaattcagtaaattttggaaacagtacagctatttctcatcaattctctatcatgttgaagtcaaatttggattttccaccaaattctgaatttgtagacatacttgtacgctcacttgccccagatgcctcctctgtcctcattcttctctcccacacaagcagtctttttctacagccagtaaggcagctctgtcgtggtagcagatggtcccattattctagggtcttactctttgtatgatgaaaagaatgtgttatgaatcggtgctgtcagccctgctgtcagaccttcttccacagcaaatgagatgtatgcccaaagacggtagaattaaagaagagtaaaatggctgttgaagc

SEQ ID NO: 4046 - DNA, 1785 bp, Homo sapiens
ggcacgagggtagctttccaacataaagtggaggtttcaacacaggagactttaagcaagttccagtgtgtctatatttggtctggctgatcggctggactctggccttccccgctcacgttagcagacagctctgccctagtgggcgcttagcctgcgacggcagcccgagaggatgtctaacaagcttctttctccccacccccattcagttgttctcaggtctgaattcaaaatggcctcatctcctgctgtccttcgagcgtcccggctgtaccaatggagcctgaagagttcggcgcagttcctggggtctccacagctgaggcaggttggtcagatcattagggttcctgctcggatggcggcgacgctgatcctggagcctgcgggccgctgctgctgggacgaaccggtgcgaatcgccgtgcgcggcctagccccggagcagccggtcacgctgcgcgcgtccctgcgcgacgagaagggcgcgcttttccaggcccacgcgcgctaccgcgccgacactcttggcgagctggacctggagcgcgcgcccgcgctgggcggcagcttcgcggggcttgagcccatggggctgctctgggccttggagcccgagaaacctttggtgcggctggtgaagcgcgacgtgcgaacgcccttggccgtggagctggaggtgctggatggccacgaccccgaccccgggcggctgctgtgccagacgcggcacgagcgctacttcctcccgcccggggtgcggcgcgagccggtgcgcgtgggccgggtgcgaggcacgctcttcctgccgccagaacctgggccctttcctgggattgtggacatgttcggaactggaggtggcctgctggagtatcgggctagtctgctggctgggaagggttttgctgtgatggctctggcttattataactatgaagacctccccaagaccatggagacgctccatctggagtactttgaagaagccatgaactacttgctcagtcatcccgaggtaaaaggtccaggagttgggctgcttggaatttccaaagggggtgagctctgcctttccatggcctctttcctgaagggcatcacggctgctgtcgtcatcaacggctctgtggccaatgttgggggaaccttacgctacaagggcgagaccctgccccctgtgggcgtcaacagaaatcgcatcaaggtgaccaaagatggctatgcagacattgtggatgtcctgaacagccctttggaaggacctgaccagaagagcttcattcctgtggaaagggcagagagcaccttcctgttcctggtaggtcaggatgaccacaactggaagagtgagttctatgctaatgaggcctgtaaacgcttgcaggcccatgggaggagaaagccccagatcatctgttacccagagacagggcactatattgagcctccttacttccccctgtgtcgggcttccctgcatgccttggtgggcagtcctattatctggggaggggagcccagggctcatgtcatggctcaggtggatgcttggaaacaactccagactttcttccacaaacacttgggtggccacgaggggacaatcccatcaaaagtgtaaattttatttgatcatgtggcctctctgttgctaatctctcctggaaacatctgccacatttagtgtgtgtatgtgtattcattcttttgtttttaataactaaagttttttcccctcattattaaaatgaatttaccagtaaaaaaaaaaaaaaaaaa

SEQ ID NO: 4047 - protein, 483 aa, Homo sapiens
MSNKLLSPHPHSVVLRSEFKMASSPAVLRASRLYQWSLKSSAQFLGSPQLRQVGQIIRVPARMAATLILEPAGRCCWDEPVRIAVRGLAPEQPVTLRASLRDEKGALFQAHARYRADTLGELDLERAPALGGSFAGLEPMGLLWALEPEKPLVRLVKRDVRTPLAVELEVLDGHDPDPGRLLCQTRHERYFLPPGVRREPVRVGRVRGTLFLPPEPGPFPGIVDMFGTGGGLLEYRASLLAGKGFAVMALAYYNYEDLPKTMETLHLEYFEEAMNYLLSHPEVKGPGVGLLGISKGGELCLSMASFLKGITAAVVINGSVANVGGTLRYKGETLPPVGVNRNRIKVTKDGYADIVDVLNSPLEGPDQKSFIPVERAESTFLFLVGQDDHNWKSEFYANEACKRLQAHGRRKPQIICYPETGHYIEPPYFPLCRASLHALVGSPIIWGGEPRAHVMAQVDAWKQLQTFFHKHLGGHEGTIPSKV

SEQ ID NO: 4048 - DNA, 929 bp, Homo sapiens
ggcacgaggacaggtcgcctgactgggctcctccccgggcccgccccgacaggtttgtcttgtgaccgcgggcggccgctgcttctttcccgagcttggaacttcgttatccgcgatgcgtttcctggcagctacattcctgctcctggcgctcagcaccgctgcccaggccgaaccggtgcagttcaaggactgcggttctgtggatggagttataaaggaagtgaatgtgagcccatgccccacccaaccctgccagctgagcaaaggacagtcttacagcgtcaatgtcaccttcaccagcaatattcagtctaaaagcagcaaggccgtggtgcatggcatcctgatgggcgtcccagttccctttcccattcctgagcctgatggttgtaagagtggaattaactgccctatccaaaaagacaagacctatagctacctgaataaactaccagtgaaaagcgaatatccctctataaaactggtggtggagtggcaacttcaggatgacaaaaaccaaagtctcttctgctgggaaatcccagtacagatcgtttctcatctctaagtgcctcattgagttcggtgcatctggccaatgagtctgctgagactcttgacagcacctccagctctgctgcttcaacaacagtgacttgctctccaatggtatccagtgattcgttgaagaggaggtgctctgtagcagaaactgagctccgggtggctggttctcagtggttgtctcatgtctctttttctgtcttaggtggtttcattaaatgcagcacttggttagcagatgtttaattttttttttaacaacattaacttgtggcctctttctacacctggaaatttactcttgaataaataaaaactcgtttgtcttgtcaaaaaaaaaaaaaaaaaaaaaaaaaaaaaaa

SEQ ID NO: 4049 - protein, 151 aa, Homo sapiens
MRFLAATFLLLALSTAAQAEPVQFKDCGSVDGVIKEVNVSPCPTQPCQLSKGQSYSVNVTFTSNIQSKSSKAVVHGILMGVPVPFPIPEPDGCKSGINCPIQKDKTYSYLNKLPVKSEYPSIKLVVEWQLQDDKNQSLFCWEIPVQIVSHL

SEQ ID NO: 4050 - DNA, 5208 bp, Homo sapiens
gctacacctcctccaggaatacctccccctggagttccacaagggatacctcctcagttaacagcagccccagttccaccagcctccagttcacagagctcgcaagttccagagaaacctagaccagcactgcttcctactcctgtgtcttttggttctgccccaccgacaacttaccatcctccgttgcaatcagctggtccatcagaacaagtgaattcaaaagctcctttgagcaagtctgctctgccatacagttcattctcatctgatcaaggacttggggagtcttcagctgctccatctcagccaatcactgcagtgaaggacatgccagtgagatcaggtggcctgcttccagatcctcctagaagtagttacttggaaagtccaagaggcccaagatttgatggtcctcgaagatttgaggatttagggtcaaggtgtgaaggaccgagacccaaagggcctcgttttgaaggaaatcgccccgatgggccaagacccagatatgaaggtcacccagcagagggcactaaaagcaagtggggaatgattccccgggggccagcatctcaattttatattacccccagtacatccctaagtcctcgacagagtggaccacagtggaaaggccccaaaccagcttttggacagcagcatcagcagcaacctaagtcacaagcagaacctctttcaggaaacaaagaaccattagcagacaccagtagtaaccagcagaagaattttaaaatgcaatcagctgcattttccattgctgcagatgtaaaggatgtcaaggcggctcagtcaaatgagaatctaagcgactctcaacaagagccacctaaaagtgaagtctcggaagggcccgtagagccctctaattgggaccagaatgttcaaagtatggagactcaaatcgacaaagcccaagctgttactcagcctgtaccccttgcgaataagcctgtacctgctcaatctacttttccttcaaaaacaggggggatggagggaggaacagcagtagcaacatcatcattaacagcagataatgattttaaacctgtgggtattggtctaccccattcagaaaacaaccaagataaaggcctgcctcggccagataatagagataatagattagaaggcaatagaggcaacagctcatcttacagaggtcctgggcaaagcagaatggaagacacacgggataaaggtctagtaaacagaggtcgcggccaggcaatcagtcgaggcccaggattggtcaagcaagaagactttcgggataagatgatgggtagaagagaagatagtcgagagaagatgaacagaggagaaggtagccgggacagagggttggtgaggcctggaagcagtcgggagaaagtgccaggtggtcttcaagggagccaggacaggggtgcagctggcagccgagaaaggggaccacctcggagggctggcagtcaggagaggggacctcttcgaagggctgggagtagagagagaataccaccccgaagagctgggagcagggagagaggaccacctcgagggcctggcagtcgagaaaggggactgggaagatcagattttggtcgtgatagaggtccattcagaccagaaccaggagatggtggggaaaaaatgtatccatatcaccgggatgagcctcctagggctccatggaaccatggagaagagcgagggcatgaagagtttccattagatggtagaaatgctccaatggaacgagaaagactcgatgactgggatagagagagatactggagagaatgtgaacgtgactatcaagatgatacactagagctctataacagagaggacaggttctcagcaccaccatctcggtctcatgatggagataggcgaggcccttggtgggatgattgggagagagaccaggatatggatgaggactacaatagggaaatggaaagggacatggacagggatgtggatcggatttcaagacctatggatatgtatgatagaagtttggataatgagtgggacagagattatgggagaccactggatgaacaagaatcacagtttcgtgaacgggatattccatctcttccacctttaccgcccctcccacctcttccacctttggatagatatcgggatgatagatggagagaagaaagaaatcgagagcatgggtatgatcgagatttccgtgataggggtgagttgaggattcgagagtatccagaaagaggagatacatggcgggaaaagcgagattatgttcctgacagaatggactgggaaagagaacggttgtcagacagatggtacccatctgatgtggatagacattcccccatggcggaacatatgccctcctcacatcattcctcagaaatgatggggtccgatgcaagcttagactctgaccaaggccttggaggggtaatggttctcagtcagaggcagcatgaaatcattttgaaagctgcacaagaactgaaaatgcttcgggaacagaaagaacagcttcaaaagatgaaagacttcgggtctgagccacagatggctgaccatctaccacctcaggaatcaagattgcagaatacatcttcaagacctggaatgtatccgcctccagggtcgtatagacctccccctcctatgggcaaaccaccaggttcaattgtaagaccctctgctccaccagcaagatcatctgttcctgtgaccaggccacctgtcccaataccaccacctccacctcctccacctctacctcctcctcctccagtgataaagccacaaacttcagctgtagaacaggaacgatgggatgaagattctttctatgggctctgggatacaaatgatgaacaaggactgaattcagaatttaagtcagaaactgcagcaattccatctgctccagtattaccacccccacctgttcactcttccattccccctcctggcccagtgcctatgggtatgccaccaatgtccaagccaccaccagtacaacagactgttgattatggccatggccgagatatatccactaataaagttgaacagataccttatggagaaagaataactctacgcccagatccactacctgaaagatcaacttttgagacagagcatgcaggccaacgtgatcgttatgatagagaaagagatcgtgagccttattttgatcgtcaaagtaatgtcatagcagatcatcgagattttaaaagggatcgtgagacacatagagatcgagaccgggatcgtggtgttattgactatgaccgggatcgatttgacagagaacgccgaccccgagatgatagagctcagtcatatcgagacaaaaaagaccattcctcatccagaagagggggttttgataggccatcctatgaccggaagtctgaccgaccagtctatgaaggaccatccatgtttggaggagaacgaaggacttatcctgaggagcgaatgcctctgccagctccttcactgagccaccagcctcctccagctccacgagtcgagaagaagcctgaatcaaagaatgtggacgatattttgaaaccaccgggccgggagagcagacctgagagaattgttgttataatgagaggattacctggcagtggaaagacacatgttgcaaaacttattcgagataaggaggtagaatttggaggacctgcacccagagttctaagcctggatgattacttcatcactgaagtggaaaaagaagaaaaagatccagattctggaaagaaagtgaaaaagaaggtaatggaatatgaatatgaagctgagatggaggagacttaccgcaccagcatgttcaaaactttcaaaaagactctggatgatggcttttttcccttcatcatcctggatgccatcaatgacagagttaggcattttgaccagttttggagtgcagcaaaaaccaagggatttgaggtatatttggctgaaatgagtgcagataaccagacttgtggcaagagaaatattcatggaagaaagcttaaagaaataaataagatggctgatcactgggaaactgcacctcgtcacatgatgcgtctagatattcgttctttgctgcaagatgctgctattgaagaggtagagatggaagattttgatgcaaatatcgaagaacagaaagaagaaaagaaagatgcagaggaagaggaaagcgaactggtaggagacagaccaaccactttgaacagtgtctctttattaaaattcttaaagaaggtttaaattcagatctgtggttagacaactactgttgatatacactttagtggtaaaagtttccataatcatcttcaaggagacttttggatactctttatttttccccagaccaaaagaaccctctaatgtggtgttaagagaaagttttaacagagtgctaagaaacttacccttgtactcatctatttgtgggtggttttaggggagtataccttttaagaaaatcaattacatatgaaagggcattcttacattccagcagatatgtggcacagcctacccaacatatgcataattgtctcttctttgctacaagatctccaaatttgagtttctgtcaacagaggcagaagaacttattgaatggggaggcagagggttgccactggctgctagatttgttcttctgcattttatcctaagtgacggggaaaaattaaatgactgtgtaggcaatggattttgctcaggctgattagaggcttacatagtgtgagtttaaagtttctgtgtacctaatgtaaaatgctttcgatcacacctctgtagagatgtttgcctttccctgtcattcaagaatatgcgacctatagagttacgttgacttttcagtgtttactgaagtacagagattagcaatgccttggaatagtgttgctttttaaatccagaatattactcggtttatttaatacttgagcccttgctaaagttgctcctcatattcttttgaaaatgtacaaaatgagaactctgattcctaccccctagagtatacagaatctccagggagtggtcccatcgaacccgtgtgtgatatagaggactcttgataaaaactgtgtttatataaagatggtgtcaacctctacattccaagatttcaaatgtggattaaaaaataagttttaaagt

SEQ ID NO: 4051 - protein, 1410 aa, Homo sapiens
MPVRSGGLLPDPPRSSYLESPRGPRFDGPRRFEDLGSRCEGPRPKGPRFEGNRPDGPRPRYEGHPAEGTKSKWGMIPRGPASQFYITPSTSLSPRQSGPQWKGPKPAFGQQHQQQPKSQAEPLSGNKEPLADTSSNQQKNFKMQSAAFSIAADVKDVKAAQSNENLSDSQQEPPKSEVSEGPVEPSNWDQNVQSMETQIDKAQAVTQPVPLANKPVPAQSTFPSKTGGMEGGTAVATSSLTADNDFKPVGIGLPHSENNQDKGLPRPDNRDNRLEGNRGNSSSYRGPGQSRMEDTRDKGLVNRGRGQAISRGPGLVKQEDFRDKMMGRREDSREKMNRGEGSRDRGLVRPGSSREKVPGGLQGSQDRGAAGSRERGPPRRAGSQERGPLRRAGSRERIPPRRAGSRERGPPRGPGSRERGLGRSDFGRDRGPFRPEPGDGGEKMYPYHRDEPPRAPWNHGEERGHEEFPLDGRNAPMERERLDDWDRERYWRECERDYQDDTLELYNREDRFSAPPSRSHDGDRRGPWWDDWERDQDMDEDYNREMERDMDRDVDRISRPMDMYDRSLDNEWDRDYGRPLDEQESQFRERDIPSLPPLPPLPPLPPLDRYRDDRWREERNREHGYDRDFRDRGELRIREYPERGDTWREKRDYVPDRMDWERERLSDRWYPSDVDRHSPMAEHMPSSHHSSEMMGSDASLDSDQGLGGVMVLSQRQHEIILKAAQELKMLREQKEQLQKMKDFGSEPQMADHLPPQESRLQNTSSRPGMYPPPGSYRPPPPMGKPPGSIVRPSAPPARSSVPVTRPPVPIPPPPPPPPLPPPPPVIKPQTSAVEQERWDEDSFYGLWDTNDEQGLNSEFKSETAAIPSAPVLPPPPVHSSIPPPGPVPMGMPPMSKPPPVQQTVDYGHGRDISTNKVEQIPYGERITLRPDPLPERSTFETEHAGQRDRYDRERDREPYFDRQSNVIADHRDFKRDRETHRDRDRDRGVIDYDRDRFDRERRPRDDRAQSYRDKKDHSSSRRGGFDRPSYDRKSDRPVYEGPSMFGGERRTYPEERMPLPAPSLSHQPPPAPRVEKKPESKNVDDILKPPGRESRPERIVVIMRGLPGSGKTHVAKLIRDKEVEFGGPAPRVLSLDDYFITEVEKEEKDPDSGKKVKKKVMEYEYEAEMEETYRTSMFKTFKKTLDDGFFPFIILDAINDRVRHFDQFWSAAKTKGFEVYLAEMSADNQTCGKRNIHGRKLKEINKMADHWETAPRHMMRLDIRSLLQDAAIEEVEMEDFDANIEEQKEEKKDAEEEESELGYIPKSKWEMDTSEAKLDKLDGLRTGTKRKRDWEAIASRMEDYLQLPDDYDTRASEPGKKRVRWADLEEKKDADRKRAIGFVVGQTDWEKITDESGHLAEKALNRTKYI

SEQ ID NO: 4052 - DNA, 1768 bp, Homo sapiens
ggcacgaggctgctgtctgcggaggaaactgcatcgacggacggccgcccagctacgggaggacctggagtggcactgggcgcccgacggaccatccccgggacccgcctgcccctcggcgccccgccccgccgggccgctccccgtcgggttccccagccacagccttacctacgggctcctgactccgcaaggcttccagaagatgctcgaaccaccggccggggcctcggggcagcagtgagggaggcgtccagccccccactcagctcttctcctcctgtgccaggggctccccgggggatgagcatggtggttttccctcggagccccctggctcgggacgtctgagaagatgccggtcatgaggctgttcccttgcttcctgcagctcctggccgggctggcgctgcctgctgtgcccccccagcagtgggccttgtctgctgggaacggctcgtcagaggtggaagtggtacccttccaggaagtgtggggccgcagctactgccgggcgctggagaggctggtggacgtcgtgtccgagtaccccagcgaggtggagcacatgttcagcccatcctgtgtctccctgctgcgctgcaccggctgctgcggcgatgagaatctgcactgtgtgccggtggagacggccaatgtcaccatgcagctcctaaagatccgttctggggaccggccctcctacgtggagctgacgttctctcagcacgttcgctgcgaatgccggcctctgcgggagaagatgaagccggaaaggaggagacccaagggcagggggaagaggaggagagagaagcagagacccacagactgccacctgtgcggcgatgctgttccccggaggtaacccaccccttggaggagagagaccccgcacccggctcgtgtatttattaccgtcacactcttcagtgactcctgctggtacctgccctctatttattagccaactgtttccctgctgaatgcctcgctcccttcaagacgaggggcagggaaggacaggaccctcaggaattcagtgccttcaacaacgtgagagaaagagagaagccagccacagacccctgggagcttccgctttgaaagaagcaagacacgtggcctcgtgaggggcaagctaggccccagaggccctggaggtctccaggggcctgcagaaggaaagaagggggccctgctacctgttcttgggcctcaggctctgcacagtcaagcagcccttgctttcggagctcctgtccaaaagtagggatgcggatcctgctggggccgccacggcctggctggtgggaaggccggcagcgggcggaggggatccagccacttccccctcttcttctgaagatcagaacattcagctctggagaacagtggttgcctgggggcttttgccactccttgtcccccgtgatctcccctcacactttgccatttgcttgtactgggacattgttctttccggccaaggtgccaccaccctgccccccctaagagacacatacagagtgggccccgggctggagaaagagctgcctggatgagaaacagctcagccagtggggatgaggtcaccaggggaggagcctgtgcgtcccagctgaaggcagtggcaggggagcaggttccccaagggccctggcacccccacaagctgtccctgcagggccatctgactgccaagccagattctcttgaataaagtattctagtgtggaaaaaaaaaaaaaaaaaaaaaaaaaaaaaa

SEQ ID NO: 4053 - protein, 170 aa, Homo sapiens
MPVMRLFPCFLQLLAGLALPAVPPQQWALSAGNGSSEVEVVPFQEVWGRSYCRALERLVDVVSEYPSEVEHMFSPSCVSLLRCTGCCGDENLHCVPVETANVTMQLLKIRSGDRPSYVELTFSQHVRCECRPLREKMKPERRRPKGRGKRRREKQRPTDCHLCGDAVPRR

SEQ ID NO: 4054 - DNA, 504 bp, Homo sapiens
gatagaccaccatcatgaacgacacagtaactatccacactagaaagttcatgatcaaccgacgacttcagaggaaacaaacagtcattgatatccttcaccctgggaaggcaacagtgcctaagacagaaatttgggaaaaactagccaaaatgtacaagaccacactggatgtcatctttgtatttgcattcaaaactcattttggtggtggcaagacaaccggctttggcatgatttatgatcccctggattatgcaaagaaaaatgaacccaaacatagacttgcaagacatggcctgtatgagaagaaaaagacctcaagaaagcaatgagaggaacgcaagaacagaatgaggaaagtcagggggactgcaaaggccaatgttggtgctggcaaaaagctgaaggagtaaaggtgctgcaatggtgtaatctgtggccattgtggatttttcacaagaatattaataaactaaacacttcaaaaaaaaaaaaaaaaaa

SEQ ID NO: 4055 - DNA, 1375 bp, Homo sapiens
aaaagcaagccaggaggtgcttgcggccgcttctagtagtttccaggcgctgccgggcggctggcactaagcggtcctgaggctgtggctacggctgctccggagctggtggcgccgcgataggagagccgatggccaagtggggtgagggagacccacgctggatcgtggaggagcgggcggacgccaccaacgtcaacaactggcactggacggagagagatgcttcaaattggtccacggataagctgaaaacactgttcttggcagtgcaggttcaaaatgaagaaggcaagtgtgaggtgacggaagtgagtaagcttgatggagaggcatccattaacaatcgcaaagggaaacttatcttcttttatgaatggagcgtcaaactaaactggacaggtacttctaagtcaggagtacagtacaaaggacatgtggagatccccaatttgtctgatgaaaacagcgtggatgaagtggagattagtgtgagccttgccaaagatgagcctgacacaaatctcgtggccttaatgaaggaagaaggggtgaaacttctaagagaagcaatgggaatttacatcagcaccctcaaaacagagttcacccagggcatgatcttacctacaatgaatggagagtcagtagacccagtggggcagccagcactgaaaactgaggagcgcaaggctaagcctgctccttcaaaaacccaggccagacctgttggagtcaaaatccccacttgtaagatcactcttaaggaaaccttcctgacgtcaccagaggagctctatagagtgtttaccacccaagagctggtgcaggcctttacccatgctcctgcaacattagaagcagacagaggtggaaagttccacatggtagatggcaacgtctctggggaatttactgatctggtccctgagaaacatattgtgatgaagtggaggtttaaatcttggccagagggacactttgccaccatcaccttgaccttcatcgacaagaacggagagactgagctgtgcatggaaggtcgaggcatccctgctcctgaggaagagcggacacgacagggctggcagcggtactactttgagggcattaaacagacctttggctatggcgcacgcttattttagggccagcggcaggggactccagcctgctggacacttcagtccagctctctcctgactggggcttgcgactcacaggattgcatcgtcccagctgctaacttggggccggggcccctcccttccacatataccttgggtttgtgcatgttttctgctgggtgggttcagagggcaatttctcttttatgtgtacatatgctaaataaacataatttaaaaaacaaaaa

SEQ ID NO: 4056 - protein, 338 aa, Homo sapiens
MAKWGEGDPRWIVEERADATNVNNWHWTERDASNWSTDKLKTLFLAVQVQNEEGKCEVTEVSKLDGEASINNRKGKLIFFYEWSVKLNWTGTSKSGVQYKGHVEIPNLSDENSVDEVEISVSLAKDEPDTNLVALMKEEGVKLLREAMGIYISTLKTEFTQGMILPTMNGESVDPVGQPALKTEERKAKPAPSKTQARPVGVKIPTCKITLKETFLTSPEELYRVFTTQELVQAFTHAPATLEADRGGKFHMVDGNVSGEFTDLVPEKHIVMKWRFKSWPEGHFATITLTFIDKNGETELCMEGRGIPAPEEERTRQGWQRYYFEGIKQTFGYGARLF

SEQ ID NO: 4057 - DNA, 1948 bp, Homo sapiens
gtaggagtccgcggcagcctccgggtaagccaagcgccgcgcagtgctgagttcccgcacgccgcagagccatggagatcggcaccgagatcagccgcaagatccggagtgccattaaggggaaattacaagaattaggagcttatgttgatgaagaacttcctgattacattatggtgatggtggccaacaagaaaagtcaggaccaaatgacagaggatctgtccctgtttctagggaacaacacaattcgattcaccgtatggcttcatggtgtattagataaacttcgctctgttacaactgaaccctctagtctgaagtcttctgataccaacatctttgatagtaacgtgccttcaaacaagagcaatttcagtcggggagatgagaggaggcatgaagctgcagtgccaccacttgccattcctagcgcgagacctgaaaaaagagattccagagtttctacaagttcgcaggagtcaaaaaccacaaatgtcagacagacttacgatgatggagctgcaacccgactaatgtcaacagtgaaacctttgagggagccagcaccctctgaagatgtgattgatattaagccagaaccagatgatctcattgacgaagacctcaactttgtgcaggagaatcccttatctcagaaaaaaacctacagtgacacttacatatggttcttctcgcccttctattgaaatttatcgaccacctgcaagtagaaatgcagatagtggtgttcatttaaacaggttgcaatttcaacagcagcagaatagtattcatgctgccaagcagcttgatatgcagagtagttgggtatatgaaacaggacgtttgtgtgaaccagaggtgcttaacagcttagaagaaacgtatagtccgttctttagaaacaactcggagaaaatgagtatggaggatgaaaactttcggaagagaaagttgcctgtggtaagttcagttgttaaagtaaaaaaattcaatcatgatggagaagaggaggaagaagatgatgattacgggtctcgaacaggaagcatctccagcagtgtgtctgtgcctgcaaagcctgaaaggagaccttctcttccaccttctaaacaagctaacaagaatctgattttgaaggctatatctgaagctcaagaatccgtaacaaaaacaactaactactctacagttccacagaaacagacacttccagttgctcccagaactcgaacttctcaagaagaattgctagcagaagtggtccagggacaaagtaggacccccagaataagtccccccattaaagaagaggaaacaaaaggagattctgtagaaaaaaatcaagctgagatgagtgaactgagtgtggcacagaaaccagaaaaacttttggagcgctgcaagtactggcctgcttgtaaaaatggggatgagtgtgcctaccatcaccccatctcaccctgcaaagccttccccaattgtaaatttgctgaaaaatgtttgtttgttcacccaaattgtaaatatgatgcaaagtgtactaaaccagattgtcccttcactcatgtgagtagaagaattccagtactgtctccaaaaccagttgcaccaccagcaccaccttccagtagtcagctctgccgttacttccctgcttgtaagaagatggaatgtcccttctatcatccaaaacattgtaggtttaacactcaatgtacaagaccggactgcacattctaccatcccaccattaatgtcccaccacgacatgccttgaaatggattcgacctcaaaccagcgaatagcacccagtcctgcctggcagaagatcatgcagtttggaagttttcatgtactgatgaaagatactctacagaacttgtcaaatctttgaaacttggaatatattgctttcataatatgaagttttattgcctatct

SEQ ID NO: 4058 - protein, 401 aa, Homo sapiens
MISLTKTSTLCRRIPYLRKKPTVTLTYGSSRPSIEIYRPPASRNADSGVHLNRLQFQQQQNSIHAAKQLDMQSSWVYETGRLCEPEVLNSLEETYSPFFRNNSEKMSMEDENFRKRKLPVVSSVVKVKKFNHDGEEEEEDDDYGSRTGSISSSVSVPAKPERRPSLPPSKQANKNLILKAISEAQESVTKTTNYSTVPQKQTLPVAPRTRTSQEELLAEVVQGQSRTPRISPPIKEEETKGDSVEKNQAEMSELSVAQKPEKLLERCKYWPACKNGDECAYHHPISPCKAFPNCKFAEKCLFVHPNCKYDAKCTKPDCPFTHVSRRIPVLSPKPVAPPAPPSSSQLCRYFPACKKMECPFYHPKHCRFNTQCTRPDCTFYHPTINVPPRHALKWIRPQTSE

SEQ ID NO: 4059 - DNA, 1599 bp, Homo sapiens
aattccggcggaagtggtggaggaacttccggcagcggcagctcaagtggccaaggcaagatgggtcaaagtcagagtggtggtcatggtcctggaggtggcaagaaggatgacgaggacaagaaaaagaaatatgaacctcctgtaccaactagagtggggaaaaagaagaagaaaacaaagggaccagatgctgccagcaaactgccactggtgacacctcacactcagtgccggttaaaattactgaagttagagagaattaaagactatcttctcatggaggaagaattcattagaaatcaggaacaaatgaaaccattagaagaaaagcaagaggaggaaagatcaaaagtggatgatctgagggggaccccgatgtcagtaggaaccttggaagagattattgatgacaatcatgccatcgtgtctacatctgtgggctcagaacactacgtcagcattctttcatttgtagacaaggatctgctggaacctggctgctcggtcctgctcaaccacaaggtgcatgccgtgataggggtgctgatggatgacacggatcccctggtcacagtgatgaaggtagaaaaggccccccaggagacctatgcagatattggggggttggacaaccaaattcaggaaattaaggaatctgtggagcttcctctcacccatcctgaatattatgaagagatgggtataaagcctcctaagggggtcattctctatggtccacctggcacaggtaaaaccttgttagccaaagcagtagcaaaccaaacctcagccactttcttgagagtggttggctctgaacttattcagaagtacctaggtgatgggcccaaactcgtacgggaattgttccgagttgctgaagaacatgcaccgtccatcgtgtttattgatgaaattgacgccattgggacaaaaagatatgactccaattctggtggtgagagagaaattcagcgaacaatgttggaactgctgaaccagttggatggatttgattctaggggagatgtgaaagttatcatggccacaaaccgaatagaaactttggatccagcacttatcagaccaggccgcattgacaggaagattgagttccccctgcctgatgaaaagacgaagaagcgcatctttcagattcacacaagcaggatgacgctggctgatgatgtaaccctggacgacctgatcatggctaaagatgacctctctggtgctgacatcaaggcaatctgtacagaagctggtctgatggccttaagagaacgtagaatgaaagtaacaaatgaagacttcaaaaaatctaaagaaaatgttctttataagaaacaggaaggcacccctgaggggctgtatctctaatgaaccatggctgtcatcaggaaaatggttgggagatttctcaatccctgaaagggatgaggttgggggagttgcccagaggaatccctgttcccactgatttttattagcaaaacatcctgtgtcttttggagtacgatgtgtaagtgcccattgggtggcctgttggtcactgtgcagcagtctgcttcccaataaagcgtgctctttcacaag

SEQ ID NO: 4060 - protein, 440 aa, Homo sapiens [sequence omitted]

SEQ ID NO: 4061 - DNA, 474 bp, Homo sapiens
cctttcggccggaaccgccatgttccagtaattcgccaaaatgacgaacacaaagggaaagaggagaggcacccgatatatgttctctaggccttttagaaaacatggagttgttcctttggccacatatatgcgaatctataagaaagttgatattgtagacgtcaagggaatgggtactgttcaaaaaggaatgccccacaagtgttaccatggcaaaactggaagagtctacagtgttacccagcatgctgttggcattgttgtaaacaaacaagttaagggcaagattcttgccaagagaattaatgtgcgtattaagcacattaagcactctaagagccaagatagcttcctgaaacgcgtgaaggaaaatgatcctccacccagagaagcacactttgtgagaaccagtgggaaggagcctgagctgctggaacctattccctgtgaattcatggcataataggtgtt

SEQ ID NO: 4062 - protein, 141 aa, Homo sapiens
MTNTKGKRRGTRYMFSRPFRKHGVVPLATYMRIYKKVDIVDVKGMGTVQKGMPHKCYHGKTGRVYSVTQHAVGIVVNKQVKGKILAKRINVRIKHIKHSKSQDSFLKRVKENDPPPREAHFVRTSGKEPELLEPIPCEFMA

SEQ ID NO: 4063 - DNA, 1526 bp, Homo sapiens
agtggtgctgggagtgtcgtggacgccgtgccgttactcgtagtcaggcggcggcgcaggcggcggcggcggcatagcgcacagcgcgccttagcagcagcagcagcagcagcagcatcggaggtacccccgccgtcgcagcccccgcgctggtgcagccaccctcgctccctctgctcttcctcccttcgctcgcaccatggctgatcagctgaccgaagaacagattgctgaattcaaggaagccttctccctatttgataaagatggcgatggcaccatcacaacaaaggaacttggaactgtcatgaggtcactgggtcagaacccaacagaagctgaattgcaggatatgatcaatgaagtggatgctgatggtaatggcaccattgacttccccgaatttttgactatgatggctagaaaaatgaaagatacagatagtgaagaagaaatccgtgaggcattccgagtctttgacaaggatggcaatggttatatcagtgcagcagaactacgtcacgtcatgacaaacttaggagaaaaactaacagatgaagaagtagatgaaatgatcagagaagcagatattgatggagacggacaagtcaactatgaagaattcgtacagatgatgactgcaaaatgaagacctactttcaactcctttttcccccctctagaagaatcaaattgaatcttttacttacctcttgcaaaaaaaagaaaaaagaaaaaagttcatttattcattctgtttctatatagcaaaactgaatgtcaaaagtaccttctgtccacacacacaaaatctgcatgtattggttggtggtcctgtcccctaaagatcaagctacacatcagttttacaatataaatacttgtactaccttaatgataaggactccttaaagttccatttgctaatgattaatacactgtttgggctggccagtttttcatgcatgcagcttgacgattgagcacagtcaggcctttgtattaaaaatgaaaaatgaaaaaacaaattcaaaacctattcaaatgggttctagttcaatttgtttagtataaattgtcatagctggtttactgaaaacaaacacatttaaaattggtttacctcaggatgacgtgcagaaaaatgggtgaaggataaaccgttgagacgtggccccactggtaggatggtcctcttgtacttcgtgtgctccgacccatggtgacgatgacacaccctggtggcatgcccgtgtatgttggtttagcgttgtctgcattgttctagagtgaaacaggtgtcaggctgtcactgttcacacaaatttttaataagaaacatttaccaagggagcatctttggactctctgtttttaaaaccttctgaaccatgacttggagccggcagagtaggctgtggctgtggacttcagcacaaccatcaacattgctgttcaaagaaattacagtttacgtccattccaagttgtaaatgctagtcttttttttttttttttccaataaa

SEQ ID NO: 4064 - protein, 149 aa, Homo sapiens [sequence omitted]

SEQ ID NO: 4065 - DNA, 1994 bp, Homo sapiens
gctgccaccgctcctgccactgcagtgctcgagccccgtgcaggggagcttgcgggaggatcgaccgacagacggacgcacgccgaggcactgcgcccccagccccgcgccggtgccaccgcagcccgaccccggccgccagtccagccgcccctcgcccggtgcctaggtgcccggccccacaccgccagctgctcggcgcccgggtccgccatgcgctccgccgctgtcctggctcttctgctctgcgccgggcaagtcactgcgctccctgtgaacagccctatgaataaaggggataccgaggtgatgaaatgcatcgttgaggtcatctccgacacactttccaagcccagccccatgcctgtcagccaggaatgttttgagacactccgaggagatgaacggatcctttccattctgagacatcagaatttactgaaggagctccaagacctcgctctccaaggcgccaaggagagggcacatcagcagaagaaacacagcggttttgaagatgaactctcagaggttcttgagaaccagagcagccaggccgagctgaaagaggcggtggaagagccatcatccaaggatgttatggagaaaagagaggattccaaggaggcagagaaaagtggtgaagccacagacggagccaggccccaggccctcccggagcccatgcaggagtccaaggctgaggggaacaatcaggcccctggggaggaagaggaggaggaggaggaggccaccaacacccaccctccagccagcctccccagccagaaatacccaggcccacaggccgagggggacagtgagggcctctctcagggtctggtggacagagagaagggcctgagtgcagagccagggtggcaggcaaagagagaagaggaggaggaggaggaggaggaggctgaggctggagaggaggctgtccccgaggaagaaggccccactgtagtgctgaacccccacccgagccttggctacaaggagatccggaaaggcgagagtcggtcggaggctctggctgtggatggagctgggaagcctggggctgaggaggctcaggaccccgaagggaagggagaacaggagcactcccagcagaaagaggaggaggaggagatggcagtggtcccgcaaggcctcttccggggtgggaagagcggagagctggagcaggaggaggagcggctctccaaggagtgggaggactccaaacgctggagcaagatggaccagctggccaaggagctgacggctgagaagcggctggaggggcaggaggaggaggaggacaaccgggacagttccatgaagctctccttccgggcccgggcctacggcttcaggggccctgggccgcagctgcgacgaggctggaggccatcctcccgggaggacagccttgaggcgggcctgcccctccaggtccgaggctaccccgaggagaagaaagaggaggagggcagcgcaaaccgcagaccagaggaccaggagctggagagcctgtcggccattgaagcagagctggagaaagtggcccaccagctgcaggcactacggcggggctgagacaccggctggcagggctggccccagggcaccctgtggccctggctctgctgtccccttggcaggtcctggccagatggcccggacgctgcttccggtagggaggcagcctccagcctgcccaagcccaggccaccctatcgccccctacgcgccttgtctcctactcctgactcctacctgccctggaacatcctttgcagggcagccccacaactttaaacattgacgattccttctctgaacacaggcagctttctagaagtttcccttcctccatcctatccactgggcacaactgcaataacttctgaccttttggtgaaagctgagaactcctgactgtaacatattctgtatgaactttatctaaagaaaaataaatctgttctgggctctttcctctg

SEQ ID NO: 4066 - protein, 457 aa, Homo sapiens
MRSAAVLALLLCAGQVTALPVNSPMNKGDTEVMKCIVEVISDTLSKPSPMPVSQECFETLRGDERILSILRHQNLLKELQDLALQGAKERAHQQKKHSGFEDELSEVLENQSSQAELKEAVEEPSSKDVMEKREDSKEAEKSGEATDGARPQALPEPMQESKAEGNNQAPGEEEEEEEEATNTHPPASLPSQKYPGPQAEGDSEGLSQGLVDREKGLSAEPGWQAKREEEEEEEEEAEAGEEAVPEEEGPTVVLNPHPSLGYKEIRKGESRSEALAVDGAGKPGAEEAQDPEGKGEQEHSQQKEEEEEMAVVPQGLFRGGKSGELEQEEERLSKEWEDSKRWSKMDQLAKELTAEKRLEGQEEEEDNRDSSMKLSFRARAYGFRGPGPQLRRGWRPSSREDSLEAGLPLQVRGYPEEKKEEEGSANRRPEDQELESLSAIEAELEKVAHQLQALRRG

SEQ ID NO: 4067 - DNA, 3086 bp, Homo sapiens
gactgcgcgccccagctccgatccccgttccgcgtccccgccgccgggaggaggtgcccactcgctcgcggcgcgcgccggccgccagactcggcctgtgggcgatttcctccggacccaggctccccgcccgaggaggaagatgcagacctttctgaaagggaagagagttggctactggctgagcgagaagaaaatcaagaagctgaatttccaggccttcgccgagctgtgcaggaagcgagggatggaggttgtgcagctgaaccttagccggccgatcgaggagcagggccccctggacgtcatcatccacaagctgactgacgtcatccttgaagccgaccagaatgatagccagtccctggagctggtgcacaggttccaggagtacatcgatgcccaccctgagaccatcgtcctggacccgctccctgccatcagaaccctgcttgaccgctccaagtcctatgagctcatccggaagattgaggcctacatggaagacgacaggatctgctcgccacccttcatggagctcacgagcctgtgcggggatgacaccatgcggctgctggagaagaacggcttgactttcccattcatttgcaaaaccagagtggctcatggcaccaactctcacgagatggctatcgtgttcaaccaggagggcctgaacgccatccagccaccctgcgtggtccagaatttcatcaaccacaacgccgtcctgtacaaggtgttcgtggttggcgagtcctacaccgtggtccagaggccctcactcaagaacttctccgcaggcacatcagaccgtgagtccatcttcttcaacagccacaacgtgtcaaagccggagtcgtcatcggtcctgacggagctggacaagatcgagggcgtgttcgagcggccgagcgacgaggtcatccgggagctctcccgggccctgcggcaggcactgggcgtgtcactcttcggcatcgacatcatcatcaacaaccagacagggcagcacgccgtcattgacatcaatgccttcccaggctacgagggcgtgagcgagttcttcacagacctcctgaaccacatcgccactgtcctgcagggccagagcacagccatggcagccacaggggacgtggccctgctgaggcacagcaagcttctggccgagccggcgggcggcctggtgggcgagcggacatgcagcgccagccccggctgctgcggcagcatgatgggccaggacgcgccctggaaggctgaggccgacgcgggcggcaccgccaagctgccgcaccagagactcggctgcaacgccggcgtgtcgcccagcttccagcagcattgtgtggcctccctggccaccaaggcctcctcccagtagccacggagccgggacccagaggggcagcgcagggcgcagagcacacccgctgggccagcagctcccaacggcgatgctactactaagaatccccagtgatctgattcttctgttttttaatttttaacctgattctctgatgtcatgatctaaatgaggggtagtgggggatggaagagagtaccaggtggtccaccgttggggagtggggccgtccgcctgctctctactgtgcagacctcctaactgagtttacacacgcttgtgtttgcaacactaggtctggatgggaggtgaggggtgtgcgtatggctgccatgccagtgtctgtgcacatccctgtctgttggtctccatggccactgtggaccgggacccttgggggaagcctgcccatgtcgggctgtgggaggctgatcggtgcatgtgagagtggcttcccttctgcctgactccccactccctgacctgccccttccttgtttttcctcctactggtctccaccaaggctttgttagcccccaccctgcctggtgtgcagctaacccctccctccccacagccagaggaggccacagacccctcaggggagttccgcgctggggtctgggctgtgctccctcactaaagggaaggaaaggaagctgggcgtcctctgggccccccaacacacgtcccatttagccctgcacagcggtctccttcccctaagccagcactgctgctccctggagcccgggaaggaggctgcctggctggaggcccgagccgatggcgcctgtgctgaggatttgtgctgtgatttgggcaaatcattccaggtctttgggcctccacccccttgtctctagtggacatttgagatcagagagcaccacagggctggctttgtgccctaacccctgggatgcagcctgcctttccataaagtcacctaggtgaggataggcgcgggagcctcggcatgacaccatggagatcggggccctcttcccagtgggttcactccttttcacacctgctgggtccctcctcacccagcaggcctggtccacctctcattgcaagccccaagcactgagccagcaggtgccagggagccacccgccccccatcgcttctgcacacctcagactcaccccatcaccttggcagcaaagcactggctctgccgtctgacccctgatccaggcagccccctctgcagagaaaagggttggggagaagcctctgcagtcctggaagatgtggggtgctgggtgagaggcatcagcccccacaagtatgtttttgtgtcttaagatagcagtttactttgaaaaagtgaaaaaggcttccgggctgtcctctgcccagtgagatggaggacgctagagaaagtgctgagtgtcccgagagaggcccccgagccagtgcatggaggtccttcggcctggctcagctgggctgcaggatgcccactttgaggagggaggcacagggcttgggcgaggggcagaggccatcagaactgcccggcttttttggaaactgaggacccaacaactaaccacgtttacacgacttgagttttgaaccccgattaatgtctgtacgtcacctttcctagttctgaccctgagccctggggaacaggaaagcgtggctggcctcttgcactgctttgtctccaaaataaactactgaaatcaaaccgca

SEQ ID NO: 4068 - DNA, 3847 bp, Homo sapiens
gtattctccgccgcccccacgccctcgaggtccccgccaccgaaccagcggcggagcccgcccgcgcctcccgcggcattcccgcaccggatcgctcctcgctggggcgggacctggcctggcggctctggtcactatgagtgaaacatctttcaacctaatatcagaaaaatgtgacattctatccattcttcgggaccatcctgaaaacaggatttaccggaggaaaatcgaggaactcagcaaaaggttcaccgccatccgcaagaccaaaggggatgggaactgcttctacagggccttgggctattcctacctggagtccctgctggggaagagcagggagatcttcaagttcaaagaacgcgtactgcagaccccaaatgaccttctggctgctggctttgaggagcacaagttcagaaacttcttcaatgctttttacagtgtggtggaactggtagagaaggatggctcagtgtccagcctgctgaaggtgttcaacgaccagagtgcctcggaccacatcgtgcagttcctgcgcctgctcacgtcggccttcatcaggaaccgagcagacttcttccggcacttcattgatgaggagatggacatcaaagacttctgcactcacgaagtagagcccatggccacggagtgtgaccacatccagatcacggcgttgtcgcaggccctgagcattgccctgcaagtggagtacgtggacgagatggataccgccctgaaccaccacgtgttccctgaggccgccaccccttccgtttacctgctctataaaacatcccactacaacatcctttatgcagccgataaacattgattaattttaggccatgcagtggaacctgtcacctaatgggactgcattctgaatggaacattccggctcttcaattttttaagcaatttagactgtagcaagaaaatgtgcagccttttgggcaaagcccctgggaacgaggcctatccactatggactatggtaacttggtaggatttttagtatttattttaatggagggacaaatgctttctaactgggcccccgactccgcaccccagttcgcagtgaggccctgggtgggtcacctgccctctctggacttgtttcttcaactggaggaggtccctgcctatgctgacattccattgtagaaaaatggggcctctggtgtctctttaccaggggcagtgcctctctgcgggggaggaaaagctcaaggttagctgtcttaacccaagtgacttaccaggcctacaaaagagtccagtccagtcacttgttggactgggctctgacagatggcctattgaggtcaacttgaatgtgagggctacggtgtggtttcaaacattcatgatggatgtattttcctacccctaacttaaggagaaaaaaaaaaagacttcctttttttgccaaagtccagaaaggggcctttagcctttagtaggagctcaaattgttggggcccctctacctctctcagggctagaactgcctgactcttggtggacgagcccttcagggttctgctttcagccccacctggacagaggcttacaagactagggtctggaccagaatctgtgtatttctgtctgggaccaggaagccgcagctgtcccatcatccccagcaaatcctagaagtggagtctggatacttcaaggatagaagtgttggcacgcacagccatggacccagctgagcagagcagacgctttgcaggctgcccctggcttcttcctccctttcccgcttctgctctctttatggactggtcagagggtaggtgggaaagaacagacaagccatgggaagttggcagtggggagatttccactgtggaaaccgcctgggaattccggccagcagcttcctccttcagccacctggccataccccttaaataagcccctcaccttgctgcctcaggaccttcaagattccatctgtgggctggccggcaagatggcaccagtggggacccacaccctggctgggcagaggtgctgctagcaacctctcttcctctataagaggaaatggaaaatgcagggtgtggaattgccctttggggtccttccttaattgaaggccaccttctcacaggtttcattctgcagggatttactggaatctattggtgctgctgcatgagtctgctgacaacctgactgcacaaggactgggtagcagactcctcagagtcctcttgacacaaatgtcagatttgtgtcactcttctgccttcgtgaaaagccaatagcactctcagatatcaggggattttagttccaagcagggaccctggtttccatactgccctcagctggagtttggatccaaaggctctggctaagtcattatgtcactttttcacaggaatgtaaatttgactgtcacctctgaatttgttcagtgtcccaccatggtctatgagaagtacactggaagcgtggggggaacacatgacatgatttgtgaatatcatcatctttgccagacaagtctccaggggatccctgtttcccaactgaaaggtgtgaacggacacacacacagcctggatgacgccttggctgttctaaggggctgtaaggtgggctctgggccttccagctaggctctcaagcacagcagaagcctcactgggctgctatgtctctgtatttgtggcttgtgtggtagcctcagaagcagagctgtttggcagactggctggagaaattccctctaggagacttgcctgtgctgtgcttccaggtcacagagccccccggaaactcacaggggccctcttcccagaaaagaatctattctatcacttcagaatcaggacactcaagctctggcagaggaaggccaagttactttcatggtcttaccctctgcttttcccctttttgcaaaaaaccactggccaaatccgaaccattgcccttgtttcccccacgttctctctcagatctttgtctcgaagggaaaacatagtggatgaaaaggtgtggcaggctttggcaccttgttaaaatttctagtcatctgtggatgttaccttgcttgtccacagcagccagtcaccctggccagtcccacttcctggataattctctaccctcaccccacagagccatctctctccagaccaaaagctggaaggagagttgctttgagagcttgtttttacaactgcatgtttattatgatactttctctccaaaggaaacttttaaatcaatgggaacaattagcaacagaaagagcacagtccctgcttttgactgggttcctattttaagcacaaatgagagctctggagccagaatgccagggttctaacttcagcattcacttactagctgtatgatcttggccaagtcacttcacctccctgagccccaattcccaagtttgtgaaatggcaacaatacctatgtgtcactggattattggttaaaacagaatgagattccttgtgtgaaaatagctattatacctgacacactcatcgtatgggctctgcaaagggatattccccaacctgtccttcctgacaggaagcatagggcactgcagatggggaagcatgtcaccttggcagtgactcggtggcttcccaagcaggagtgtcaggggaaccatgagagagagtctaggagcaaacacatcaccaccctgagcagatacaggagtggggagggggctgtaactcagtgagtggcttccaggggccccaggccctgctggatgtgggccaagccctacagcttccctaggcagtaagtaaaaacattctcctagcattaaaatggtttccat

SEQ ID NO: 4069 - DNA, 2967 bp, Homo sapiens
ccggaactgcagttgctgctgcagctgaggtacagcggcggtttctgaggttcttcactcgcgactgacggagctgcggtggcgtctccacacgcaaccatgaagttgaaggacacaaaatcaaggccaaagcagtcaagctgtggcaaatttcagacaaagggaatcaaagttgtgggaaaatggaaggaagtgaagattgacccaaatatgtttgcagatggacagatggatgacttggtgtgctttgaggaattgacagattaccagttggtctcccctgccaagaatccctccagtctcttctcaaaggaagcacccaagagaaaggcacaagctgtttcagaagaagaggaggaggaggagggaaagtctagctcaccaaagaaaaagatcaagttgaagaaaagtaaaaatgtagcaactgaaggaaccagtacccagaaagaatttgaagtgaaagatcctgagctggaggcccagggagatgacatggtttgtgatgatccggaggctggggagatgacatcagaaaacctggtccaaactgctccaaaaaagaagaaaaataaagggaaaaaagggttggagccttctcagagcactgctgccaaggtgcccaaaaaagcgaagacatggattcctgaagttcatgatcagaaagcagatgtgtcagcttggaaggacctgtttgttcccaggccggttctccgagcactcagctttctaggcttctctgcacccacaccaatccaagccctgaccttggcacctgccatccgtgacaaactggacatccttggggctgctgagacaggaagtgggaaaactcttgcctttgccatcccaatgattcatgcggtgttgcagtggcagaagaggaatgctgcccctcctccaagtaacaccgaagcaccacctggagagaccagaactgaggccggagctgagactagatcaccaggcaaggctgaagctgagtctgatgcattgcctgacgatactgtaattgagagtgaagcactgcccagtgatattgcagccgaggccagagccaagactggaggcactgtctcagaccaggcgttgctctttggtgacgatgatgctggtgaagggccttcttccctgatcagggagaaacctgttcccaaacagaatgagaatgaggaggaaaatcttgataaagagcagactggaaatctaaaacaggagttggatgacaaaagcgccacctgtaaggcatatccaaagcgtcctctgcttggactggttctgactcccactcgagagctggccgtccaggtcaaacagcacattgatgctgtggccaggtttacaggaattaaaactgctattttggttggtggaatgtccacgcagaaacagcagaggatgctgaaccgtcgtcctgagattgtggttgctactccaggccggctgtgggaattaattaaagaaaagcattatcatttgaggaaccttcggcagctcaggtgcctggtagtggatgaggctgaccggatggttgagaaaggccattttgctgagctctcacagctgctagagatgctcaatgactcccaatacaacccaaagagacaaacgcttgttttttctgccacactcaccctggtgcatcaggctcctgctcgaatccttcataagaagcacaccaagaaaatggataaaacagccaaacttgacctccttatgcagaaaattggcatgaggggcaagcccaaggtcattgacctcacaaggaatgaggccacggtggagacgctaacagagaccaagatccattgtgagactgatgagaaagacttctacttgtactacttcctgatgcagtatccaggccgcagcttagtgtttgccaacagtatctcctgcatcaaacgcctctctgggctcctcaaagtccttgatatcatgcccttgaccctgcatgcctgtatgcaccagaagcagaggctcagaaacctggagcagtttgcccgtctggaagactgtgttctcttggcaacagatgtggcagctcggggtctggatattcctaaagtccagcatgtcatccattaccaggtcccacgtacctcggagatttatgtccaccgaagtggtcgaactgctcgagctaccaatgaaggcctcagtctgatgctcattgggcctgaggatgtgatcaactttaagaagatttacaaaacgctcaagaaagatgaggatatcccactgttccccgtgcagacaaaatacatggatgtggtcaaggagcgaatccgtttagctcgacagattgagaaatctgagtatcggaacttccaggcttgcctgcacaactcttggattgagcaggcagcagctgccctggagattgagctggaagaagacatgtataagggaggaaaagctgaccagcaagaagaacgtcggagacaaaagcagatgaaggttctgaagaaggagctgcgccacctgctgtcccagccactgtttacggagagccagaaaaccaagtatcccactcagtctggcaagccgcccctgcttgtgtctgccccaagtaagagcgagtctgctttgagctgtctctccaagcagaagaagaagaagacaaagaagccgaaggagccacagccggaacagccacagccaagtacaagtgcaaattaactggtcaagtgtgtcagtgactgcacattggtttctgttctctggctatttgcaaaacctctcccacccttgtgtttcactccaccaccaaccccaggtaaaaaagtctccctctcttccactcacacccatagcgggagagacctcatgcagatttgcattgttttggagtaagaattcaatgcagcagcttaatttttctgtattgcagtgtttataggcttcttgtgtgttaaacttgatttcataaattaaaaacaatggtcagaaaaaaaaaaaaaaaaaaaa

SEQ ID NO: 4070 - protein, 859 aa, Homo sapiens
MKLKDTKSRPKQSSCGKFQTKGIKVVGKWKEVKIDPNMFADGQMDDLVCFEELTDYQLVSPAKNPSSLFSKEAPKRKAQAVSEEEEEEEGKSSSPKKKIKLKKSKNVATEGTSTQKEFEVKDPELEAQGDDMVCDDPEAGEMTSENLVQTAPKKKKNKGKKGLEPSQSTAAKVPKKAKTWIPEVHDQKADVSAWKDLFVPRPVLRALSFLGFSAPTPIQALTLAPAIRDKLDILGAAETGSGKTLAFAIPMIHAVLQWQKRNAAPPPSNTEAPPGETRTEAGAETRSPGKAEAESDALPDDTVIESEALPSDIAAEARAKTGGTVSDQALLFGDDDAGEGPSSLIREKPVPKQNENEEENLDKEQTGNLKQELDDKSATCKAYPKRPLLGLVLTPTRELAVQVKQHIDAVARFTGIKTAILVGGMSTQKQQRMLNRRPEIVVATPGRLWELIKEKHYHLRNLRQLRCLVVDEADRMVEKGHFAELSQLLEMLNDSQYNPKRQTLVFSATLTLVHQAPARILHKKHTKKMDKTAKLDLLMQKIGMRGKPKVIDLTRNEATVETLTETKIHCETDEKDFYLYYFLMQYPGRSLVFANSISCIKRLSGLLKVLDIMPLTLHACMHQKQRLRNLEQFARLEDCVLLATDVAARGLDIPKVQHVIHYQVPRTSEIYVHRSGRTARATNEGLSLMLIGPEDVINFKKIYKTLKKDEDIPLFPVQTKYMDVVKERIRLARQIEKSEYRNFQACLHNSWIEQAAAALEIELEEDMYKGGKADQQEERRRQKQMKVLKKELRHLLSQPLFTESQKTKYPTQSGKPPLLVSAPSKSESALSCLSKQKKKKTKKPKEPQPEQPQPSTSAN

SEQ ID NO: 4071 - DNA, 575 bp, Homo sapiens
gctgaagttgaggatctcttactctctaggccacggaattaacccgagcaggcatggaggcctctgctctcacctcatcagcagtgaccagtgtggccaaagtggtcagggtggcctctggctctgccgtagttttgcccctggccaggattgctacagttgtgattggaggagctgtgcccatggtgctcagtgccatgggcttcactgcggcgggaatcgcctcgtcctccatagcagccaagatgatgtccgcggcggccattgccaatgggggtggagttgcctcgggcagccttgtggctactctgcagtcactgggagcaactggactctccggattgaccaagttcatcctgggctccattgggtctgccattgcggctgtcattgcgaggttctactagctccctgcccctcgccctgcagagaagagaaccatgccaggggagaaggcacccagccatcctgacccagcgaggagccaactatcccaaatatacctggggtgaaatataccaaattctgcatctccagaggaaaataagaaataaagatgaattgttgcaactctt

SEQ ID NO: 4072 - DNA, 1476 bp, Homo sapiens
actgtacacatgctagggtccaggacagcaggaccaagccagcagaaacagcctgagcccaccgcagactggcctggctatactggacaatgccactcctcctgtacacctgtcttctctggctgcccaccagcggcctctggaccgtccaggccatggatcctaacgctgcttatgtgaacatgagtaaccatcaccggggcctggcttcagccaacgttgactttgccttcagcctgtataagcacctagtggccttgagtcccaaaaagaacattttcatctcccctgtgagcatctccatggccttagctatgctgtccctgggcacctgtggccacacacgggcccagcttctccagggcctgggtttcaacctcactgagaggtctgagactgagatccaccagggtttccagcacctgcaccaactctttgcaaagtcagacaccagcttagaaatgaccatgggcaatgccttgtttcttgatggcagcctggagttgctggagtcattctcagcagacatcaagcactactatgagtcagaggtcttggctatgaatttccaggactgggcaacagccagcagacagatcaacagctatgtcaagaataagacacaggggaaaattgtcgacttgttttcagggctggatagcccagccatcctcgtcctggtcaactatatcttcttcaaaggcacatggacacagccctttgacctggcaagcaccagggaggagaacttctatgtggacgagacaactgtggtgaaggtgcccatgatgttgcagtcgagcaccatcagttaccttcatgactcggagctcccctgccagctggtgcagatgaactacgtgggcaatgggactgtcttcttcatccttccggacaaggggaagatgaacacagtcatcgctgcactgagccgggacacgattaacaggtggtccgcaggcctgaccagcagccaggtggacctgtacattccaaaggtcaccatctctggagtctatgacctcggagatgtgctggaggaaatgggcattgcagacttgttcaccaaccaggcaaatttctcacgcatcacccaggacgcccagctgaagtcatcaaaggtggtccataaagctgtgctgcaactcaatgaggagggtgtggacacagctggctccactggggtcaccctaaacctgacgtccaagcctatcatcttgcgtttcaaccagcccttcatcatcatgatcttcgaccacttcacctggagcagccttttcctggcgagggttatgaacccagtgtaagagaccacccacccagagcctcagcactgtctgactttgggaaccagggatcccacagaaatgttttggagagcgggaggtttcccccaatctcctccaagttcttctccctccaaccagagttgtgtctaactttaggcatcttttaataaatgtcattgcgactctg

SEQ ID NO: 4073 - DNA, 1337 bp, Homo sapiens
gacaatgccgtcttctgtctcgtggggcatcctcctgctggcaggcctgtgctgcctggtccctgtctccctggctgaggatccccagggagatgctgcccagaagacagatacatcccaccatgatcaggatcacccaaccttcaacaagatcacccccaacctggctgagttcgccttcagcctataccgccagctggcacaccagtccaacagcaccaatatcttcttctccccagtgagcatcgctacagcctttgcaatgctctccctggggaccaaggctgacactcacgatgaaatcctggagggcctgaatttcaacctcacggagattccggaggctcagatccatgaaggcttccaggaactcctccgtaccctcaaccagccagacagccagctccagctgaccaccggcaatggcctgttcctcagcgagggcctgaagctagtggataagtttttggaggatgttaaaaagttgtaccactcagaagccttcactgtcaacttcggggacaccgaagaggccaagaaacagatcaacgattacgtggagaagggtactcaagggaaaattgtggatttggtcaaggagcttgacagagacacagtttttgctctggtgaattacatcttctttaaaggcaaatgggagagaccctttgaagtcaaggacaccgaggaagaggacttccacgtggaccaggcgaccaccgtgaaggtgcctatgatgaagcgtttaggcatgtttaacatccagcactgtaagaagctgtccagctgggtgctgctgatgaaatacctgggcaatgccaccgccatcttcttcctgcctgatgaggggaaactacagcacctggaaaatgaactcacccacgatatcatcaccaagttcctggaaaatgaagacagaaggtctgccagcttacatttacccaaactgtccattactggaacctatgatctgaagagcgtcctgggtcaactgggcatcactaaggtcttcagcaatggggctgacctctccggggtcacagaggaggcacccctgaagctctccaaggccgtgcataaggctgtgctgaccatcgacgagaaagggactgaagctgctggggccatgtttttagaggccatacccatgtctatcccccccgaggtcaagttcaacaaaccctttgtcttcttaatgattgaacaaaataccaagtctcccctcttcatgggaaaagtggtgaatcccacccaaaaataactgcctctcgctcctcaacccctcccctccatccctggccccctccctggatgacattaaagaagggttgagctgg

SEQ ID NO: 4074 - DNA, 1240 bp, Homo sapiens
agaacaaagaacagccaccatgcagctcttcctcctcttgtgcctggtgcttctcagccctcagggggcctcccttcaccgccaccacccccgggagatgaagaagagagtcgaggacctccatgtaggtgccacggtggcccccagcagcagaagggactttacctttgacctctacagggccttggcttccgctgcccccagccagagcatcttcttctcccctgtgagcatctccatgagcctggccatgctctccctgggggctgggtccagcacaaagatgcagatcctggagggcctgggcctcaacctccagaaaagctcagagaaggagctgcacagaggctttcagcagctccttcaggaactcaaccagcccagagatggcttccagctgagcctcggcaatgcccttttcaccgacctggtggtagacctgcaggacaccttcgtaagtgccatgaagacgctgtacctggcagacactttccctaccaactttagggactctgcaggggccatgaagcagatcaatgattatgtggcaaagcaaacgaagggcaagattgtggacttgcttaagaacctcgatagcaatgcggtcgtgatcatggtgaattacatcttctttaaagctaagtgggagacaagcttcaaccacaaaggcacccaagagcaagacttctacgtgacctcggagactgtggtgcgggtacccatgatgagccgcgaggatcagtatcactacctcctggaccggaacctctcctgcagggtggtgggggtcccctaccaaggcaatgccacggctttgttcattctccccagtgagggaaagatgcagcaggtggagaatggactgagtgagaaaacgctgaggaagtggcttaagatgttcaaaaagaggcagctcgagctttaccttcccaaattctccattgagggctcctatcagctggagaaagtcctccccagtctggggatcagtaacgtcttcacctcccatgctgatctgtccggcatcagcaaccactcaaatatccaggtgtctgagatggtgcacaaagctgtggtggaggtggacgagtcgggaaccagagcagcggcagccacggggacaatattcactttcaggtcggcccgcctgaactctcagaggctagtgttcaacaggccctttctgatgttcattgtggataacaacatcctcttccttggcaaagtgaaccgcccctga

SEQ ID NO: 4075 - DNA, 1521 bp, Homo sapiens
cagagttgagaatggagagaatgttacctctcctggctctggggctcttggcggctgggttctgccctgctgtcctctgccaccctaacagcccacttgacgaggagaatctgacccaggagaaccaagaccgagggacacacgtggacctcggattagcctccgccaacgtggacttcgctttcagcctgtacaagcagttagtcctgaaggcccctgataagaatgtcatcttctccccactgagcatctccaccgccttggccttcctgtctctgggggcccataataccaccctgacagagattctcaaaggcctcaagttcaacctcacggagacttctgaggcagaaattcaccagagcttccagcacctcctgcgcaccctcaatcagtccagcgatgagctgcagctgagtatgggaaatgccatgtttgtcaaagagcaactcagtctgctggacaggttcacggaggatgccaagaggctgtatggctccgaggcctttgccactgactttcaggactcagctgcagctaagaagctcatcaacgactacgtgaagaatggaactagggggaaaatcacagatctgatcaaggaccttgactcgcagacaatgatggtcctggtgaattacatcttctttaaagccaaatgggagatgccctttgacccccaagatactcatcagtcaaggttctacttgagcaagaaaaagtgggtaatggtgcccatgatgagtttgcatcacctgactataccttacttccgggacgaggagctgtcctgcaccgtggtggagctgaagtacacaggcaatgccagcgcactcttcatcctccctgatcaagacaagatggaggaagtggaagccatgctgctcccagagaccctgaagcggtggagagactctctggagttcagagagataggtgagctctacctgccaaagttttccatctcgagggactataacctgaacgacatacttctccagctgggcattgaggaagccttcaccagcaaggctgacctgtcagggatcacaggggccaggaacctagcagtctcccaggtggtccataaggctgtgcttgatgtatttgaggagggcacagaagcatctgctgccacagcagtcaaaatcaccctcctttctgcattagtggagacaaggaccattgtgcgtttcaacaggcccttcctgatgatcattgtccctacagacacccagaacatcttcttcatgagcaaagtcaccaatcccaagcaagcctagagcttgccatcaagcagtggggctctcagtaaggaacttggaatgcaagctggatgcctgggtctctgggcacagcctggcccctgtgcaccgagtggccatggcatgtgtggccctgtctgcttatccttggaaggtgacagcgattccctgtgtagctctcacatgcacaggggcccatggactcttcagtctggagggtcctgggcctcctgacagcaataaataatttcgttgg

SEQ ID NO: 4076 - protein, 423 aa, Homo sapiens
MERMLPLLALGLLAAGFCPAVLCHPNSPLDEENLTQENQDRGTHVDLGLASANVDFAFSLYKQLVLKAPDKNVIFSPLSISTALAFLSLGAHNTTLTEILKGLKFNLTETSEAEIHQSFQHLLRTLNQSSDELQLSMGNAMFVKEQLSLLDRFTEDAKRLYGSEAFATDFQDSAAAKKLINDYVKNGTRGKITDLIKDLDSQTMMVLVNYIFFKAKWEMPFDPQDTHQSRFYLSKKKWVMVPMMSLHHLTIPYFRDEELSCTVVELKYTGNASALFILPDQDKMEEVEAMLLPETLKRWRDSLEFREIGELYLPKFSISRDYNLNDILLQLGIEEAFTSKADLSGITGARNLAVSQVVHKAVLDVFEEGTEASAATAVKITLLSALVETRTIVRFNRPFLMIIVPTDTQNIFFMSKVTNPKQA

SEQ ID NO: 4077 - DNA, 1030 bp, Homo sapiens
tttccgcgctacctacagaggggtccatacagcgtcgttctggattcccgtcgtaacttaaagggaaactttcacaatgtctggagcgcttgatgtcctgcaaatgaaggaggaggatgtccttaagttccttgtagcaggaacccacttaggtggcaccaatcttgacttccagatggaacagtacatctataaaaggaaaagtgatggcatctatatcataaatctgaagaggacctgggagaagcttctgctggcagctcgtgctattattgctattgaaaaccctgctgatgtcagtgttatatcctccaggaatactggccagagggctgtgctgaagtttgctgctgccactgaagccactccaattgctggtcacttcactcctggaaccttcactaaccagatccaggcagacttctgggagccaaggcttcttgtggttactgaccccagggctgaccaccagcctctcacggaggcatcttatgttaacctacctaccattgctctgtgtaacacagattctcctctgcgctatgtggacattgccattccatgcaacaaccagggagctcgctcagtgggtttgatgtggtggacgctggctcgggaagttctgcgcatgcgtggcaccatttctcgtgaacacctatgggaggtcatgcctgatctctacttctacagagatcctgaagagattgaaaaagaagagcaggctgctactgaaaaggcagtgaccaaggaggaatttcagggtgaatggactgctccagctcctgagttcactgctactaagcctgaggttgcagactggtctgaaggtgtacaggtgccctctgtgcctattcagtagttccctactgaagacaggagtgctcagcctgccatggaagactggtctgcagctcccactgctcaggccactgaatgggtaggagcaaccactgactggtcttaagctgttcttgcataggctcttaagcaacacggaaaaatgattggcggaaaataaacatcagtttct

SEQ ID NO: 4078 - protein, 295 aa, Homo sapiens
MSGALDVLQMKEEDVLKFLVAGTHLGGTNLDFQMEQYIYKRKSDGIYIINLKRTWEKLLLAARAIIAIENPADVSVISSRNTGQRAVLKFAAATEATPIAGHFTPGTFTNQIQADFWEPRLLVVTDPRADHQPLTEASYVNLPTIALCNTDSPLRYVDIAIPCNNQGARSVGLMWWTLAREVLRMRGTISREHLWEVMPDLYFYRDPEEIEKEEQAATEKAVTKEEFQGEWTAPAPEFTATKPEVADWSEGVQVPSVPIQSSLLKTGVLSLPWKTGLQLPLLRPLNGVGATTDWS

SEQ ID NO: 4079 - DNA, 1324 bp, Homo sapiens
cttgagaggctctggctcttgcttcttaggcggcccgaggacgccatggccgagtgcccgacactcggggaggcagtcaccgaccacccggaccgcctgtgggcctgggagaagttcgtgtatttggacgagaagcagcacgcctggctgcccttaaccatcgagataaaggataggttacagttacgggtgctcttgcgtcgggaagacgtcgtcctggggaggcctatgacccccacccagataggcccaagcctgctgcctatcatgtggcagctctaccctgatggacgataccgatcctcagactccagtttctggcgcttagtgtaccacatcaagattgacggcgtggaggacatgcttctcgagctgctgccagatgactgatgtatggtcttggcagcacctgtctcctttcaccccagggcctgagcctggccagcctacaatggggatgttgtgtttctgttcaccttcgtttactatgcctgtgtcttctccaccacgctggggtctgggaggaatggacagacagaggatgagctctacccagggcctgcaggacctgcctgtagcccactctgctcgccttagcactaccactcctgccaaggaggattccatttggcagagcttcttccaggtgcccagctatacctgtgcctcggcttttctcagctggatgatggtcttcagcctctttctgtcccttctgtccctcacagcactagtatttcatgttgcacacccactcagctccgtgaacttgtgagaacacagccgattcacctgagcaggacctctgaaaccctggaccagtggtctcacatggtgctacgcctgcatgtaaacacgcctgcaaacgctgcctgccggtaaacacgcctgcaaacgctgcctgcccgtaaacacgcctgcaaacgctgcctgcccacacaggttcacgtgcagctcaaggaaaggcctgaaaggagcccttatctgtgctcaggactcagaagcctctgggtcagtggtccacatcccgggacgcagcaggaggccaggccggcgagccctgtggatgagccctcagaacccttggcttgcccacgtggaaaagggatagaggttgggtttcccccctttatagatggtcacgcacctgggtgttacaaagttgtatgtggcatgaatactttttgtaatgattgattaaatgcaagatagtttatctaacttcgtgcgcaatcagcttctatccttgacttagattctggtggagagaagtgagaataggcagcccccaaataaaaaatattcatggaaaaaaaaaaaaaaa

SEQ ID NO: 4080 - protein, 114 aa, Homo sapiens
MAECPTLGEAVTDHPDRLWAWEKFVYLDEKQHAWLPLTIEIKDRLQLRVLLRREDVVLGRPMTPTQIGPSLLPIMWQLYPDGRYRSSDSSFWRLVYHIKIDGVEDMLLELLPDD

SEQ ID NO: 4081 - DNA, 1591 bp, Homo sapiens
tgaaaatgcctcgtgtaaaagcagctcaagctggaagacagagctctgcaaagagacatcttgcagaacaatttgcagttggagagataataactgacatggcaaaaaaggaatggaaagtaggattacccattggccaaggaggctttggctgtatatatcttgctgatatgaattcttcagagtcagttggcagtgatgcaccttgtgttgtaaaagtggaacccagtgacaatggacctctttttactgaattaaagttctaccaacgagctgcaaaaccagagcaaattcagaaatggattcgtacccgtaagctgaagtacctgggtgttcctaagtattgggggtctggtctacatgacaaaaatggaaaaagttacaggtttatgataatggatcgctttgggagtgaccttcagaaaatatatgaagcaaatgccaaaaggttttctcggaaaactgtcttgcagctaagcttaagaattctggatattctggaatatattcacgagcatgagtatgtgcatggagatatcaaggcctcaaatcttcttctgaactacaagaatcctgaccaggtgtacttggtagattatggccttgcttatcggtactgcccagaaggagttcataaagaatacaaagaagaccccaaaagatgtcacgatggcactattgaattcacgagcatcgatgcacacaatggcgtggccccatcaagacgtggtgatttggaaatacttggttattgcatgatccaatggcttactggccatcttccttgggaggataatttgaaagatcctaaatatgttagagattccaaaattagatacagagaaaatattgcaagtttgatggacaaatgttttcctgagaaaaacaaaccaggtgaaattgccaaatacatggaaacagtgaaattactagactacactgaaaaacctctttatgaaaatttacgtgacattcttttgcaaggactaaaagctataggaagtaaggatgatggcaaattggacctcagtgttgtggagaatggaggtttgaaagcaaaaacaataacaaagaagcgaaagaaagaaattgaagaaagcaaggaacctggtgttgaagatacggaatggtcaaacacacagacagaggaggccatacagacccgttcaagaaccagaaagagagtccagaagtaattcagatgctgtgaaccagatttccttttctttgttttcttttgacttttttctccttttctatttgaactgttttattttcctgtgagtcttgcgaggtggaagtaatgattaaatactcatgtgttcagaaaacataaactttttttataaaaatattttgtacaattcattaaaggctaatttatgaaatttgaaaatcttcaggttatactccttaagttatcccaaagccgtgtgtttgtgatgttttggagtacatatatatgaaaattattatgacacgcacttttctaatcattgtacatttctcagagtggataaaaatgtttgacaaagtcctcacttttaaggaaatgcaaagcttaaaataaaactctcttttgtttgatgca

SEQ ID NO: 4082 - DNA, 510 bp, Homo sapiens
atgcctgctgctgcgcttccgaggcaggaagccgagggacccatgtctgggagcggagaactttctgtgagacatcacgccatcaaattctctgtggcacgcgctgggcagaaaggctaccatcaccgcactgagatcaacaagaagatctataagattggccagggctaccttatcaaggatggcaagctgatcaagaacaatgcctccactgactatgacctatctgacaagagcatcaaccctctgggtggctttgtccactatggtgaagtgaccaatgactttgtcatgctgaaaggctgtgtggtgggaaccaagaagcgggtgctcaccctccgcaagtccttgctggtgcagacgaagcggcgggctctggagaagattgaccttaagttcattgacaccacctccaagtttggccatggccgcttccagaccatggaggagaagaaagcattcatgggaccactgaagaaagaccgaattgcaaaggaagaaggagcttaa

SEQ ID NO: 4083 - protein, 169 aa, Homo sapiens
MPAAALPRQEAEGPMSGSGELSVRHHAIKFSVARAGQKGYHHRTEINKKIYKIGQGYLIKDGKLIKNNASTDYDLSDKSINPLGGFVHYGEVTNDFVMLKGCVVGTKKRVLTLRKSLLVQTKRRALEKIDLKFIDTTSKFGHGRFQTMEEKKAFMGPLKKDRIAKEEGA

SEQ ID NO: 4084 - DNA, 1315 bp, Homo sapiens
ctatgatgatttgtagggtggcacctttttatccaagttactagctacacatcagtgtttaaagagaaaaaagtgacctttcattttttttttcttgaaacttgaggaaacaagatacatactactgatttttttttttcttaaaactaaatgcatgactgcagagcggtagaggtgtatatttttcatactgtggggcaaagtatttgtgctgctttttggagatggactggaacgtctggtttctgtccccgggcccggcagctacgtctattttctgtagaaggtgccacagtgagacctggagccaccccttcctgccctggcgccgtttagagctgggagcccgtggactcccggcctgtttctaccttctattcaaccactctgacgtggggagacaagaagaaatagaactttttgatagtgtggtaaaaacattgatttgaactattttagtaaaaggagtaacaaacaagattgtgatagtgtctactttgagctagataaataaaggcctctttgtgagcctcctggctgggtgctcagtgcttgtttctgtcgtgggtggcagggtcagcaggcagagacagggccaaggcccctcaagcaccgcagatgggggctcagtcggggccccttccacagacagagccgtggcccctcaaggtggacagtgaggccgctgctcctccagctgcctctgtctcatcacaggccagaagtggaaagggtttcaaatccaagcccccgggttcctgtgtgcgttctacgcagcaaggcttcaaagtttcaaactggtttggaactcaaccaggtcctccaaaggaaaccaaggcaggcacaggatgggggcaggctggcttggcaggcagctgtgcggatccacccagagtgccttgggaggcagtggggttggctgtggctgctgtgagctgcagccaggcctctcccgcgtccccagggtctggaaggagggcctctgcacattttataagccacagactgcgaaggcctggagccccaccttccacccataacaaagaaagggatagtttcagaactgcttttatttggataactgactgaaggagtctcatttgtaaccaagatggaattcacagtatgttgttacattcacacttaaaaaatatatctctatgtacaggaatttgcaaagagatgtaaacatacattaatttccaagtacatttctccccttctccctggaggaaaaaaaaaaagccatccaatgaggcaaccccttcaaaataattttaatacaaaggatgcaaacatcaaaaaaaaaaaaaaa

SEQ ID NO: 4085 - protein, 156 aa, Homo sapiens
MGAQSGPLPQTEPWPLKVDSEAAAPPAASVSSQARSGKGFKSKPPGSCVRSTQQGFKVSNWFGTQPGPPKETKAGTGWGQAGLAGSCADPPRVPWEAVGLAVAAVSCSQASPASPGSGRRASAHFISHRLRRPGAPPSTHNKERDSFRTAFIWITD

SEQ ID NO: 4086 - DNA, 2687 bp, Homo sapiens
gaaagaaagaggggaagagtattaaagaccatttctggctgggcagggcactctcagcagctcaactgcccagcgtgaccagtggccacctctgcagtgtcttccacaacctggtcttgactcgtctgctgaacaaatcctctgacctcaggccggctgtgaacgtagttcctgagagatagcaaacatgcccaacagtgagcccgcatctctgctggagctgttcaacagcatcgccacacaaggggagctcgtaaggtccctcaaagcgggaaatgcgtcaaaggatgaaattgattctgcagtaaagatgttggtgtcattaaaaatgagctacaaagctgccgcgggggaggattacaaggctgactgtcctccagggaacccagcacctaccagtaatcatggcccagatgccacagaagctgaagaggattttgtggacccatggacagtacagacaagcagtgcaaaaggcatagactacgataagctcattgttcggtttggaagtagtaaaattgacaaagagctaataaaccgaatagagagagccaccggccaaagaccacaccacttcctgcgcagaggcatcttcttctcacacagagatatgaatcaggttcttgatgcctatgaaaataagaagccattttatctgtacacgggccggggcccctcttctgaagcaatgcatgtaggtcacctcattccatttattttcacaaagtggctccaggatgtatttaacgtgcccttggtcatccagatgacggatgacgagaagtatctgtggaaggacctgaccctggaccaggcctatagctatgctgtggagaatgccaaggacatcatcgcctgtggctttgacatcaacaagactttcatattctctgacctggactacatggggatgagctcaggtttctacaaaaatgtggtgaagattcaaaagcatgttaccttcaaccaagtgaaaggcattttcggcttcactgacagcgactgcattgggaagatcagttttcctgccatccaggctgctccctccttcagcaactcattcccacagatcttccgagacaggacggatatccagtgccttatcccatgtgccattgaccaggatccttactttagaatgacaagggacgtcgcccccaggatcggctatcctaaaccagccctgctgcactccaccttcttcccagccctgcagggcgcccagaccaaaatgagtgccagcgaccccaactcctccatcttcctcaccgacacggccaagcagatcaaaaccaaggtcaataagcatgcgttttctggagggagagacaccatcgaggagcacaggcagtttgggggcaactgtgatgtggacgtgtctttcatgtacctgaccttcttcctcgaggacgacgacaagctcgagcagatcaggaaggattacaccagcggagccatgctcaccggtgagctcaagaaggcactcatagaggttctgcagcccttgatcgcagagcaccaggcccggcgcaaggaggtcacggatgagatagtgaaagagttcatgactccccggaagctgtccttcgactttcagtagcactcgttttacatatgcttataaaagaagtgatgtatcagtaatgtatcaataatcccagcccagtcaaagcaccgccacctgtaggcttctgtctcatggtaattactgggcctggcctctgtaagcctgtgtatgttatcaatactgtttcttcctgtgagttccattatttctatctcttatgggcaaagcattgtgggtaattggtgctggctaacattgcatggtcggatagagaagtccagctgtgagtctctccccaaagcagccccacagtggagcctttggctggaagtccatgggccaccctgttcttgtccatggaggactccgagggttccaagtatactcttaagacccactctgtttaaaaatatatattctatgtatgcgtatatggaattgaaatgtcattattgtaacctagaaagtgctttgaaatattgatgtggggaggtttattgagcacaagatgtatttcagcccatgccccctcccaaaaagaaattgataagtaaaagcttcgttatacatttgactaagaaatcacccagctttaaagctgcttttaacaatgaagattgaacagagttcagcaattttgattaaattaagacttgggggtgaaactttccagtttactgaactccagaccatgcatgtagtccactccagaaatcatgctcgcttcccttggcacaccagtgttctcctgccaaatgaccctagaccctctgtcctgcagagtcagggtggcttttcccctgactgtgtccgatgccaaggagtcctggcctccgcagatgcttcattttgacccttggctgcagtggaagtcagcacagagcagtgccctggctgtgtccctggacgggtggacttagctagggagaaagtcgaggcagcagccctcgaggccctcacagatgtctaggcaggcctcatttcatcacgcagcatgtgcaggcctggaagagcaaagccaaatctcagggaagtccttggttgatgtatctgggtctcctctggagcactctgccctcctgtcacccagtagagtaaataaacttccttggctcct

SEQ ID NO: 4087 - protein, 471 aa, Homo sapiens
MPNSEPASLLELFNSIATQGELVRSLKAGNASKDEIDSAVKMLVSLKMSYKAAAGEDYKADCPPGNPAPTSNHGPDATEAEEDFVDPWTVQTSSAKGIDYDKLIVRFGSSKIDKELINRIERATGQRPHHFLRRGIFFSHRDMNQVLDAYENKKPFYLYTGRGPSSEAMHVGHLIPFIFTKWLQDVFNVPLVIQMTDDEKYLWKDLTLDQAYSYAVENAKDIIACGFDINKTFIFSDLDYMGMSSGFYKNVVKIQKHVTFNQVKGIFGFTDSDCIGKISFPAIQAAPSFSNSFPQIFRDRTDIQCLIPCAIDQDPYFRMTRDVAPRIGYPKPALLHSTFFPALQGAQTKMSASDPNSSIFLTDTAKQIKTKVNKHAFSGGRDTIEEHRQFGGNCDVDVSFMYLTFFLEDDDKLEQIRKDYTSGAMLTGELKKALIEVLQPLIAEHQARRKEVTDEIVKEFMTPRKLSFDFQ

SEQ ID NO: 4088 - DNA, 1556 bp, Homo sapiens
ggcacgagggagagcgcagcgcgcagcccggtgcagccctggctttcccctcgctgcgcgcccgcgccccctttcgcgtccgcaaccagaagcccagtgcggcgccaggagccggacccgcgcccgcaccgctcccgggaccgcgaccccggccgcccagagatgaccgcgaccgaagccctcctgcgcgtcctcttgctcctgctggctttcggccacagcacctatggggctgaatgcttcccggcctgcaacccccaaaatggattctgcgaggatgacaatgtttgcaggtgccagcctggctggcagggtcccctttgtgaccagtgcgtgacctctcccggctgccttcacggactctgtggagaacccgggcagtgcatttgcaccgacggctgggacggggagctctgtgatagagatgttcgggcctgctcctcggccccctgtgccaacaacgggacctgcgtgagcctggacgatggcctctatgaatgctcctgtgcccccgggtactcgggaaaggactgccagaaaaaggacgggccctgtgtgatcaacggctccccctgccagcacggaggcacctgcgtggatgatgagggccgggcctcccatgcctcctgcctgtgcccccctggcttctcaggcaatttctgcgagatcgtggccaacagctgcacccccaacccatgcgagaacgacggcgtctgcactgacatcgggggcgacttccgctgccggtgcccagccggcttcatcgacaagacctgcagccgcccggtgaccaactgcgccagcagcccgtgccagaacgggggcacctgcctgcagcacacccaggtgagctacgagtgtctgtgcaagcccgagttcacaggtctcacctgtgtcaagaagcgcgcgctgagcccccagcaggtcacccgtctgcccaacggctatgggctggcctaccgcctgacccctggggtgcacgagctgccggtgcagcagccggagcaccgcatcctgaaggtgtccatgaaagagctcaacaagaaaacccctctcctcaccgagggccaggccatctgcttcaccatcctgggcgtgctcaccagcctggtggtgctgggcactgtgggtatcgtcttcctcaacaagtgcgagacctgggtgtccaacctgcgctacaaccacatgctgcggaagaagaagaacctgctgcttcagtacaacagcggggaggacctggccgtcaacatcatcttccccgagaagatcgacatgaccaccttcagcaaggaggccggcgacgaggagatctaagcagcgttcccacagccccctctagattcttggagttcctcagagcttactatacgcggtctgtcctaatctttgtggtgttcgctatctcttgtgtcaaatctggtgaacgctacgcttacatatattgtctttgtgctgctgtgtgacaaacgcaatgcaaaaacaatcctctttctctctcttaatgcatgatacagaataataataagaatttcatctttaaaaaaaaaaaaaaaaaa

SEQ ID NO: 4089 - protein, 383 aa, Homo sapiens
MTATEALLRVLLLLLAFGHSTYGAECFPACNPQNGFCEDDNVCRCQPGWQGPLCDQCVTSPGCLHGLCGEPGQCICTDGWDGELCDRDVRACSSAPCANNGTCVSLDDGLYECSCAPGYSGKDCQKKDGPCVINGSPCQHGGTCVDDEGRASHASCLCPPGFSGNFCEIVANSCTPNPCENDGVCTDIGGDFRCRCPAGFIDKTCSRPVTNCASSPCQNGGTCLQHTQVSYECLCKPEFTGLTCVKKRALSPQQVTRLPNGYGLAYRLTPGVHELPVQQPEHRILKVSMKELNKKTPLLTEGQAICFTILGVLTSLVVLGTVGIVFLNKCETWVSNLRYNHMLRKKKNLLLQYNSGEDLAVNIIFPEKIDMTTFSKEAGDEEI

SEQ ID NO: 4090 - DNA, 4036 bp, Homo sapiens
ctggtttcttgccttaaggagcccattgcctttcccgctgaagtctagatgttgacatgtaataaagcgggcagcaggatggtggtggatgcggccaactccaatgggcctttccagcccgtggtccttctccatattcgagatgttcctcctgctgatcaagagaagctttttatccagaagttacgtcagtgttgcgtcctctttgactttgtttctgatccactaagtgacctaaagtggaaggaagtaaaacgagctgctttaagtgaaatggtagaatatatcacccataatcggaatgtgatcacagagcctatttacccagaagtagtccatatgtttgcagttaacatgtttcgaacattaccaccttcctccaatcctacgggagcggaatttgacccggaggaagatgaaccaacgttagaagcagcctggcctcatctacagcttgtttatgaatttttcttaagatttttagagtctccagatttccaacctaatatagcgaagaaatatattgatcagaagtttgtattgcagcttttagagctctttgacagtgaagatcctcgggagagagattttcttaaaaccacccttcacagaatctatgggaaattcctaggcttgagagcttacatcagaaaacagataaataatatattttataggtttatttatgaaacagagcatcataatggcatagcagagttactggaaatattgggaagtataattaatggatttgccttaccactaaaagaagagcacaagattttcttattgaaggtgttactacctttgcacaaagtgaaatctctgagtgtctaccatccccagctggcatactgtgtagtgcagtttttagaaaaggacagcaccctcacggaaccagtggtgatggcacttctcaaatactggccaaagactcacagtccaaaagaagtaatgttcttaaacgaattagaagagattttagatgtcattgaaccatcagaatttgtgaagatcatggaacccctcttccggcagttggccaaatgtgtctccagcccacacttccaggtggcagagcgagctctctattactggaataatgaatacatcatgagtttaatcagtgacaacgcagcgaagattctgcccatcatgtttccttccttgtaccgcaactcaaagacccattggaacaagacaatacatggcttgatatacaacgccctgaagctcttcatggagatgaaccaaaagctatttgatgactgtacacaacagttcaaagcagagaaactaaaagagaagctaaaaatgaaagaacgggaagaagcatgggttaaaatagaaaatctagccaaagccaatccccagtacacagtgtatagtcaagccagcaccatgagcattccggttgcaatggagacagatgggcctttatttgaagatgtgcagatgctgagaaagacagtgaaggacgaggctcatcaggcacagaaagatccgaagaaggaccgtcctcttgcacgccgcaagtccgagctgcctcaggacccccacaccaagaaagccttggaagctcactgcagggccgatgagctggcctcccaggacggccgctagcctccggggcgccgcgtcggggccgggcccgccagttcttttccggattctgtagaaaatacatacttcctgtgccataccaatcagttacactcaaagctttcttggaccccgttccgtaggcaataacgtgcgtccgcctcagcgcgagattaggagttcaaacaatggtgacttcccagagcccgctggcagagccgcgggttgacgacggtgtcctcgcagtgtcgccgccaccccagcgtagtccaagtcagactatttcacaaagtcagagcgataggaaagcaccctgcccttcatcttcatgttctcccaaatggaacttaggatcttttaacataggtggttctgtgataacatcagtgttttccaaatcaaaggaacgctttaaaaaataggacctattttttaagactttacagcctttgaaatggtttccacgtgattgttacgccagcagttctcgttttgtttgtttttcaatctcagtgaaatggctctttgctttcgagttctcacgcaacgtactgggcaaatgacaatcctcagccgctggtattttctaaggggtctcttcactttgatgagtgacatgaacaccgtgtctccttctcttgtgtgtacctaaagccatatttccaagtctgtggtactccaggattccaggagtaagcctgtagaagagatttattttaaaagagattgctctgaaatttatcttaaaagagcttgctctgtctaccttgacagaaattggagttttaaaattatgtgttaatatttttatttgcagatttcgtttccgtcaacttaaacattgttgcccttcaacaaggctcttgaattaataaaattatagtctctaagaattccacattttatggaaagttagagcaaaatcattttgagttaagccagttcttagcctaatgcaaactgcagcgcctttaagcataaagtaacacaacagcattgcacggggccggcactgccgctgccttcactgaaggctgcagtgctgttctgagagcttggaggaggcaccagcgaggatgacgtttagtggagctctttctgttgaaaagagctcacgttatcaacaccttgtaaggaaaatacagtgtctgagttttcatcggtcttcacatgctgctatatattccacagagttccttgcatgtactgagcttttgttttagatggaatagcacaaggagaaaaatctttaaacttagtgctttgtctattctttatttctctcagggtggccagtattttgacttatttatcctgcttgaaagctacttgagatgtgtactgctattctaaacacgtgatctagtttctttcatctctggcataagattatataacttaatgttaagtgtcttgaggcataaaagacaaaatgtggcttattttaggatctgttttttcatcgaggtctcgggtatcctttcaaagatagtgagaagcagacactgctccttgtgcagctctggtacctcctgcccactgctgtcacttcaagccactggcaatgcttctgtcctcgtgtcttggaggaaaatcacctggggggaggggacttcttgtggtaagagcaagtgcaggtatgaaatgcgaagattgccccagctaaaagtggacaagtccgctttgtgagatgaatacttcctgagaaacttgacaagtatctctccattttaccattatgaaaactatcattaaaaaaaacagtttagatgccttctccttttgagggaaaaagggtgctttttattgtataaagcagcgtcttatgtattttgatataccattgtttgaacttccgtctttagctgatagattctcaaatatccttgattttggatgttcagtatgtttgtgagagaggtttctgggaagactctctttttgccctcgggaaaaagcaaaatatcaatgtttgggtgactgtgtaaagctcagtgtgtaagaacatctttttgtctaggttttctttctgctctttattgaagacaaacactcaccaaaaagaaaaataaaagttttcagagaaactaattttctttggcaagagtattacttaatattttggcctcctaaagtttccctagttagtactcggactcctgtgctaattgtcagcttacatatcattgtatagagactgtttattctgtaccaaactgatttcaaaagtactacattgaaaataaaccggtgactgtttttcttcataaagttctgcgtttggcatcttcactctttccaaaatgtatctgtacatcagaaatgtcactattccaagtgtctttttagtgtggctttagtatggcttccttttaatattgtacatacattgtatctttgttttatggtaataagtaataaaaatgtagacttc

SEQ ID NO: 4091 - DNA, 916 bp, Homo sapiens
ctttcccgctgaagtctagatgttgacatgtaataaagcgggcagcaggatggtggtggatgcggccaactccaatgggcctttccagcccgtggtccttctccatattcgagttgaggctgtgaagctgggcagggtttcagctgagctgaggttggaagtccctgaccttcagctgtggccgcctacggagcagcagggagagcaaacccatggagaaccccgcggcccccaaagcatggacggagctgccagccttctcccctgcccttcttcctctactcccgacctgccagccttctcccctgcccttctgcctctactcccgacctgccaaccttagcctaaaatcagagctgctagaatcacacacactgtcgtagctggttttgtattgtaaatgagtcattctgttattttggaaacttatgtctcatgccaggatctgcagatagttctttttcaaaatattgtttagacaaaataaatttctttaaatataatatctctactttaaatgcctggggtgttgcatgcatttttctaggctagcaaagcttaaagattatttctataatttcagttacatttacctttatagatgggttactctaagtaacaaattaaacacacatggatcttctaactttggctttaaatcctaagaagagataggtaatatataaaagagtattaaaaagaaatggagagtaaaggtatatgtcgggcagatgcagtagaaaagcaagggtcatgacgtcaatgctgggcaaagctaaattgtgaagacaaaacaataatgaaacagggttattcatcacgctaaagcgtacagtccataggatgatataactaccatgaatttggcctaaatgattgaacattgaaacacataaagcgagaactgtaggggatt

SEQ ID NO: 4092 - DNA, 2259 bp, Homo sapiens
cagttgcttcagcgtcccggtgtggctgtgccgttggtcctgtgcggtcacttagccaagatgcctgaggaaacccagacccaagaccaaccgatggaggaggaggaggttgagacgttcgcctttcaggcagaaattgcccagttgatgtcattgatcatcaatactttctactcgaacaaagagatctttctgagagagctcatttcaaattcatcagatgcattggacaaaatccggtatgaaagcttgacagatcccagtaaattagactctgggaaagagctgcatattaaccttataccgaacaaacaagatcgaactctcactattgtggatactggaattggaatgaccaaggctgacttgatcaataaccttggtactatcgccaagtctgggaccaaagcgttcatggaagctttgcaggctggtgcagatatctctatgattggccagttcggtgttggtttttattctgcttatttggttgctgagaaagtaactgtgatcaccaaacataacgatgatgagcagtacgcttgggagtcctcagcagggggatcattcacagtgaggacagacacaggtgaacctatgggtcgtggaacaaaagttatcctacacctgaaagaagaccaaactgagtacttggaggaacgaagaataaaggagattgtgaagaaacattctcagtttattggatatcccattactctttttgtggagaaggaacgtgataaagaagtaagcgatgatgaggctgaagaaaaggaagacaaagaagaagaaaaagaaaaagaagagaaagagtcggaagacaaacctgaaattgaagatgttggttctgatgaggaagaagaaaagaaggatggtgacaagaagaagaagaagaagattaaggaaaagtacatcgatcaagaagagctcaacaaaacaaagcccatctggaccagaaatcccgacgatattactaatgaggagtacggagaattctataagagcttgaccaatgactgggaagatcacttggcagtgaagcatttttcagttgaaggacagttggaattcagagcccttctatttgtcccacgacgtgctccttttgatctgtttgaaaacagaaagaaaaagaacaacatcaaattgtatgtacgcagagttttcatcatggataactgtgaggagctaatccctgaatatctgaacttcattagaggggtggtagactcggaggatctccctctaaacatatcccgtgagatgttgcaacaaagcaaaattttgaaagttatcaggaagaatttggtcaaaaaatgcttagaactctttactgaactggcggaagataaagagaactacaagaaattctatgagcagttctctaaaaacataaagcttggaatacacgaagactctcaaaatcggaagaagctttcagagctgttaaggtactacacatctgcctctggtgatgagatggtttctctcaaggactactgcaccagaatgaaggagaaccagaaacatatctattatatcacaggtgagaccaaggaccaggtagctaactcagcctttgtggaacgtcttcggaaacatggcttagaagtgatctatatgattgagcccattgatgagtactgtgtccaacagctgaaggaatttgaggggaagactttagtgtcagtcaccaaagaaggcctggaacttccagaggatgaagaagagaaaaagaagcaggaagagaaaaaaacaaagtttgagaacctctgcaaaatcatgaaagacatattggagaaaaaagttgaaaaggtggttgtgtcaaaccgattggtgacatctccatgctgtattgtcacaagcacatatggctggacagcaaacatggagagaatcatgaaagctcaagccctaagagacaactcaacaatgggttacatggcagcaaagaaacacctggagataaaccctgaccattccattattgagaccttaaggcaaaaggcagaggctgataagaacgacaagtctgtgaaggatctggtcatcttgctttatgaaactgcgctcctgtcttctggcttcagtctggaagatccccagacacatgctaacaggatctacaggatgatcaaacttggtctgggtattgatgaagatgaccctactgctgatgataccagtgctgctgtaactgaagaaatgccaccccttgaaggagatgacgacacatcacgcatggaagaagtagactaa

SEQ ID NO: 4093 - protein, 732 aa, Homo sapiens
MPEETQTQDQPMEEEEVETFAFQAEIAQLMSLIINTFYSNKEIFLRELISNSSDALDKIRYESLTDPSKLDSGKELHINLIPNKQDRTLTIVDTGIGMTKADLINNLGTIAKSGTKAFMEALQAGADISMIGQFGVGFYSAYLVAEKVTVITKHNDDEQYAWESSAGGSFTVRTDTGEPMGRGTKVILHLKEDQTEYLEERRIKEIVKKHSQFIGYPITLFVEKERDKEVSDDEAEEKEDKEEEKEKEEKESEDKPEIEDVGSDEEEEKKDGDKKKKKKIKEKYIDQEELNKTKPIWTRNPDDITNEEYGEFYKSLTNDWEDHLAVKHFSVEGQLEFRALLFVPRRAPFDLFENRKKKNNIKLYVRRVFIMDNCEELIPEYLNFIRGVVDSEDLPLNISREMLQQSKILKVIRKNLVKKCLELFTELAEDKENYKKFYEQFSKNIKLGIHEDSQNRKKLSELLRYYTSASGDEMVSLKDYCTRMKENQKHIYYITGETKDQVANSAFVERLRKHGLEVIYMIEPIDEYCVQQLKEFEGKTLVSVTKEGLELPEDEEEKKKQEEKKTKFENLCKIMKDILEKKVEKVVVSNRLVTSPCCIVTSTYGWTANMERIMKAQALRDNSTMGYMAAKKHLEINPDHSIIETLRQKAEADKNDKSVKDLVILLYETALLSSGFSLEDPQTHANRIYRMIKLGLGIDEDDPTADDTSAAVTEEMPPLEGDDDTSRMEEVD

SEQ ID NO: 4094 - DNA, 2588 bp, Homo sapiens
gcgcggtgggcgtgatccgggcacttagggcaggatgaacgctgctttccaagatggcgacggagggaggagggaaggagatgaacgagattaagacccaattcaccacccgggaaggtctgtacaagctgctgccgcactcggagtacagccggcccaaccgggtgcccttcaactcgcagggatccaaccctgtccgcgtctccttcgtaaacctcaacgaccagtctggcaacggcgaccgcctctgcttcaatgtgggccgggagctgtacttctatatctacaagggggtccgcaaggctgctgacttgagtaaaccaatagataaaaggatatacaaaggaacacagcctacttgtcatgacttcaaccacctaacagccacagcagaaagtgtctctctcctagtgggcttttccgcaggccaagtccagcttatagacccaatcaaaaaagaaactagcaaactttttaatgaggaaagactaatagacaagtcacgagttacctgtgtcaaatgggttcccggttcggaaagccttttcctagtagcccactcgagtgggaacatgtacttatataatgtggagcacacttgtggcaccacagccccccactaccagcttctgaagcagggagagagctttgccgtgcacacttgcaagagcaaatccacgaggaaccctctccttaagtggacggtgggcgagggggccctcaacgagtttgctttctccccagatggcaagttcttagcgtgcgtgagccaggacgggtttctgcgggtgttcaactttgactcagtggagctgcacggtacgatgaaaagctactttgggggcttgctgtgtgtgtgctggagcccggatggcaagtacatcgtgacaggtggggaggacgacttggtgacagtctggtcctttgtagactgccgagtaatagccagaggccacgggcacaagtcctgggtcagtgttgtagcgtttgacccttataccactagtgtagaagaaggtgaccctatggagtttagtggcagcgatgaggacttccaagaccttcttcattttggcagagatcgagcaaatagtacacagtccaggctctccaaacggaactctacagacagccgccccgtaagtgtcacgtatcggtttggttccgtgggccaggacacacagctctgtttatgggaccttacagaagatatccttttccctcaccaacccctctcaagagcaaggacacacacaaatgtcatgaatgccacgagtcctcctgctggaagcaatgggaacagtgttacaacacccgggaactctgtgccgcctcctctgccacggtccaacagccttccacattcagcagtctcaaatgctggcagcaaaagcagtgtcatggacggggccattgcttctggggtcagcaaatttgcaacactttcactacatgaccggaaggagaggcaccacgagaaagatcacaagcgaaatcatagcatgggacacatttctagcaagagcagtgacaaactgaatctagttaccaaaaccaaaacggaccctgctaaaactctgggaacgcccctgtgtcctcgaatggaagatgttcccttgttagagccgctgatatgtaaaaagatagcacatgagagactgactgtactaatatttcttgaagactgtatagtcactgcttgtcaggagggatttatttgcacatggggaaggcctggtaaagtgggctcattgtcatccccaagccaggccagttctccaggtggaactgtagtgtagcgacctcactgctgcgcgcacagtctcccgggacttggactcgagggagtgacgaggaggagctccgagctgcgcctgagccgtgccagccggcggacctcaggcggtggacgtcggcgatagccgtgtggacggtgaccggctcactctgcggcgccgtgctcccgctgctcacccaaagaagttgtttccattttaaaccggtcttttggggctgcagtaaaaaataagaaatggagttttcttgctttttactctaaaattcaatgtaattaaatttcatatatatataatatatacatatatacatagtgtaaaataaaatgtttcttggacaagaaatcccctgaaattcagctgttatagtgcttcactgtttttgcactgatttttctataccttaggtggtcagaagacaaccttgaatgcactcatagagaaaactgttactttctgacgtaatgtaattcaggaagacagacgctgcaatcacagattttaaaaaattgtttgcacttaaaaatagttgaatgctggtggaaagttactttgcagatgggtgtaaggactcatggccctctgaggtgcggcgtgaagatgccctttttacccgttgacgtttattttacgtaaaataaactgttgtttccaatgcaatcaactctgtattatatgtataaatattgtaattctgcaattggggaaaatagttacttcactagtaattttcatcatttaagagtgatatttctaattcacaaaagttaatattaaaactatcttgaatat

SEQ ID NO: 4095 - DNA, 1954 bp, Homo sapiens
cgcatgcgcaggcgacagctcatggcgttcagggcctgacggttgctagggtgacagggacacaacatggcggcgggatctctaacgctctccttcgagggaccaccacggagatcctagtgcgggaccccgcctcagggaagtggaaagcagggggacaaccttcctgcttccttcttttccgtccagtgtcggcaaggggttgtcaccggcttccgcatccaagatgaagaactataaagcaattggcaaaataggagagggaacgttttctgaagttatgaagatgcaaagcctgagagatggaaactactatgcatgtaaacaaatgaagcagcgctttgaaagtattgagcaagtcaacaacctacgagagatccaagcactgaggcgcctgaatccgcacccaaacattcttatgttgcatgaagtggtttttgacagaaaatctggttctcttgcactaatatgtgaacttatggacatgaatatttatgagctaatacgagggagaagatacccattatcagaaaaaaaaattatgcactatatgtaccagttatgtaagtccctggatcatattcacagaaatggaatatttcacagagatgtaaaaccagaaaatatactaataaagcaggatgtcctgaaattaggggactttggctcctgccggagtgtctattccaagcagccgtacacggaatacatctccacccgctggtaccgggccccggagtgtctcctcactgatgggttctacacgtacaagatggacctgtggagcgccggctgtgtgttctacgagatcgccagtctgcagcccctctttcctggagtaaatgaactggaccaaatctcaaaaatccacgatgtcatcggcacacccgctcagaagatcctcaccaagttcaaacagtcgagagctatgaattttgattttccttttaaaaagggatcaggaatacctctactaacaaccaatttgtccccacaatgcctctccctcctgcacgcaatggtggcctatgatcccgatgagagaatcgccgcccaccaggccctgcagcacccctacttccaagaacagaggaaaacagagaagcgggctctgggcagccacagaaaagctggctttccggagcaccctgtggcaccggaaccactcagtaacagctgccagatttccaaggagggcagaaagcagaaacagtccctaaagcaagaggaggaccgtcccaagagacgaggaccggcctatgtcatggaactgcccaaactaaagctttcgggagtggtcagactgtcgtcttactccagccccacgctgcagtccgtgcttggatctggaacaaatggaagagtgccggtgctgagacccttgaagtgcatccctgcgagcaagaagacagatccgcagaaggaccttaagcctgccccgcagcagtgtcgcctgcccaccatagtgcggaaaggcggaagataactgagcagcaccgtcgtctcgacttcggaggcaacaccaagcccgaccgggccaggcctgggtgatctgctgctgagacgccacggagggctggggatgcgcctgcgtccgtttcgcgctggccggggctctgggtgctgccctgcgccctgccgcacccgcggcccgcgcagctgcctaggatgttctgggctaatatacttgtaaaaccaccgcattctagggttttctttcattttcgttaagaatttggggcaggaaatactttgtaactttgtatatgaatcaaaacaaacgagcaggcatttctgtgatgtgttgggcgtggttggaaggtgggttctgcgtgtcccttcccagcgctgctggtcagtcgtggagcgccatcatgtcttaccagtgacgctgctgacacccctgacttttattaaagaataagctgtcgttaaaaaaaaaaaaaaaaaaaaa

SEQ ID NO: 4096 - protein, 419 aa, Homo sapiens
MKNYKAIGKIGEGTFSEVMKMQSLRDGNYYACKQMKQRFESIEQVNNLREIQALRRLNPHPNILMLHEVVFDRKSGSLALICELMDMNIYELIRGRRYPLSEKKIMHYMYQLCKSLDHIHRNGIFHRDVKPENILIKQDVLKLGDFGSCRSVYSKQPYTEYISTRWYRAPECLLTDGFYTYKMDLWSAGCVFYEIASLQPLFPGVNELDQISKIHDVIGTPAQKILTKFKQSRAMNFDFPFKKGSGIPLLTTNLSPQCLSLLHAMVAYDPDERIAAHQALQHPYFQEQRKTEKRALGSHRKAGFPEHPVAPEPLSNSCQISKEGRKQKQSLKQEEDRPKRRGPAYVMELPKLKLSGVVRLSSYSSPTLQSVLGSGTNGRVPVLRPLKCIPASKKTDPQKDLKPAPQQCRLPTIVRKGGR

SEQ ID NO: 4097 - DNA, 6368 bp, Homo sapiens
cccccggcggagccagctgctgctcttcggtgctggccccggtgccggccccgttgcccagggaacaggctcccggcagcccccgcggcccggagtccatcccgcctcctccggcccggcggggccgacgagtccggaggggctgccgcgggagcccccaggtttccctagatgacaaataaacattccttttcctgcgtgaagatagtctgtggaaaccttggccatggcatcgatatcagagcctgttacattcagagagttctgcccgttgtactatctcctcaatgccattccgacaaagatccagaagggtttccgctctatcgtggtctatctcacggccctcgacaccaacggggactacatcgcggtgggcagcagcatcggcatgctctatctgtactgccggcacctcaaccagatgaggaagtacaactttgaggggaagacggaatctatcactgtggtgaagctgctgagctgctttgatgacctggtggcagcaggcacagcctctggcagggttgcagtttttcaacttgtatcttcattgccagggagaaataaacagcttcggagatttgatgtcactggtattcacaaaaatagcattacagctctggcttggagccccaatggaatgaaattgttctctggagatgacaaaggcaaaattgtttattcttctctggatctagaccaggggctctgtaactcccagctggtgttggaggagccatcttccattgtgcagctggattatagccagaaagtgctgctggtctctactctgcaaagaagtctgctcttttacactgaagaaaagtctgtaaggcaaattggaacacaaccaaggaaaagtactgggaaatttggtgcttgttttataccaggactctgtaagcaaagtgatctaaccttgtatgcgtcacggcccgggctccggctatggaaggctgatgtccacgggactgttcaagccacgtttatcttaaaagatgcttttgccgggggagtcaagccttttgaactgcacccgcgtctggaatcccccaacagtggaagttgcagcttacctgagaggcacctggggcttgtttcatgtttctttcaagaaggctgggtgctgagttggaatgaatatagtatctatctcctagacacagtcaaccaggccacagttgctggtttggaaggatccggtgatattgtgtctgtttcgtgcacagaaaatgaaatatttttcttgaaaggagataggaacattataagaatttcaagcaggcctgaaggattaacatcaacagtgagagatggtctggagatgtctggatgctcagagcgtgtccacgtgcagcaagcggagaagctgccaggggccacagtttctgagacgaggctcagaggctcttccatggccagctccgtggccagcgagccaaggagcaggagcagctcgctcaactccaccgacagcggctccgggctcctgccccctgggctccaggccacccctgagctgggcaagggcagccagcccctgtcacagagattcaacgccatcagctcagaggactttgaccaggagcttgtcgtgaagcctatcaaagtgaaaaggaagaagaagaagaagaagacagaaggtggaagcaggagcacctgtcacagctccctggaatcgacaccctgctccgaatttcctggggacagtccccagtccttgaacacagacttgctgtcgatgacctcaagtgtcctgggcagtagcgtggatcagttaagtgcagagtctccagaccaggaaagcagcttcaatggtgaagtgaacggtgtcccacaggaaaatactgaccccgaaacgtttaatgtcctggaggtgtcaggatcaatgcctgattctctggctgaggaagatgacattagaactgaaatgccacactgtcaccatgcacatgggcgggagctgctcaatggagcgagggaagatgtgggaggcagtgatgtcacgggactcggagatgagccgtgtcctgcagatgatggaccaaatagcacacagttacccttccaagaacaggacagctctcctggggcgcatgatggggaagacatccaacccattggcccccaaagcactttttgtgaagtccccctcctgaactcactcactgtgccttccagcctcagctgggccccaagtgctgaacagtggctgcctgggaccagagctgatgaaggcagccccgtggagcccagccaagagcaggacatcctaaccagcatggaggcctctggccacctcagcacaaatctctggcatgctgtcactgatgatgacacaggtcagaaagaaatacccatttctgaacgtgtcttggggagtgtgggaggacagctgactccggtctctgccttggcagccagcactcacaagccctggcttgagcagcctccacgggatcagacattgacgtccagcgatgaggaggacatctatgcccacgggcttccttcttcatcctcagagacgagtgtgacagagctcggacctagttgctcccagcaggacctgagccggctgggtgcagaggacgccgggctgctcaagccagatcagtttgcagaaagctggatgggctactcgggtcccggctatggcatcctcagcttggtggtctccgagaagtatatctggtgcctggactacaaaggcggcctgttctgcagcgcgttgccgggcgccgggctgcgctggcagaagtttgaagatgctgtccagcaggtggcagtctcgccctcaggagcccttctctggaagattgaacagaaatctaaccgggcttttgcttgtgggaaagtcaccatcaaggggaagcggcactggtacgaagccctgccccaggcagtgtttgtggccctgagcgatgacacggcctggatcatcaggaccagtggggacctatacttgcagacaggtctgagcgtggatcgcccttgtgccagagccgtaaaggtggactgtccctacccgctgtcccagatcacagcccggaacaatgtggtgtgggcgctgacagagcagagggccctcctgtaccgggagggcgtgagcagcttctgtccggaaggcgagcagtggaagtgtgacattgtcagcgaaaggcaagctttagaacccgtctgcataacgctcggggatcagcagactctctgggccctggacatccatgggaacctgtggttcagaactggcattatttccaagaagccccaaggagatgacgaccattggtggcaagtgagcatcacggactatgtggtgtttgaccagtgcagcttatttcagacgataatccatgccactcactcggtggccacagcagcccaagcccccgtagaaaaggtggcagataagctgcgcatggcgttttggtcccagcagcttcagtgccagccaagccttctcggggtcaataacagcggtgtctggatctcctcgggcaagaatgaattccacgtcgctaagggaagtctcataggcacctactggaatcatgtggttccccgtgggacagcttctgctacaaaatgggcctttgtgttggcttctgcagctcccacgaaggaagtggctgtgccagagcagcaaggacctgtgcagcgtcagcgcccagagcgcacagtcgcggccctccacggtgcagctgcctcccgaagccgagatgcgcgcctatgccgcctgccaggatgcgctgtgggcgctggacagcctcggccaggtgttcatcaggacgctctccaagagctgccccacgggcatgcactggaccaggctggacctctcccagctaggagctgtaaaattgacaagcttggcatgtggaaatcagcacatctgggcctgtgattccaggggtggagtttacttccgtgtagggactcagcctctcaatcccagtctcatgcttccagcctggataatgattgagccacctgtccagcccgccggggtcagcttggtcagcgtccattccagccccaacgaccagatgctgtgggtgcttgacagcaggtggaacgtgcacgtgcggaccgggatcaccgaggagatgcctgtggggaccgcctgggagcatgtgccagggttgcaggcctgccagctggcgctgagcaccaggaccgtgtgggcccgctgtccaaacggagacctcgcccggcggtacggcgtcacagacaagaaccccgccggggactactggaagaaaattcccggcagcgtgtcgtgtttcacagtgactgcgtcagatgagctgtgggctgtgggcccgcccggctacctcctccaacggctgacaaagacgttcagccactcgcacggcacccagaagagcagccaggccgccatgccccaccctgaggacctggaggacgagtgggaggtcatctgaaggagccctggccgagtcacgcggaggggcccggcgtctgtggcgggcacaggggcttcagagtgactccctggtggacgcgctgcctcaacacttgtccagacacctctggccaggttggacccgcacacttactttcatctatgttggtttctgtctcgttccagaacccacagcctccacccgtggctggcgtgattgctgcagcagtggcgcctcctagctcaggacagtggcgactgcccggctgcatgcactccgattacccacgtgctgccgtcctggtctcatccacagatagctccagcttttgttggtgggagtggtctccggaggcctcccagaaccaagggtagccgggcagctggtttggcccagggcctccttccacattagtagccccagggccagatggagccaaaggtcagctctctgcagcgcgggatgtgctcggtgatggctttgtcccatcataggggggtgtccccccagagacaaagctgcagagcacattccatgccagacgctctggccaggaagctgaggccgggcttgagaggagagcgctggccatgccaggagagaacccacgcacatgcacaccacaacacacaacacacctcacctcacaccacagcacacctcaccacaccacaccgcactgcaccatacctcaccacatctcaccacaccacagcacacctcaccacacaacacaccacaccccacaccgcactgcaccgcaccgcaccgcaccgtacctcgccacatctcaccacaccacaccacaccacacctcactgcccacacacggcgcaggctgcccgcctcctggagagcacacttcagctgaaacagtaaagcctgatgggtgcaaatggaacctggatgtgtgcacgtgtgtcccaggtagggacggcacaggagggtgcatggggcgtgggggagctgagcaagggtcgctcacttagaaatgtctttggaatggtgtttaactaatgctgctggcggacatcctaaaaccagatgcatcctcagaggacgagtctactaattattgcctttgttgttgtattacaaatctgcataaaatacctcatttcaaatcaaatcttacaaatttagaagagagatatgttttccgaaaacagtggaagccctttgttccttcccgggtttgtcctgagcctgcactgtcctcgcctgcagcctcagaggggcaggcatccccgcacagacttgactggcagggcggtcacgggacctgcgggctggctccgagtggcagcccatgccttctgcggggtatgggttgacacttgacaggttgaaaccagtgcctctatggacggctgctgtggccccttcagacaatgggcagtgcccaccccgcccactggcatctgcgtgtgagggctaggccgccctgccacacatcccgccccctcccggaggcagcttcaggacaggacaccaggctggctgctttttttagcctgcccctggcccaggcccagtccttggtgtcagggagcccccaggccgcaggtggagggtgataaaatatgttctctgacaggacccagccagccacataggtggaggttttccatgtccaaatgaggtcaagatgccgaaatcccagatctgacttcacacttcccttttctagaaccttttgtaaaagttggtggcagcagaggcagccccaggccgggctgcatctctctgtgtctgttgtgccttgcccggcgcctcacggatggcaaagctctcctcacccatgggactgtagtgcaattaaacccgcgtctaggtgatgcttttaaagttgtagcttcgtgctttgtacagttttctttctggttttaatttttagttgtgctttgagtcagtgcaataaactagactttttcc

SEQ ID NO: 4098 - DNA, 3899 bp, Homo sapiens
agcttgagcgcggcggcggcgttgttcagtcagagcgagaacattccagaggtcgcccagctccggcgctgacgggtgtggaccgcggacgtcgctgggacagcccctccccgctgctcggcggcggcatctggcccggccgctcctcgctgcgcttcgcctccgcctcctcggactcggactcgggtttatatcgcgcctcacttcatcccagtcccgggcgagcagcgttgggtttatgtctttatttgacgaaaacgagctgttgcgcagccattggtacctgtattggggaaacatagcatacaagcaagaagcttacagcctcagtggcgaaaattttttcatgtcagagaccgagaactcttgcagtcgtttatgtcatcccttcttctccagacagaagataccaaaaagttgcaatcaaagatctcttcatcttattgataaagccactaataagccaaaatgtctgtcaatgtcaaccgcagcgtgtcagaccagttctatcgctacaagatgccccgtctgattgccaaggttgagggcaaaggcaatggaatcaagacagttatagtcaacatggttgacgttgcaaaggcgcttaatcggcctccaacgtatcccaccaaatattttggttgtgagctgggagcacagacccagtttgatgttaagaatgaccgttacattgtcaatggatctcatgaggcgaataagctgcaagacatgttggatggattcattaaaaaatttgttctctgtcctgaatgtgagaatcctgaaacagatttgcatgtcaatccaaagaagcaaacaataggtaattcttgtaaagcctgtggctatcgaggcatgcttgacacacatcataaactctgcacattcattctcaaaaacccacctgagaatagtgacagtggtacaggaaagaaagaaaaagaaaagaaaaacagaaagggcaaagacaaggaaaatggctccgtatccagcagtgagacaccaccaccaccaccaccaccaaatgaaattaatcctcctccacatacaatggaagaagaggaggatgatgactggggagaagatacaactgaggaagctcaaaggcgtcgaatggatgaaatcagtgaccatgcaaaagttctgacactcagtgatgatttggaaagaacaattgaggagagggtcaatatcctctttgattttgttaagaaaaagaaagaagagggtgttattgattcatctgacaaagaaatcgttgctgaagcagaaagactggatgtaaaagccatgggccctcttgttctaactgaagttctttttaatgagaagattagagaacagattaagaaatacaggcgccatttcctacgattttgtcacaacaacaaaaaagcccaacggtaccttcttcatggtttggagtgtgtggtagcaatgcatcaagctcagcttatctccaagattccacatatcttgaaggagatgtacgatgcagaccttttagaagaagaggtcatcatcagctggtcggaaaaggcctctaagaaatatgtctccaaagaacttgccaaagagattcgtgtcaaagcagaaccatttataaaatggttgaaggaggcagaggaagaatcttctggtggcgaagaagaagatgaagatgagaacattgaggtggtgtattcgaaggctgccagtgtaccgaaagttgagactgtaaagtcagacaacaaggatgacgacatcgatattgatgccatttaaagggatggatgcaacctagcttaacagtataatgctgcaaattttcctccattatcagccagaagtgcaacatgtatgtgcaaaagctaaaatggcttaacatcatgctacactttacactaaaaatctattactgtgagtggtctgttattaagcccaatgagacatctagggagtccatacacatcagtgagcagatgtagtttgcttatttatagcatgtttctttttgaaaaactagtggtggacacatttggatcacatttatacagttataaaaataaaggtttgattttggtcgttcttcagatgtttggctctgaatgacttaagctgaagtaactggctccttactttaaatgttctgccatcatttcacctgatgagcattcttggagcctgccagatattgttaggtcctggggctgcaaagaggtcctcaacaggatgtaaagcaaacttaattgtaattaatttattcagcccattaagaaagtactaaagttttatctctgtagttcctcaaattggcatctggtaatgtacattgtgaggtagactgataatgaaatgacagtgcaacatcttaaccaagaagtaaatatgacctcagtgtcctataaataatgtaagagcaggatttgaaacttggagagctgttttctcatttcatgtacacttgccccaaattgtctttgaagtcgtgtgcattgcacgttggatgagccagggaaattattacattaacaagcattttgtgtgtgcgtagtagttactttgtactgagagaacttgctttggggtgcaattaaacaataaactgattttatttgggagaaacaaggaagggtgcacttaactagcaacctaagcatgatttttcagcttttgcccttagggtttaaattacaattccaaaatgttagacatactgtattttttcgttcagtgtggctttaattttcccctcttgcagtttgttctgtaatgccttttacatttggacacatagtttatgctttttagattttggttgctttcttgccaaaataagtgttaactgtgtttcaaacttgattttctttcttttttctttttttttcttccagaatgtcttatttaaaaagaaagctaaaagcatacttctaagtcagagcctctattttggtgtaagacttgggatattttttacttcacattgaatatagccaggcacccaagaagtctgatggccacctgagtgcaggtgacaaggacctgacagagcccatgcagggctttagatttggacacacaagagttgataacttcctcatgaactccttgcctgatctaaactcatattatgggttctgactgtttgagtaatcgtcttcaaggttaaacctcttggcagttacccttttcacaaagtgcacagtgggaatcgagaatcgatagggttaattttggagcagtggcttataccattcacctctgtttttttgtgattatttcacagataatgagaccttaataacaaataggcgtaaaaaaattttcacattgaaatgatagaaacatttgatgtaataaaacttggttggcttgatattttaaggaattgaaacctagcaatcttattggagagacaagaattggtctccagctgcctttgatcaagattcgggtgcaagtggagcaggagccatatacctggagggaatgtgctttgtcacaccaaagaggattttttttttcttcaaacttgtatgttgcctaggtttcaaattctttgccgcaaggctgatctgctttcattaactggaattctgtaggagatactggtgacctaagctaagttgcactcagcatactcagtgtcaagctaatgaggttctattataaaggttctacttttaatctgagggaaaacatgttcagggcttctagaacactaaaaaatttggcttaaaccagtgttcagtctggtgccaaacttcgaatggaatacaaattcacataatctgaactttgttcacaggttatcctaatagagtaattcttcactttgctctattgaactgtcttaaggatttgtttaaacagctaagttacttgattaaaataatgataaaattgtaaaaaaaaaaaaa

SEQ ID NO: 4099 - protein, 431 aa, Homo sapiens
MSVNVNRSVSDQFYRYKMPRLIAKVEGKGNGIKTVIVNMVDVAKALNRPPTYPTKYFGCELGAQTQFDVKNDRYIVNGSHEANKLQDMLDGFIKKFVLCPECENPETDLHVNPKKQTIGNSCKACGYRGMLDTHHKLCTFILKNPPENSDSGTGKKEKEKKNRKGKDKENGSVSSSETPPPPPPPNEINPPPHTMEEEEDDDWGEDTTEEAQRRRMDEISDHAKVLTLSDDLERTIEERVNILFDFVKKKKEEGVIDSSDKEIVAEAERLDVKAMGPLVLTEVLFNEKIREQIKKYRRHFLRFCHNNKKAQRYLLHGLECVVAMHQAQLISKIPHILKEMYDADLLEEEVIISWSEKASKKYVSKELAKEIRVKAEPFIKWLKEAEEESSGGEEEDEDENIEVVYSKAASVPKVETVKSDNKDDDIDIDAI

SEQ ID NO: 4100 - DNA, 1355 bp, Homo sapiens
gcccgccgccgccatgcccttctccaacagccacaacgcactgaagctgcgcttcccggccgaggacgagttccccgacctgagcgcccacaacaaccacatggccaaggtgctgacccccgagctgtacgcggagctgcgcgccaagagcacgccgagcggcttcacgctggacgacgtcatccagacaggcgtggacaacccgggccacccgtacatcatgaccgtgggctgcgtggcgggcgacgaggagtcctacgaagtgttcaaggatctcttcgaccccatcatcgaggaccggcacggcggctacaagcccagcgatgagcacaagaccgacctcaaccccgacaacctgcagggcggcgacgacctggaccccaactacgtgctgagctcgcgggtgcgcacgggccgcagcatccgtggcttctgcctccccccgcactgcagccgcggggagcgccgcgccatcgagaagctcgcggtggaagccctgtccagcctggacggcgacctggcgggccgatactacgcgctcaagagcatgacggaggcggagcagcagcagctcatcgacgaccacttcctcttcgacaagcccgtgtcgcccctgctgctggcctcgggcatggcccgcgactggcccgacgcccgcggtatctggcacaatgacaataagaccttcctggtgtgggtcaacgaggaggaccacctgcgggtcatctccatgcagaaggggggcaacatgaaggaggtgttcacccgcttctgcaccggcctcacccagattgaaactctcttcaagtctaaggactatgagttcatgtggaaccctcacctgggctacatcctcacctgcccatccaacctgggcaccgggctgcgggcaggtgtgcatatcaagctgcccaacctgggcaagcatgagaagttctcggaggtgcttaagcggctgcgacttcagaagcgaggcacaggcggtgtggacacggctgcggtgggcggggtcttcgacgtctccaacgctgaccgcctgggcttctcagaggtggagctggtgcagatggtggtggacggagtgaagctgctcatcgagatggagcagcggctggagcagggccaggccatcgacgacctcatgcctgcccagaaatgaagcccggcccacacccgacaccagccctgctgcttcctaacttattgcctgggcagtgcccaccatgcacccctgatgttcgccgtctggcgagcccttagccttgctgtagagacttccgtcacccttggtagagtttatttttttgatggctaagatactgctgatgctgaaataaactagggttttggcctgc

SEQ ID NO: 4101 - DNA, 2615 bp, Homo sapiens
aggacggcgggaagaggagtgcggaacccgcgggaggatgtgcacagagggcccaggaggagcctcaggagccggactgccgttggccaaccgagtccccagggagacacttaagggaaattaaactgcagagtgcaagagatgcctcagtcaagtcagccaaaaacacgcgggtcatccccaagccccagagagtgacagagccccgatgacacggacacctcggctgctgtcacttccctggttcgggcctcccacaggctttgaattgaaggcgagtgcctcagaatttgcatccattgttctgtctttcctgggaagttattcatcctggtggccagcccaccgacaaaatggatttggatctactggacctgaatcccagaattattgctgcaattaagaaagccaaactgaaatcggtaaaggaggttttacacttttctggaccagacttgaagagactgaccaacctctccagccccgaggtctggcacttgctgagaacggcctccttacacttgcggggaagcagcatccttacagcactgcagctgcaccagcagaaggagcggttccccacgcagcaccagcgcctgagcctgggctgcccggtgctggacgcgctgctccgcggtggcctgcccctggacggcatcactgagctggccggacgcagctcggcagggaagacccagctggcgctgcagctctgcctggctgtgcagttcccgcggcagcacggaggcctggaggctggagccgtctacatctgcacggaagacgccttcccgcacaagcgcctgcagcagctcatggcccagcagccgcggctgcgcactgacgttccaggagagctgcttcagaagctccgatttggcagccagatcttcatcgagcacgtggccgatgtggacaccttgttggagtgtgtgaataagaaggtccccgtactgctgtctcggggcatggctcgcctggtggtcatcgactcggtggcagccccattccgctgtgaatttgacagccaggcctccgcccccagggccaggcatctgcagtccctgggggccacgctgcgtgagctgagcagtgccttccagagccctgtgctgtgcatcaaccaggtgacagaggccatggaggagcagggcgcagcacacgggccgctggggttctgggacgaacgtgtttccccagcccttggcataacctgggctaaccagctcctggtgagactgctggctgaccggctccgcgaggaagaggctgccctcggctgcccagcccggaccctgcgggtgctctctgccccccacctgcccccctcctcctgttcctacacgatcagtgccgaaggggtgcgagggacacctgggacccagtcccactgacacggtggcggctgcacaacagccctgcctgagaagccccgacacacggggctcgggcctttaaaacgcgtctgcctgggccgtggcacagctgggagcctggttcagacacagctcttccagggcagcggctccactttctcatccgaagatggtggccacagactgacccccatctgagctggggggatgttctgcctctccctgggtctggggacaggcccgcttgctgggtacctggtccccactgctgagctggcccttggggagaggtgattctcagggctggagcctggggtgtcctacagtgactccctgggagccgcctgcttcttctctccatatggaagcccaactggggttgcgtctgaggcctgccccctgggctggggcctcagaccccctcagccttgggaccgtgcccacgagggtcttccctcctgcacacagggcagtccttactcccccaccactcaggccacagtggggctgcaggcaggcggctcctcctcacccacctctgggtccttggctcccgggggccccacctcggcacacactgtgccccacaaaacttcagtgtggtacaaggtggagaaagcatatcccaccaacctccagtgtcagggtccaggagagcctgggggtggggggactgccttgtctctagtagtgtggcctgtgccagcaccacagccggtcagaggagcgcaggcagcgcagggctggcacgtgacaggctcgtcagccacctgggaacacagttctgggcaaagaggatccgaggttgagaggaaggagggtcccggtgtatcctggccctgggggtctgggcgtccagctcagccctggcctggctgggtggtattctggtagggatatggcaggactcctggcagggccacctgcaggaccctgtcctgcagtcccacactgtgcagacccagtcccacactgtggccaggccttacatctggctggaaagcagagcctcctgggaacacatctggctgcacaggctgaaatatccacccagcaggcagagtggcgtggcctccccatgggcacagtggtgacccccttgattcccaccgtacaaccccctccaccccccactcagtgcctccacatgctgcctggcacagaccaggcctttgacaaataaatgttcaatggatgcaaaaaaaaaaaaaaaaaaaaaaaaaaaaaaaaaaaaaaaaa

SEQ ID NO: 4102 - protein, 346 aa, Homo sapiens
MDLDLLDLNPRIIAAIKKAKLKSVKEVLHFSGPDLKRLTNLSSPEVWHLLRTASLHLRGSSILTALQLHQQKERFPTQHQRLSLGCPVLDALLRGGLPLDGITELAGRSSAGKTQLALQLCLAVQFPRQHGGLEAGAVYICTEDAFPHKRLQQLMAQQPRLRTDVPGELLQKLRFGSQIFIEHVADVDTLLECVNKKVPVLLSRGMARLVVIDSVAAPFRCEFDSQASAPRARHLQSLGATLRELSSAFQSPVLCINQVTEAMEEQGAAHGPLGFWDERVSPALGITWANQLLVRLLADRLREEEAALGCPARTLRVLSAPHLPPSSCSYTISAEGVRGTPGTQSH

SEQ ID NO: 4103 - DNA, 5544 bp, Homo sapiens
caggtgatcctctacgatcccgccgccggtcccccaggcagcgcaggcccccggcgagccgccactgctgcagttcccaagatgtttgccttcgatgccgtcttcccccaggactccgagcaggccgaagtctgctcggggaccgtggccgacgtgctccagtcggtggtcagtggggctgatggctgcattttttcctttggccacatgagcctgggcaagtcgtacaccatgatcgggaaggacagctcaccccagagcctgggcatcgtgccctgcgccatctcctggctcttcaggctcatcgaggagcgcagggagaggacgggcacccgcttctccgtccgggtctcagccgtggaggtgtgcgggcgcgaccagagcctgcgggacctgctggccgaggtggcccctggcagcctccaggacacccagtctccgggagtgtacctgcgggaggaccccgtgtgtggggcgcagctccagaaccaaagcgagctgcgggcacccacggccgagaaggcggctttctacctggatgcggccctggcggcccgcagcaccagccgagcgggctgtggcgaggacgcccgacgcagctcccacatgttgttcacgctgcacgtctaccagtaccgcatggagaagtgcggccggggaggaatgtccggaggccgcagccgcctgcacctcatcgacctgggcagctgtgaggcggcggctggcagggccggggaggctgctgggggtcccctgtgtctgtccctgtcggccctgggcagcgtcatcttggccctggtcaacggagccaagcatgtgccgtatcgggaccacaggctcaccatgctgctgcgtgaatccctggccaccgctggctgccgcaccaccatgatcgcccacgtgtcggatgcgccagcccagcacgcagagacactcagcaccgtgcagctcgccgcccgcatccaccgcctgcgcaggaagaaggccaagtacgcctccagctcctctggcggggagagctcctgtgaggaaggccgggcccgtcggcccccgcacctgcggcccttccacccacgcactgtggccctggaccccgaccgcacgcctccctgcctgcccggtgaccccgattactcctccagcagcgagcagtcctgtgacacggtcatctacgtggggcccggtggggcggcgctgtcagaccgggagctcaccgacaacgaaggtccgcctgacttcgtgcccatcatccctgccctgagccgccaccggccctccaagggtccccgagacgcagaccacttccgctgcagcaccttcgcggagctgcaggagcggctggaatgcatggacggcaacgagggtccctcaggaggtccaggtggcaccgacggagctcaggccagccccgcccgagggggccggaagccctcgccaccagaggctgcatcccccaggaaggctgtgggcaccccgatggctgccagcacccctcgaggcagttctggtccagacacccaccagggtacccctgagccctgcaaggccattgtctggggtgaccagagagaggacagcagcgcttggcctgagctgctggtcccggaaaaggctgcagtgagtggaggcaggaggccactgcccagcccggctcccccacctcctcagttgctggaagcctgcagagccccagaagagcctgggggagggggcactgatggagtggcacggacccctcccgtgggcatgagtgggcaggtggctgggtccccgatgcttcctggggccacctgcccccgcctggctgctggcagtcgctgtccggagcggggcctgctcaccaccacagtgaccctgcagcggccagtggagctcaacggcgaggacgagctggtgttcacggtggtggaggagctgtccctgggggcgcttgccggagctgggcggcccaccagcctggctagcttcgacagtgactgctccctgcgggccctggcctcggggtcccggccggtcagcatcatcagcagcatcaatgatgagtttgacgcctacacctctcaggcccctgagggggggcccctggagggggcagcctgggccggcagcagtcacggctcctccatcagctcctggctcagcgaggtcagcgtctgcactgccgacagccgtgaccccacgccgcagccccgcttcagccccgactcgctggcagggcttgaccctgggggcccccctgccctggatggttccctgggggatggaagctctgggttcctggggccagacagacctgacagtcctgggccaacctggggtccgtgccctggggaagtggctgcagtggccccatcccgacccggcagggagccccaggccgggccctcgcggtgggcatccgcagcccagaccatccactccagcctcccccggaaaccgaggactgcctctgccaccacccgtgtgggctgtgctcgcctgggccagagcccacctggccgtggaggcctgtttgaggacccatggctgctccgggtaggggagtgtgatacccaggcagcttctgctggcagggcccccagccccacacttggctccccccggctgcctgaggcccaggtgatgctagcctgtgcccagagagtggtggacgggtgtgaggtggcagccagggcggcccgcaggccagaggctgtggctcggatcccaccgctgcggaggggtgccaccacgctgggtgtgacaacgccagctgtgtcctggggagatgctcccacggaggtggtggcctgctcggggagcctgaaggcctcccccaccagcaagaagggtctggctcccaaggcgggcttcctcccgaggcccagtggggcggcccccccggccccacccacgcggaagtccagcctggagcagaggagcagcccggcctcggcccctccgcatgctgtgaacccggcgcgggtcggggctgctgctgtccttcgaggggaggaggagcccagacccagcagccgggctgaccactctgtccccagggccacgtccagcctgaaggcccgggccagcaaggtagaagcggcacaccgtctcgccggacacgcgtctctggagcggtacgaaggcctggcgcacagcagcagcaagggccgggaagcccctgggcggcctccccgggctgtacccaagctgggtgtgccaccctccagccccacacacggtccagctcccgcctgtaggagcggcgcagccaaggctgtgggggcccccaagccccctgttggtggaggcaagggccgtggcctagtggctggtgggtcgcgggctctggggccttcggtgaagctgtctacggcctctgtgacgggcaggagccctggcggccctgtggcaggtcccagagcagccccacgggccgggcccagtgtcggggcgaaggctggccggggtaccgtcatgggcacaaagcaggcgctccgggctgctcacagccgcgtccatgagctgtcagccagtggagccccgggccggggtggctcctcgtggggctcggcggactcagacagcggccatgacagcggcgtgaacgtgggggaggagcggccacccacgggcccggccctgccctccccctacagcaaggtgaccgccccacggcggccccagcgctacagcagcggccatggcagcgacaacagcagcgtgctgagtggagagctgccgcccgccatgggccgcaccgcccttttccaccacagcggtggcagcagcggctatgagagcctgcggcgcgacagcgaggccaccggcagcgcctcctccgcccctgactccatgagcgagagtggggctgcctccccaggcgcccgcacccgcagcctcaagtcccccaagaagagggccacaggtctgcagcggcggcgcctgattcccgccccactgcccgacaccactgccctgggccgtaagcccagcctccccgggcagtgggtggacctgcccccgcccctggctggctccctgaaggagccgttcgagatcaaggtgtacgagatcgatgacgtggagcgccttcagcggccccgccccaccccgagggaggcccccacccagggtctggcgtgcgtcagtacaaggctgcggctggcggagcgcaggcagcagcggctgcgggaggtgcaggccaagcacaagcacctgtgtgaggagctggccgagacccagggccggctgatgctggagcctggccgctggctggagcagtttgaggtggacccggagctggagcccgagtcggccgagtacctggcggccctggagcgagccacggcggccctggagcagtgcgtgaacctgtgcaaggcgcacgtcatgatggtcacctgcttcgacatcagcgttgcagccagtgctgccatcccggggccgcaggaggtggacgtctgaggctgggcgccggacaagaggagggggcgtgcagcgggctggaggacgggacgtgggacggagcgaggatgtggtgggggctgcggggggaggatgcggaggggtttctgtgcaggacgggagtctcagagaggagacggagtgtgggggagggagggccggccacgcggtggacagagcgagggtgccagggtgacccgaagaccgtcaccacccgacagcaacgcaagtgcctttgaccttgatttggacttttctcccttttgcatttggtgctacagacttgagacaccagcagaagttgtgttcagcccggccccgctgcgcctgtccgggccggggctggcgccggttgtgtttgtgtccaccttgccttctttgcagccaagcagtttttgtggagtgggacttacctgcacgccccaggggtctttcaggattcaggatgacttttcttttacaatggtttcctctcggcagagcccgggttgtgggggatctgtgtgggttctcaacgcagatccatcctggggtctcccgggcagggatggctgacctcgagtcccctcccttcccgagaacctgctctgtcccgagggcagctaacaagggctgagccccaggtacaggttgcctcctccacggcaggaatttttaccaaaaccacaagcaaaaaacaaaacagaccaccacgaccaacaacaaagatggggggtagggttttgtaaaggttctgttaggttcatatttttatatcattttgcccataaatgcggaatttgccgtgggaatttgaagacaaatgatctatgtttttatggttttctagggaaggtgttctgggggccgggctctctccagctgtgggaggcctgctccctctggggggcaccctgggcagggtgggggggccttgggaggcgcttcttgccaaatgcagacgaggggtgagcctgccagcgtttgcgacgtccccgcacgacaggctcatactttctgaggatcgtgcatagcataggacgtctgaacctttgtacaaatgtgtagatgacatcttgctacagcttttatttgtgaattaaagatgcattgatggtt

SEQ ID NO: 4104 - protein, 1743 aa, Homo sapiens
MHLLQAPASHEDLDAPHGGPSLAPPSTTTSSRDTPGPAGPAGRQPGRAGPDRTKGLAWSPGPSVQVSVAPAGLGGALSTVTIQAQQCLEGMWSVSRVNSFLPPACLAEAAVAAVAVADTVRECPPVAGPDGLSKAWGRGGVCTSALVTPTPGSVGGSTGPSAAASFFIRAMQKLSLASKRKKPHPPPPPATRGTSTYPTDFSGVLQLWPPPAPPCLLRAASKTKDNPGSIGKVKVMLRIWPAQGAQRSAEAMSFLKVDPRKKQVILYDPAAGPPGSAGPRRAATAAVPKMFAFDAVFPQDSEQAEVCSGTVADVLQSVVSGADGCIFSFGHMSLGKSYTMIGKDSSPQSLGIVPCAISWLFRLIEERRERTGTRFSVRVSAVEVCGRDQSLRDLLAEVAPGSLQDTQSPGVYLREDPVCGAQLQNQSELRAPTAEKAAFYLDAALAARSTSRAGCGEDARRSSHMLFTLHVYQYRMEKCGRGGMSGGRSRLHLIDLGSCEAAAGRAGEAAGGPLCLSLSALGSVILALVNGAKHVPYRDHRLTMLLRESLATAGCRTTMIAHVSDAPAQHAETLSTVQLAARIHRLRRKKAKYASSSSGGESSCEEGRARRPPHLRPFHPRTVALDPDRTPPCLPGDPDYSSSSEQSCDTVIYVGPGGAALSDRELTDNEGPPDFVPIIPALSRHRPSKGPRDADHFRCSTFAELQERLECMDGNEGPSGGPGGTDGAQASPARGGRKPSPPEAASPRKAVGTPMAASTPRGSSGPDTHQGTPEPCKAIVWGDQREDSSAWPELLVPEKAAVSGGRRPLPSPAPPPPQLLEACRAPEEPGGGGTDGVARTPPVGMSGQVAGSPMLPGATCPRLAAGSRCPERGLLTTTVTLQRPVELNGEDELVFTVVEELSLGALAGAGRPTSLASFDSDCSLRALASGSRPVSIISSINDEFDAYTSQAPEGGPLEGAAWAGSSHGSSISSWLSEVSVCTADSRDPTPQPRFSPDSLAGLDPGGPPALDGSLGDGSSGFLGPDRPDSPGPTWGPCPGEVAAVAPSRPGREPQAGPSRWASAAQTIHSSLPRKPRTASATTRVGCARLGQSPPGRGGLFEDPWLLRVGECDTQAASAGRAPSPTLGSPRLPEAQVMLACAQRVVDGCEVAARAARRPEAVARIPPLRRGATTLGVTTPAVSWGDAPTEVVACSGSLKASPTSKKGLAPKAGFLPRPSGAAPPAPPTRKSSLEQRSSPASAPPHAVNPARVGAAAVLRGEEEPRPSSRADHSVPRATSSLKARASKVEAAHRLAGHASLERYEGLAHSSSKGREAPGRPPRAVPKLGVPPSSPTHGPAPACRSGAAKAVGAPKPPVGGGKGRGLVAGGSRALGPSVKLSTASVTGRSPGGPVAGPRAAPRAGPSVGAKAGRGTVMGTKQALRAAHSRVHELSASGAPGRGGSSWGSADSDSGHDSGVNVGEERPPTGPALPSPYSKVTAPRRPQRYSSGHGSDNSSVLSGELPPAMGRTALFHHSGGSSGYESLRRDSEATGSASSAPDSMSESGAASPGARTRSLKSPKKRATGLQRRRLIPAPLPDTTALGRKPSLPGQWVDLPPPLAGSLKEPFEIKVYEIDDVERLQRPRPTPREAPTQGLACVSTRLRLAERRQQRLREVQAKHKHLCEELAETQGRLMLEPGRWLEQFEVDPELEPESAEYLAALERATAALEQCVNLCKAHVMMVTCFDISVAASAAIPGPQEVDV

SEQ ID NO: 4105 - DNA, 2947 bp, Homo sapiens
cactactgccctgcacctgcagcccccccgtggcgggaggcatggaggaggtcatcgtggcccaggtggaccatggcttgggctcagcatgggtccccagccatcggcgggtgaacccacccacactgcgcatgaagaagctgaactggcagaagctgccatccaacgtggcacgtgagcacaactctatgtgggcgtccctgagcagccccgacgccgaggctgtggagcccgacttctccagcatcgagcgactattctccttccctgcagccaagcccaaggagcccaccatggtggccccccgggccaggaaggagcccaaggagatcactttcctcgatgccaagaagagcctgaacctcaacatcttcctgaagcaatttaagtgctccaacgaggaggtcgctgctatgatccgggctggagataccaccaagtttgatgtggaggttctcaaacaactccttaagctccttcccgagaagcacgagattgaaaacctgcgggcattcacagaggagcgagccaagctggccagcgccgaccacttctacctcctcctgctggccattccctgctaccagctgcgaatcgagtgcatgctgctgtgtgagggcgcggccgccgtgctggacatggtgcggcccaaggcccagctggtgctggctgcctgcgaaagcctgctcaccagccgccagctgcccatcttctgccagctgatcctgagaattgggaacttcctcaactacggcagccacaccggtgacgccgacggcttcaagatcagcacattgctgaagctcacggagaccaagtcccagcagaaccgcgtgacgctgctgcaccacgtgctggaggaagcggaaaagagccaccccgacctcctgcagctgccccgggacctggaacagccctcgcaagcagcagggatcaacctggagatcatccgctcagaggccagctccaacctgaagaagcttctggagaccgagcggaaggtgtctgcctccgtggccgaggtccaggagcagtacaccgagcgcctccaggccagcatctcggccttccgggcactggatgagctgtttgaggccatcgagcagaagcaacgggagctggccgactacctgtgtgaggacgcccagcagctgtccctggaggacacgttcagcaccatgaaggctttccgggaccttttcctccgcgccctgaaggagaacaaggaccggaaggagcaggcggcgaaggcagagaggaggaagcagcagctggcggaggaggaggcgcggcggcctcggggagaggacgggaagcctgtcaggaaggggcccgggaagcaggaggaggtgtgtgtcatcgatgccctgctggctgacatcaggaagggcttccagctgcggaagacagcccggggccgcggggacaccgacgggggcagcaaggcagcctccatggatcccccaagagccacagagcctgtggccaccagtaaccctgcaggagatcccgtgggcagcacgcgctgtcccgcctctgagcccggccttgatgctacaacagccagcgagtcccggggctgggaccttgtagacgccgtgacccccggccctcagcccaccctggagcagttggaggagggtggtccacggcccctggagaggcgttcttcctggtatgtggatgccagcgatgtcctaaccactgaggatccccagtgcccccagcccttggagggggcctggccggtgactctgggagatgctcaggccctgaagcccctcaagttctccagcaaccagccccctgcagccggaagttcaaggcaagatgccaaggatcccacgtccttgctgggcgtcctccaggccgaggccgacagcacaagtgaggggctggaggacgctgtccacagccgtggtgccagaccccctgcagcaggcccaggtggggatgaggacgaggacgaggaggacacggccccagagtccgcactggacacatccctggacaagtccttctccgaggatgcggtgaccgactcctcggggtcgggcacactccccagggcccggggccgggcctcaaaggggaccgggaagcgaaggaagaagcgtccctccaggagccaggaaggcctcaggcccaggcccaaggccaagtgagagagcccaggccacaggacatgctgccattctgccaagagaggctcttctgggggccaggctgggactgggccccggaaaccaaaactccgtgccttacccagccggggccctcctggagccttcttggggtgttgtggctgggaacccgacaggcaccagtgccctgccaggcctggtgccctcctggaccgcctgcacgtgccagcctcccacctgcttcctaaaggcaaccctggcccacacccgcatgcgcccggtgcagcctgccaagggccagtcggggggtgctgcgtcctgccagtgtccaccacagctctgcctgcccttcagcccagcaaggtttaatcaaaatgcaatgctttgcaagtctttactgcttggaggtggctgagttgggggccctgggcaggggtaagctggcaggcagtgccatggcaggccagggtcccctcccatggggtctggcccccgttccagcatgtccagcccctgaagttggagtggggggcggtctgcctttgctgccactgccaggcctctgccctgcagctgaaacttggccatcacatcaacagaaaacccctcccagtgccagctgcccagcgtgggcaggccctggggacaatacaggtccacctgaggggctgcagggtgacacccagcagccgctgccccctcactgcccacccagcgagggcagcctacccgagcctgccccctgccaggtgtgtgccctgaggctggcggctggatgcgtggccaataaaaagcagacctag

SEQ ID NO: 4106 - DNA, 751 bp, Homo sapiens
gcggccggggagctgcgtagctcccggccccgcggccatgcccaagcggagctgccccttcgcggacgtggccccgctacagctcaaggtccgcgtgagccagagggagttgagccgcggcgtgtgcgccgagcgctactcgcaggaggtcttcgagaagaccaagcgactcctgttcctcggggcccaggcctacctggaccacgtgtgggatgaaggctgtgccgtcgttcacctgccagagtccccaaagcctggccctacaggggccccgagggctgcacgtgggcagatgctgattggaccagacggccgcctgatcaggagccttgggcaggcctccgaagctgacccatctggggtagcgtccattgcctgttcctcatgcgtgcgagccgtggatgggaaggcggtctgcggtcagtgtgagcgagccctgtgcgggcagtgtgtgcgcacctgctggggctgcggctccgtggcctgtaccctgtgtggcctcgtggactgcagtgacatgtacgagaaagtgctgtgcaccagctgtgccatgttcgagacctgaggctggctcaagccggctgccttcaccgggagccacgccgtgcatggcagccttccctggacgagcgctcggtgttcacactgaactgtggggtcgacgggaggggtgccttttacatgttctattttgtatcctaatgacagaatgaataaacctctttatatttgcaaaaaaaaaaaaaaaaaa

SEQ ID NO: 4107 - protein, 175 aa, Homo sapiens
MPKRSCPFADVAPLQLKVRVSQRELSRGVCAERYSQEVFEKTKRLLFLGAQAYLDHVWDEGCAVVHLPESPKPGPTGAPRAARGQMLIGPDGRLIRSLGQASEADPSGVASIACSSCVRAVDGKAVCGQCERALCGQCVRTCWGCGSVACTLCGLVDCSDMYEKVLCTSCAMFET

SEQ ID NO: 4108 - DNA, 556 bp, Homo sapiens
gcggccggggagctgcgtagctcccggccccgcggccatgcccaagcggagctgccccttcgcggacgtggccccgctacagctcaaggtccgcgtgagccagagggagttgagccgcggcgtgtgcgccgagcgctactcgcaggaggtcttcgacccatctggggtagcgtccattgcctgttcctcatgcgtgcgagccgtggatgggaaggcggtctgcggtcagtgtgagcgagccctgtgcgggcagtgtgtgcgcacctgctggggctgcggctccgtggcctgtaccctgtgtggcctcgtggactgcagtgacatgtacgagaaagtgctgtgcaccagctgtgccatgttcgagacctgaggctggctcaagccggctgccttcaccgggagccacgccgtgcatggcagccttccctggacgagcgctcggtgttcacactgaactgtggggtcgacgggaggggtgccttttacatgttctattttgtatcctaatgacagaatgaataaacctctttatatttgcaaaaaaaaaaaaaaaaaa

SEQ ID NO: 4109 - protein, 110 aa, Homo sapiens
MPKRSCPFADVAPLQLKVRVSQRELSRGVCAERYSQEVFDPSGVASIACSSCVRAVDGKAVCGQCERALCGQCVRTCWGCGSVACTLCGLVDCSDMYEKVLCTSCAMFET

SEQ ID NO: 4110 - DNA, 2610 bp, Homo sapiens
atcctgggacagggcacagggccatctgtcaccaggggcttagggaaggccgagccagcctgggtcaaagaagtcaaaggggctgcctggaggaggcagcctgtcagctggtgcatcagaggctgtggccaggccagctgggctcggggagcgccagcctgagaggagcgcgtgagcgtcgcgggagcctcgggcaccatgagcgacgtggctattgtgaaggagggttggctgcacaaacgaggggagtacatcaagacctggcggccacgctacttcctcctcaagaatgatggcaccttcattggctacaaggagcggccgcaggatgtggaccaacgtgaggctcccctcaacaacttctctgtggcgcagtgccagctgatgaagacggagcggccccggcccaacaccttcatcatccgctgcctgcagtggaccactgtcatcgaacgcaccttccatgtggagactcctgaggagcgggaggagtggacaaccgccatccagactgtggctgacggcctcaagaagcaggaggaggaggagatggacttccggtcgggctcacccagtgacaactcaggggctgaagagatggaggtgtccctggccaagcccaagcaccgcgtgaccatgaacgagtttgagtacctgaagctgctgggcaagggcactttcggcaaggtgatcctggtgaaggagaaggccacaggccgctactacgccatgaagatcctcaagaaggaagtcatcgtggccaaggacgaggtggcccacacactcaccgagaaccgcgtcctgcagaactccaggcaccccttcctcacagccctgaagtactctttccagacccacgaccgcctctgctttgtcatggagtacgccaacgggggcgagctgttcttccacctgtcccgggaacgtgtgttctccgaggaccgggcccgcttctatggcgctgagattgtgtcagccctggactacctgcactcggagaagaacgtggtgtaccgggacctcaagctggagaacctcatgctggacaaggacgggcacattaagatcacagacttcgggctgtgcaaggaggggatcaaggacggtgccaccatgaagaccttttgcggcacacctgagtacctggcccccgaggtgctggaggacaatgactacggccgtgcagtggactggtgggggctgggcgtggtcatgtacgagatgatgtgcggtcgcctgcccttctacaaccaggaccatgagaagctttttgagctcatcctcatggaggagatccgcttcccgcgcacgcttggtcccgaggccaagtccttgctttcagggctgctcaagaaggaccccaagcagaggcttggcgggggctccgaggacgccaaggagatcatgcagcatcgcttctttgccggtatcgtgtggcagcacgtgtacgagaagaagctcagcccacccttcaagccccaggtcacgtcggagactgacaccaggtattttgatgaggagttcacggcccagatgatcaccatcacaccacctgaccaagatgacagcatggagtgtgtggacagcgagcgcaggccccacttcccccagttctcctactcggccagcagcacggcctgaggcggcggtggactgcgctggacgatagcttggagggatggagaggcggcctcgtgccatgatctgtatttaatggtttttatttctcgggtgcatttgagagaagccacgctgtcctctcgagcccagatggaaagacgtttttgtgctgtgggcagcaccctcccccgcagcggggtagggaagaaaactatcctgcgggttttaatttatttcatccagtttgttctccgggtgtggcctcagccctcagaacaatccgattcacgtagggaaatgttaaggacttctacagctatgcgcaatgtggcattggggggccgggcaggtcctgcccatgtgtcccctcactctgtcagccagccgccctgggctgtctgtcaccagctatctgtcatctctctggggccctgggcctcagttcaacctggtggcaccagatgcaacctcactatggtatgctggccagcaccctctcctgggggtggcaggcacacagcagccccccagcactaaggccgtgtctctgaggacgtcatcggaggctgggcccctgggatgggaccagggatgggggatgggccagggtttacccagtgggacagaggagcaaggtttaaatttgttattgtgtattatgttgttcaaatgcattttgggggtttttaatctttgtgacaggaaagccctcccccttccccttctgtgtcacagttcttggtgactgtcccaccggagcctccccctcagatgatctctccacggtagcacttgaccttttcgacgcttaacctttccgctgtcgccccaggccctccctgactccctgtgggggtggccatccctgggcccctccacgcctcctggccagacgctgccgctgccgctgcaccacggcgtttttttacaacattcaactttagtatttttactattataatataatatggaaccttccctccaaattct

SEQ ID NO: 4111 - protein, 480 aa, Homo sapiens
MSDVAIVKEGWLHKRGEYIKTWRPRYFLLKNDGTFIGYKERPQDVDQREAPLNNFSVAQCQLMKTERPRPNTFIIRCLQWTTVIERTFHVETPEEREEWTTAIQTVADGLKKQEEEEMDFRSGSPSDNSGAEEMEVSLAKPKHRVTMNEFEYLKLLGKGTFGKVILVKEKATGRYYAMKILKKEVIVAKDEVAHTLTENRVLQNSRHPFLTALKYSFQTHDRLCFVMEYANGGELFFHLSRERVFSEDRARFYGAEIVSALDYLHSEKNVVYRDLKLENLMLDKDGHIKITDFGLCKEGIKDGATMKTFCGTPEYLAPEVLEDNDYGRAVDWWGLGVVMYEMMCGRLPFYNQDHEKLFELILMEEIRFPRTLGPEAKSLLSGLLKKDPKQRLGGGSEDAKEIMQHRFFAGIVWQHVYEKKLSPPFKPQVTSETDTRYFDEEFTAQMITITPPDQDDSMECVDSERRPHFPQFSYSASSTA

SEQ ID NO: 4112 - DNA, 1918 bp, Homo sapiens
agcctgcagcggcagtcgctcctggacatgtctctggtgaagttgcagctttgccacatgcttgtggagcccaacctgtgccgctcagtcctcattgccaacacggtccggcagatccaagaggagatgacgcaggatgggacgtggcgcacagtggcaccccaggctgcagagcgggcgccgctcgaccgcttggtctccacggagatcctgtgccgtgcagcgtgggggcaagagggggcacatcctgctcctggcttgggggacggccacacacagggtccagtttctgacctttgcccagtcacctcagcacaggcaccaaggcacctgcagagcagcgcctgggagatggatggccctcgagaaaacagaggaagctttcacaagtcacttgatcagatatttgaaacgctggagactaaaaaccccagctgcatggaagagctgttctcagacgtggacagcccctactacgacctggacacagtactgacaggcatgatggggggtgccaggccgggcccctgcgaagggctcgagggcttggctccggccaccccaggccctagctccagctgcaagtccgacctgggcgagctggaccacgtggtggagatcctggtggagacctgagcaggagccctgagtgctcacagccgcctctgacgcattgacacgtgagcactggctcccacggagggtgcgcctgccgccagcggcccagccttgctgccctgtctgctgattctgagaaatcccagaacagcccattaccagtggggctgcagccctaggcccgtcccactcacctcccccctgtggagcgccaggcagaggctgttctggaaggcttcttgtcttctgacgtccccacagccctgggcccctcgtgtctctttgtgtcccccactgtagaggacggtgagccgcagctgcatcaacctccttttacctttagataggtgaatttttacaattcagttttacatgttttgggcagtattttgtcttaagatatattttttaaactttttataccttatctctttagattttttcagctattttcttaaaagtatattttttctataaacatcctttgctgctacattagaacttttatagcctaaacaattgcagttggtgtgtttcatttttttaaggtttaaataagggttttttgttttgttttgttttttgcagtgagcatcactacagtctcagtcaacagtgtgaatgtatcatgttttactttaaatgtgtgtgtgatacttcttcattatgtcctgcgctgcagtgagacctgggtgaaaatcaggagccgcacacagccacatcttcctagacctaagagtaaattatggaggattttatttatgtctatttatatgtaaatgtcattgaagacaaaggtcaaatatttgtctgtttgtagatcacaggcaccagttggtcttcagggacctcatagcccctcggtggtgccttctcaaggcagtgttcctggaggctcccatcagggtcagcccatgcacctgccctgggtgaggaagtagcattgctgctggatgagaaacgcctgcgctgctctgttagactggtgctgaaacaaaaggttaaggctaggttgaagtctagaatgaaagaaatctgaatccatgtcattcataaccccttgatctgtagtgtcatgggtgctgccgcaggcagggagtgagctgggggtgcctgcagccttccactcctgccccgcctcaccccacatgctccctgtttctcatgctttctctaacttcctcaccccttaaccaaaaaggtgtgttttcttttgtgcatatagccattcttaaatatcagtgatgtaaacctcactttattaaaaaattatccagcaaaaaaaaaaaaaaaaaaaaaa

SEQ ID NO: 4113 - protein, 241 aa, Homo sapiens
MFARGLKRKCVGHEEDVEGALAGLKTVSSYSLQRQSLLDMSLVKLQLCHMLVEPNLCRSVLIANTVRQIQEEMTQDGTWRTVAPQAAERAPLDRLVSTEILCRAAWGQEGAHPAPGLGDGHTQGPVSDLCPVTSAQAPRHLQSSAWEMDGPRENRGSFHKSLDQIFETLETKNPSCMEELFSDVDSPYYDLDTVLTGMMGGARPGPCEGLEGLAPATPGPSSSCKSDLGELDHVVEILVET

SEQ ID NO: 4114 - DNA, 440 bp, Homo sapiens
tctccaacaaaggcctcccagcccccatcgagaaatgaccaagaaccaggtcagcctgacctgcctggtcaaaggcttctaccccagcgacatcgccgtggagtgggagagcaatgggcagccggagaacaactacaagaccacacctcccatgctggactccgacggctccttcttcctctacagcaagctcaccgtggacaagagcaggtggcagcaggggaacgtcttctcatgctccgtgatgcatgaggctctgcacaaccactacacgcagaagagcctctccctgtctccgggtaaatgagtgccacggccggcaagcccccgctccccaggctctcggggtcgcgtgaggatgcttggcacgtaccccgtgtacatacttcccaggcacccagcatggaaataaagcacccagcgctgccctgggcccctgc

SEQ ID NO: 4115 - DNA, 1166 bp, Homo sapiens
ggactccccctcgccctctgacacagaaaccaccagaagaaaagggaacttcaggaacttccaccaagggcccatccgtcttccccctggcgccctgctccaggagcacctccgagagcacagccgccctgggctgcctggtcaaggactacttccccgaaccggtgacggtgtcgtggaactcaggcgccctgaccagcggcgtgcacaccttcccggctgtcctacagtcctcaggactctactccctcagcagcgtggtgaccgtgccctccagcagcttgggcacgaagacctacacctgcaacgtagatcacaagcccagcaacaccaaggtggacaagagagttgagtccaaatatggtcccccatgcccatcatgcccagcacctgagttcctggggggaccatcagtcttcctgttccccccaaaacccaaggacactctcatgatctcccggacccctgaggtcacgtgcgtggtggtggacgtgagccaggaagaccccgaggtccagttcaactggtacgtggatggcgtggaggtgcataatgccaagacaaagccgcgggaggagcagttcaacagcacgtaccgtgtggtcagcgtcctcaccgtcctgcaccaggactggctgaacggcaaggagtacaagtgcaaggtctccaacaaaggcctcccgtcctccatcgagaaaaccatctccaaagccaaagggcagccccgagagccacaggtgtacaccctgcccccatcccaggaggagatgaccaagaaccaggtcagcctgacctgcctggtcaaaggcttctaccccagcgacatcgccgtggagtgggagagcaatgggcagccggagaacaactacaagaccacgcctcccgtgctggactccgacggctccttcttcctctacagcaggctaaccgtggacaagagcaggtggcaggaggggaatgtcttctcatgctccgtgatgcatgaggctctgcacaaccactacacacagaagagcctctccctgtctctgggtaaatgagtgccagggccggcaagcccccgctccccgggctctcggggtcgcgcgaggatgcttggcacgtaccccgtctacatacttcccaggcacccagcatggaaataaagcacccaccactgccctggg

SEQ ID NO: 4116 - DNA, 1098 bp, Homo sapiens
cacccctcctctggagaagcccctagatcacagctcctcaccatggactggacctgaaggatcctcttcttgatggcagcagcaacaggtgcccactccctgcagctggtgcagtctgggcctgaggtgaagaagcctggggcctcagtgaaggtctcctataagtcttctggttacaccttcaccatctatggtatgaattgggtatgatagacccctggacagggctttgagtggatgtgatggatcatcacctacactgggaacccaacgtatacccacggcttcacaggatggtttgtcttctccatggacacgtctgtcagcacggcgtgtcttcagatcagcagcctaaaggctgaggacacggccgagtattactgtgcgaagtacacagtgtggaaacccacatcccgagagtttcagaaagcctgaggaaggaggcagctgtgctgagctgaggcagtgagctctgtcacaggccacatggacctaaatccttgatggagattacaggactacgtaaattggactgatcgtttttatgctgttaaattaatagaaggccagcccacttgttcagctcctaagaagagagcccaggtttatccagattatacaacacaaccagcttctgatgactctcctgttacaacatccatggagatattttgtgtattatataattcaccaaactaatgtgaaatgcccaagttgcaatactgcacaccctagggtatgttcttgcaattcagcggaggagaaattctttcagagacagatggatctgaattggggtcctgtcccaggtgcagctacagcagtggggcgcaggactgttgaagccttcggagaccctgtccctcacctgcgctgtctatggtgggtccttcagtggttactactggagctggatccgccagcccccagggaaggggctggagtggattggggaaatcaatcatagtggaagcaccaactacaacccgtccctcaagagtcgagtcaccatatcagtagacacgtccaagaaccagttctccctgaagctgagctctgtgaccgccgcggacacggctgtgtattactgtgcgagag

SEQ ID NO: 4117 - protein, 109 aa, Homo sapiens
MTLLLQHPWRYFVYYIIHQTNVKCPSCNTAHPRVCSCNSAEEKFFQRQMDLNWGPVPGAATAVGRRTVEAFGDPVPHLRCLWWVLQWLLLELDPPAPREGAGVDWGNQS

SEQ ID NO: 4118 - DNA, 891 bp, Homo sapiens
gctcacatgggaagtgctttctgagagtcatggacctcctgcacaagaacatgaaacacctgtggttcttcctcctcctggtggcagctcccagatgggtcctgtcccaggtgcagctacagcagtggggcgcaggactgttgaagccttcggagaccctgtccctcacctgcgctgtctatggtgggtccttcagtggttactactggagctggatccgccagcccccagggaaggggctggagtggattggggaaatcaatcatagtggaagcaccaactacaacccgtccctcaagagtcgagtcaccatatcagtagacacgtccaagaaccagttctccctgaagctgagctctgtgaccgccgcggacacggctgtgtattactgtgcgagaggcacagtgaggggagaagaggaagagacaccagagacctctcacttttcacgtgcacacagagaagaggccatgtggagacgtagtgcactagaaggtggccctgtgcaagccaggaagaagccatactaagaaccaattttgccagctccttgatcttcgacattcagactgtagaattgtaagaaaatcaatatttgttgtttaagccacccaatcctgttgtcttcttacgaagacccaaactgactaataccacctaactctgttagctctgtctcctggagggagaagcagccccctgaggctgggcactgcatctctcagatttccacgtgaagtaggcaaaaatagtagttctcatataaaaatgtgtcatggctctgttggccatttttgagcatggtctctgaaaccagccctggtgtgtgtgtgtaacaaatgtcccttatcttttatttggacataacaaatagacgataggtaccagctg

SEQ ID NO: 4119 - DNA, 703 bp, Homo sapiens
ctctttccagccagcgccgagcgatgggcacctctcgggacaactggcacaagggccgcaaagctgggggcaagagaaggccctgccacaagaagcggaagtatgagttggggcgcccagctgccaacagcaagactgacccgtgccgcatccacacagtccgtgtgcgaggaggtaacaagaaatactgtgccccgaggctggacgtggggaatttctcctggggctcagaatgctgcgctggtgaaacaagggtcatcgatgttgtctacaatgcatccaataacgagctggttcgtaccaagaccgtggtgaagaattgcatcgtgcccatcgacagcacgccctaccgacagtggtacgagtcccactgtgcactgcccctgggccgcaagaagggagccaagctgactcctgaggaagaagagattttaaacaaaaaacgatctaaaaaaattcagaagaaatatgatgaaaggaagaagaatgccaaaatgagcagtctcctgggggagcagttccagcagggcaagcttcttgcgtgcatggcttcaaggccgggacagtgtggccgagcagatggctatgtgctagagggcaaagagttggagttctatcttaggaaaatcaaggcccagaaaggcaaataaatccttgttttgtcttcacccatgtaataaaggtgtttattgttttgttccca

SEQ ID NO: 4120 - DNA, 1214 bp, Homo sapiens
cttccaccaagggcccatcggtcttccccctggcgccctgctccaggagcacctctgggggcacagcggccctgggctgcctggtcaaggactacttcccagaaccggtgacggtgtcgtggaactcaggcgccctgaccagcggcgtgcacaccttcccggctgtcctacagtcctcaggactctactccctcagcagcgtggtgaccgtgccctccagcagcttgggcacccagacctacacctgcaacgtgaatcacaagcccagcaacaccaaggtggacaagagagttgagctcaaaaccccacttggtgacacaactcacacatgcccacggtgcccagagcccaaatcttgtgacacacctcccccgtgcccacggtgcccagagcccaaatcttgtgacacacctcccccatgcccacggtgcccagcacctgaactcctgggaggaccgtcagtcttcctcttccccccaaaacccaaggatacccttatgatttcccggacccctgaggtcacgtgcgtggtggtggacgtgagccacgaagaccccgaggtccagttcaagtggtacgtggacggcgtggaggtgcataatgccaagacaaagccgcgggaggagcagtacaacagcacgttccgtgtggtcagcgtcctcaccgtcctgcaccaggactggctgaacggcaaggagtacaagtgcaaggtctccaacaaagccctcccagcccccatcgagaaaaccatctccaaaaccaaaggacagccccgagaaccacaggtgtacaccctgcccccatcccgggaggagatgaccaagaaccaggtcagcctgacctgcctggtcaaaggcttctaccccagcgacatcgccgtggagtgggagagcagcgggcagccggagaacaactacaacaccacgcctcccatgctggactccgacggctccttcttcctctacagcaagctcaccgtggacaagagcaggtggcagcaggggaacatcttctcatgctccgtgatgcatgaggctctgcacaaccgcttcacgcagaagagcctctccctgtctccgggtaaatgagtgcgacggccggcaagcccccgctccccgggctctcggggtcgcgcgaggatgcttggcacgtaccccgtgtacatacttcccgggcacccagcatggaaataaagcacccagcgctgccctggg

SEQ ID NO: 4121 - DNA, 1145 bp, Homo sapiens
gacagccccgagaaccacaggtgtacaccctgcccccatcccgggaggagatgaccaagaaccaggtcagcctgacctgcctggtcaaaggcttctaccccagcgacatcgccgtggagtgggagagcagcgggcagccggagaacaactacaacaccacgcctcccatgctggactccgacggctccttcttcctctacagcaagctcaccgtggacaagagcaggtggcagcaggggaacatcttctcatgctccgtgatgcatgaggctctgcacaaccgcttcacgcagaagagcctctccctgtctccggagctgcaactggaggagagctgtgcggaggcgcaggacggggagctggacgggctgtggacgaccatcaccatcttcatcacactcttcctgttaagcgtgtgctacagtgccaccgtcaccttcttcaaggtgaagtggatcttctcctcggtggtggacctgaagcagaccatcatccccgactataggaacatgattgggcagggggcctagggccaccctctgcggggtgtccagggccacccagatcccacacacgagccgtgggccatgctcagccaccacccaggccacaactgcccccgacctcaccgccctcaaccccatggctctctgtctttgcagtcgccctctgagccctgacacgccccccttccagaccctgtgcatagcaggtctaccccagacctccgctgcttggtgcatgcagggagctggggaccaggtgtcccctcagcaggatgtccctgccctccagaccgccagatgctcacacaaaaggaggcagtgaccagcatccgaggcccccacccaggcaggagctggccctggagccaaccccgtccacgccagcctcctgaacacaggcgtggtttccagatgcccgcagccagccagcctccattccgggcactcccgtgaactcctgacatgaggaatgaggttgttctgatttcaagcaaagaacgctgctctctggctcctgggaacagtctcggtgccagcaccaccccttggctgcctgcctacactgctggattctcgggtggaactggacccgcagggacagccagccccagagtccgcactggggagagaaggggccag

SEQ ID NO: 4122 - DNA, 789 bp, Homo sapiens
aagaagaggcgagaaagaccccccgacagaccaaagcccgtgtgccgctgcatcctgcatccagcacctacctcccgccactgtcgccactgccaccatgcccaagagaaaggctgaaggggatgctaagggagataaagccaaggtgaaggatgaaccacagagaagatccgcaaggttgtctgctaaacctcctcctccaaagccagacagcccaagcctagaaaggcccctgcaaagaagggagagaaggtacccaaagggaaaaagggaaaagctgatgcccaggaggagggattccctgactttgacacacatggccaccttggcacaaaagccttgtggtatagaaaaacaaatttgtttttatgtcctcttctccctttccatctttcagcatagacttaactcccttaagcccagacatctgttgggacctgacccctagtcattggttaccagtgtgtcaggcaatctggactttccagtgatgccactgagatggcacctgtcaaaagagtagtggttccatttctagattgtagatcttcagataaattctgccattttcatttcacttcctgaaagtcagggtcggcttctaaaaatttgttaaacaatatgctaaatgtgaaatgtcacccctcactctaaactttccccgttcagagcatcagatgaagacttcattgggttttatagtggctttctgatttttggtagtccattgaagaagggagtttgaaagttgttgtatactgttaacgattatctgcccatgtcctgcct

SEQ ID NO: 4123 - DNA, 701 bp, Homo sapiens
ctctttccagccagtgccgagcgatggacatctcttgggacaactggcacaagtgccacaaaaccagggacaagagaaagccctaccacaagaagcggaagtatgagttggggcacccagctgccaacaccaagactggcccccgccgcatccacacagtccgtgtgtggggaggtaacaagaaatactgtgccctgaggctggacgtgaggaatttctcctggggctcagaatgttgtgctcataaaacaacgatcatcgatgttgtctacaatgcatctaataacgagctggttcgtcccaagaccctggtgaagaattgcattgtgctcattgacagcacactgtaccgacagtggtacgagtcccactatgcgccgcccctgggctgcaagaagggagccaagctgactcctgaggaagaagagattttgaacaaaaagcgatctaaaaaaattcagaagaaatatcatgaaaggaaaaagaatgccaaaatcagcagtctcctgggggagcagttccagcagggcaagcttcttgcatgcattgcttcaaggccaggacagtgtggctgagcagatgggtatgtgctagagggcaaagagttggagttctatcttaggaaaatcaaggcccggaagggcaaataaatccttgttttgtcttcacccatgtaataaaggtgtttattgttttgttcc

SEQ ID NO: 4124 - DNA, 762 bp, Homo sapiens
atggatgagggaaccagcttcagaacagttttagataaagctgtgcaagcagatggacacgtgaaagaatgttacccgtctcatcgtgaccccatcgtgcttttgtgtaagccagagcctgagctgaatgctgccatcccttctgctaatccagcaaagaccatgcagggcagtgaggttgtaaatgtcttaaaatccttattgtcaaatcttgatgaagtaaagaaggaaagagagggtctggagaatgacttgaaatctgtgaattttgacatgacaagcaagtttttgacagccctggctcaagatggtgtgataaatgaagaagctctttctgttactgaactagatcgagtctatggaggtcttacaactaaagtccaagaatctctaaagacacaggagggacttcttaaaaatattcaggtctcacatcaggaattttcgaaaatgaagcaatctaataatgaagctaacttaagaaaagaagttttgaagaatttagctactgcatatgacaactttgttgaacttgtagctaattcgaaggaagacacaaagttttacaatgagttgactgaaatcctggtcaggttccagaacaaatgcagcgatatagttttggcatggaagacagaaagagatgaactcttaaagagtaggatggattatattatttgtcgaaatgcctttgcatctaacaagaacctcttgggttcatcctttggagaacctgatatcatggaaaatggactgaactag

SEQ ID NO: 4125 - DNA, 4331 bp, Homo sapiens
  unsure 2971: unknown base
cccaggatggcggcccaggtgactctggaggacgcgctgtccaacgtggacctcctggaggagctgcccctgcccgaccagcagccctgcatcgagcccccgccatcctcgctgctctaccagccaaatttcaacactaactttgaagacagaaatgcatttgttactggcatcgcaagatacattgaacaagccaccgtccactctagcatgaacgagatgctggaggagggccaagaatatgctgtcatgctgtacacctggaggagctgctcccgggccatcccacaggtgaaatgtaacgagcagcctaacagagtggaaatctacgagaaaaccgtggaggttctggagcctgaggtcacaaaactgatgaatttcatgtacttccagagaaatgccattgagcgtttctgcggggaagtgaggcgcctgtgccatgccgagaggaggaaggacttcgtgtcagaagcctacctgatcacactgggcaaattcatcaacatgttcgctgtgctggacgagctgaagaacatgaagtgcagtgtgaagaacgaccactcagcgtacaagagggccgctcagtttttacgtaaaatggcagatccacagtccatccaggaatcgcagaatctgtccatgttcctggccaatcataacaagatcacacagtctctgcagcagcagctcgaagtgatttctggctacgaagagctcctggcagatattgtgaatctgtgtgtggattactacgagaacaggatgtatttgacgcccagtgagaaacacatgcttctcaaagtcatgggatttggtctgtacctgatggatgggagtgtcagtaacatctataagttggatgccaagaaaagaataaacttatccaaaatcgacaagtacttcaagcaactccaggtggttccgctatttggggacatgcaaatagaactggcaagatatatcaagaccagcgcccactacgaggaaaataaatctcgatggacgtgcacatcctccggcagcagccctcagtacaacatctgcgagcagatgatccagatccgcgaggaccacatgcgcttcatttcggagctggcgcgctacagcaacagcgaggtggtcacgggctcgggccgccaggaggcccagaagacggacgcggagtaccgcaagctcttcgacctggcgctgcagggcctgcagctgttgtcgcagtggagcgcgcacgtgatggaagtgtattcctggaagcttgtgcaccccaccgacaagtactccaacaaggactgccccgacagcgctgaagagtacgagcgtgccacgcgctacaactacaccagcgaggagaagtttgccctagtggaggtgatcgccatgatcaaaggcctgcaggtgctgatgggcaggatggagagcgtgttcaaccacgccatccggcacaccgtctatgccgcactgcaggacttctcccaggtgacccttagggagccgctgcggcaggccatcaagaagaagaagaacgtcatccagagtgtcctgcaggccatcaggaagaccgtgtgtgactgggagacggggcatgagcccttcaatgacccagccttgcggggcgagaaggaccccaagagcggcttcgacataaaagtaccacgccgcgccgtgggaccctccagcactcagctttacatggtgagaaccatgctagagtccctcattgcagacaaaagtggttccaagaaaaccttgagaagtagccttgaggggcccaccatattggacatagaaaaatttcatcgagagtcattcttctacactcacttgataaatttcagtgaaacgctgcagcagtgctgtgacctttcgcagctgtggttccgagagttcttcctggagctgaccatgggcaggaggatccagttccccattgagatgtcgatgccctggatcctgacggaccacatcctggagaccaaggaggcatcgatgatggagtacgtgctctactccctggacctgtacaatgacagcgcccactacgcgctcaccaggttcaacaagcagttcctgtacgacgaaattgaggccgaggtgaatctatgttttgaccaatttgtttacaagctagcagaccagatatttgcctattataaggttatggcaggaagtttgcttcttgataaacggttacgatcagaatgcaagaatcagggagccacgatccacctcccgccgtctaaccgctacgagacgctgctgaagcagaggcatgtgcagctcctcggcagatcaatagacctcaatcgtctgatcacccagcgcgtctcagcagccatgtataagtccctagaactggcgattggacgatttgaaagtgaagatttgacctccatagttgagctggatggcctgttggaaatcaaccgcatgacccacaagctgctgagccggtacctgacgctggacggcttcgacgccatgttccgggaggccaaccacaacgtgtcagcgccctacgggaggatcaccctgcacgtcttctgggagctcaactatgacttcctgcccaactactgctacaacggctctaccaaccggtttgttcggacagtgttaccattttctcaggaatttcaaagagataagcagcctaatgcacagcctcagtatctgcatggatccaaggctttgaacttggcctactccagcatttacggcagctaccggaacttcgtgggacctccacactttcaagtcatctgccggcttctcggctaccagggtatcgccgtggtcatggaggagctgctgaaggtcgtcaagagcctgctgcaaggcacaatcctgcagtacgtgaagacgctgatggaggtgatgcccaagatctgccgcctgccccggcacgagtacggctctcctggtatcctggagttcttccaccaccagctgaaggacatcgtggagtacgcagagnctgaagacggtgtgcttccagaacctgcgggaggtggggaacgccatcctcttctgcctgctcatcgagcagagcctgtctttagaagaagtgtgtgacctgctgcacgcggctcctttccagaacatcttgccgcgagtccatgtgaaagagggggagagacttgatgccaaaatgaaaagactagaatcaaagtacgccccgctgcatcttgtcccactgattgaaagactggggacccctcagcaaattgccatcgcaagagagggggacctgctgacaaaggagcgcctctgctgcggcctgtccatgtttgaggtcatcctgacacggatccggagctttctggatgaccccatctggcgcgggcctctgcccagcaatggggtcatgcatgtggacgagtgtgtggagtttcacagactgtggagtgccatgcagtttgtctactgcattcccgtggggacacacgagttcacagtcgagcagtgctttggtgatgggctacactgggctggctgtatgatcatcgtacttcttgggcagcagcggcgttttgctgtgctggatttctgctaccatctacttaaagtccagaaacatgatggcaaagatgagattattaaaaatgtgcctttgaagaagatggtggagagaattcgcaagttccagattctcaatgatgagatcatcaccatcctggataagtacctgaagtcaggcgacggggagggcacgccagtggagcatgtgcgctgcttccagccgcccatccaccagtccctcgccagcagctgagggcacgcgctgcactccgtaactcaacatggcatgcctttctctccgtaaactatttagtgagatttttagggactatttttcagtatctctgtacctgttaaagggggtgcttttcgatctaaaaacttaattttataaaattgacttatttttctagactaaaattgtatatgcttttggtaattaggaactcttgagaatattggctgctgattgttgccatcacgttcctacaaaattgtttttctatgggatgttctggcagctgtgtcataaaatgctgctgggttcattcattcattccataagaaacttaataccagcaaatgcattaaatcccttgccagttaccattaactgtaactatttagcttttgtttagggatctttctgatggtcttttatgagcaatcttagttctaagtcattgttcccatcccttttttgtgtgtttcagaaaatagtgaacttgattcccctgcttccactaaatccagttgtgacaaaatctaacgtgacatcagatcgaaaggttatagaaataaaactaatgagatct

SEQ ID NO: 4126 - protein, 943 aa, Homo sapiens
MQIELARYIKTSAHYEENKSRWTCTSSGSSPQYNICEQMIQIREDHMRFISELARYSNSEVVTGSGRQEAQKTDAEYRKLFDLALQGLQLLSQWSAHVMEVYSWKLVHPTDKYSNKDCPDSAEEYERATRYNYTSEEKFALVEVIAMIKGLQVLMGRMESVFNHAIRHTVYAALQDFSQVTLREPLRQAIKKKKNVIQSVLQAIRKTVCDWETGHEPFNDPALRGEKDPKSGFDIKVPRRAVGPSSTQLYMVRTMLESLIADKSGSKKTLRSSLEGPTILDIEKFHRESFFYTHLINFSETLQQCCDLSQLWFREFFLELTMGRRIQFPIEMSMPWILTDHILETKEASMMEYVLYSLDLYNDSAHYALTRFNKQFLYDEIEAEVNLCFDQFVYKLADQIFAYYKVMAGSLLLDKRLRSECKNQGATIHLPPSNRYETLLKQRHVQLLGRSIDLNRLITQRVSAAMYKSLELAIGRFESEDLTSIVELDGLLEINRMTHKLLSRYLTLDGFDAMFREANHNVSAPYGRITLHVFWELNYDFLPNYCYNGSTNRFVRTVLPFSQEFQRDKQPNAQPQYLHGSKALNLAYSSIYGSYRNFVGPPHFQVICRLLGYQGIAVVMEELLKVVKSLLQGTILQYVKTLMEVMPKICRLPRHEYGSPGILEFFHHQLKDIVEYAELKTVCFQNLREVGNAILFCLLIEQSLSLEEVCDLLHAAPFQNILPRVHVKEGERLDAKMKRLESKYAPLHLVPLIERLGTPQQIAIAREGDLLTKERLCCGLSMFEVILTRIRSFLDDPIWRGPLPSNGVMHVDECVEFHRLWSAMQFVYCIPVGTHEFTVEQCFGDGLHWAGCMIIVLLGQQRRFAVLDFCYHLLKVQKHDGKDEIIKNVPLKKMVERIRKFQILNDEIITILDKYLKSGDGEGTPVEHVRCFQPPIHQSLASS

SEQ ID NO: 4127 - DNA, 1143 bp, Homo sapiens
gatctgtttgaggagatggtgcctgtgtcagtgtggcagtctttggctgcctgtgatcagaggaaagccgatttgttaacagatcaattgctcagatgagagaagccaccactttggcaaatggagtgctagcttcccttaatcttccagcagcaattgaagatgtgtctggagacactgtacctcagtctatattgactaaatcaagatctgtgattgaacagggaggcatccagactgttgatcagttgactaaagaactgcctgaattactgcaatgaaatagagaaatcctagatgagtcattaaggtttttggatgaagaagaagcaaccgataatgatttatgagcaaaatttaaggaacgctggcaaaggacatcatccaatgaactgtataagcctttaaaagcagagggaaccagcttcagaacagttttagataaagctgtgcaagcagatggacacgtgaaagaatgttacccgtctcatcgtgaccccatcgtgcttttgtgtaagccagagcctgagctgaatgctgccatcccttctgctaatccagcaaagaccatgcagggcagtgaggttgtaaatgtcttaaaatccttattgtcaaatcttgatgaagtaaagaaggaaagagagggtctggagaatgacttgaaatctgtgaattttgacatgacaagcaagtttttgacagccctggctcaagatggcatgataaatgaagaagctctttctgttactgaactagatcgagtctatggaggtcttacaactaaagtccaagaatctctaaagaaacaggagggacttcttaaaaatattcaggtctcacatcaggaattttcgaaaatgaagcaatctaataatgaagctaacttaagagaagaagttttgaagaatttagctactgcatgtgacaactttgttgaacttgtagctaattcgaaggaaggcacaaagttttacaatgagttgactgaaatcctggtcaggttccagaacaaatgcagcgatatagttttggcatggaagacagaaagagatgaactcttaaaggcctgagacctgggaggaagctggagaaaagatgccctctgaatctttgtgtttggctgcccaggctcgccttgacacc

SEQ ID NO: 4128 - protein, 166 aa, Homo sapiens
MQGSEVVNVLKSLLSNLDEVKKEREGLENDLKSVNFDMTSKFLTALAQDGMINEEALSVTELDRVYGGLTTKVQESLKKQEGLLKNIQVSHQEFSKMKQSNNEANLREEVLKNLATACDNFVELVANSKEGTKFYNELTEILVRFQNKCSDIVLAWKTERDELLKA

SEQ ID NO: 4129 - DNA, 1509 bp, Homo sapiens
cccccagtgtgaacgatcccgggaacatgtcctttgtgaaggagacggtggacaagctgttgaaaggctacgacattcgcctaagacccgacttcgggggtcccccggtctgcgtggggatgaacatcgacatcgccagcatcgacatggtttccgaagtcaacatggattataccttaaccatgtattttcaacaatattggagagataaaaggctcgcctattctgggatccctctcaacctcacgcttgacaatcgagtggctgaccagctatgggtgcccgacacatatttcttaaatgacaaaaagtcatttgtgcatggagtgacagtgaaaaaccgcatgatccgtcttcaccctgatgggacagtgctgtatgggctcagaatcaccacgacagcagcatgcatgatggacctcaggagataccccctggacgagcagaactgcactctggaaattgaaagctatggctacaccacggatgacattgagttttactggcgaggcggggacaaggctgttaccggagtggaaaggattgagctcccgcagttctccatcgtggagcaccgtctggtctcgaggaatgttgtcttcgccacaggtgcctatcctcgactgtcactgagctttcggttgaagaggaacattggatacttcattcttcagacttatatgccctctatactgataacgattctgtcgtgggtgtccttctggatcaattatgatgcatctgctgctagagttgccctcgggatcacaactgtgctgacaatgacaaccatcaacacccaccttcgggagaccttgcccaaaatcccctatgtcaaagccattgacatgtaccttatgggctgcttcgtctttgtgttcctggcccttctggagtatgcctttgtcaactacattttctttggaagaggccctcaaaggcagaagaagcttgcagaaaagacagccaaggcaaagaatgaccgttcaaagagcgaaagcaaccgggtggatgctcatggaaatattctgttgacatcgctggaagttcacaatgaaatgaatgaggtctcaggcggcattggcgataccaggaattcagcaatatcctttgacaactcaggaatccagtacaggaaacagagcatgcctcgagaagggcatgggcgattcctgggggacagaagcctcccgcacaagaagacccatctacggaggaggtcttcacagctcaaaattaaaatacctgatctaaccgatgtgaatgccatagacagatggtccaggatcgtgtttccattcactttttctcttttcaacttagtttactggctgtactatgttaactgagtgactgtacttgatttttcaaagacttcatttaacactgagtgaaatattactctgcctgtcaagtttttatacctgtacacacacagacacacaagcagacacacacatatatacatacgcaattgtatatatatgtgaactttctcagcatatatat

SEQ ID NO: 4130 - DNA, 740 bp, Homo sapiens
gagcagtgtgaagaagaggcgagaacgacccccggaccgaccaaagcccgcgtcgccaccgccaccatgcccaagagaaaggctgaaggggatgctaagggagataaagccaaggtgaaggacgaaccacagagaagatccgcgaggttgtctgctaaacctgctcctccaaagccagagcccaagcctaaaaaggcccctgcaaagaagggagagaaggtacccaaagggaaaaagggaaaagctgatgctggcaaggaggggaataaccctgcagaaaatggagatgccaaaacagaccaggcacagaaagctgaaggtgctggagatgccaagtgaagtgtgtgcatttttgataactgtgtatttctggtgactgtacagtttgaaatacttttatcaagttttataaaaatgcagaattttgttttacttttttttttttttttttaagctatgttgttcgcacacagaacacttcattgttgtttttgggggaaggggcatatgtcactaatagaatgtctccaaaactggattgatgtggagaaaacacctttcccttccagttttgagagacttcctcttggctcccaggaggagggattccttgactttgacacacatggccaccttggcacaaaagccttgtgctatggaaaaactcccttaagcccagacatctgttgagacctgacccctagtcattggttaccagtgtgtcaggcaatctggacttt

SEQ ID NO: 4131 - protein, 90 aa, Homo sapiens [sequence omitted]

SEQ ID NO: 4132 - DNA, 783 bp, Homo sapiens
ggcgagaacgacccccggaccgaccaaagcccgcgtgccgctgcatcccacgtccagcacctacgtcctgtcgccaccgccaccatgcccaagagaaaggctgaaggggatgctaagggagataaagccaaggtgaaggacgaaccacagagaagatccgcgaggttgtctgctaaacctgctcctccaaagccagagcccaagcctaaaaaggcccctgcaaagaagggagagaaggtacccaaagggaaaaagggaaaagctgatgcccaggaggagggattccttgactttgacacacatggccaccttggcacaaaagccttgtgctatggaaaaacaaatttgtttttatgtcctcttctccctttccacgtttcagcatagacttaactcccttaagcccagacatctgttgagacctgacccctagtcattggttaccagtgtgtcaggcaatctggactttccagtgatgccactgagatggcacctgtcaaaagagcagtggttccatttctagattgtggatcttcagataaattctgccattttcgtttcacttcctgaaagtcagggttggcttgtgaaaagttgttaaacaacatgctaaatgtgaaatgtcaaccctcactctcaactttccctgttcagagcatcagatgaagacttcattgggttttatagtggctttctgatttttggtagtccattgaagaagggagtttgaaagttgttgtatactgttaacgattgtctgcccatgtcctgcctgaaatacca

SEQ ID NO: 4133 - DNA, 867 bp, Homo sapiens
ttactactgatgtgaacagattctgacctttggctgcctagttgtttttgataaattaactcttagaataatgatgaatgtcttggccgttcctcaaaaacctttggctgtttgcagcagatgatggatgtctagaaaacacccctgacactgcagagttcagtcgagagttccagttgcaccagcatctctttgatccggaacatgactatccaggcttgggcaagtggaacaagaaactcctttacgagaagatgaagggaggagagagacgaaagcggaggagtgtcaatccatatctacaaggacagagactggataatgttgttgcaaagaagtctgtcccccatttttcagatgaggataaggatccagagtaaagagaagatgctagacgaaaacccacattacctgttaggcctcagcatggcttatgtgcacgtgtaaatggagtccctgtgaatgacagcatgtttcttacatagataattatggatacaaagcagctgtatgtagatagtgtattgtcttcacaccgatgattctgctttttgctaaattagaataagagcttttttgtttcttgggtttttaaaatgtgaatctgcaatgatcataaaaattaaaatgtgaatgtcaacaataaaaagcaagactatgaaaggctcagatttcttgcagtttaaaatggtgtctgaggttgtactattttggccaagtctgtagaaagctgtcatttgattttgattatgtagttcatccagcccttgggcattgttatacaccagtaaagaaggctgtactcaagaggaggagctgacacatttcacttggctgcgtcttaataaacatgaatgcaagcattgg

SEQ ID NO: 4134 - DNA, 4037 bp, Homo sapiens
gcggccgcactcagcgccacgcgtcgaaagcgcaggccccgaggacccgccgcactgacagtatgagccgcacagcctacacggtgggagccctgcttctcctcttggggaccctgctgccggctgctgaagggaaaaagaaagggtcccaaggtgccatccccccgccagacaaggcccagcacaatgactcagagcagactcagtcgccccagcagcctggctccaggaaccgggggcggggccaagggcggggcactgccatgcccggggaggaggtgctggagtccagccaagaggccctgcatgtgacggagcgcaaatacctgaagcgagactggtgcaaaacccagccgcttaagcagaccatccacgaggaaggctgcaacagtcgcaccatcatcaaccgcttctgttacggccagtgcaactctttctacatccccaggcacatccggaaggaggaaggttcctttcagtcctgctccttctgcaagcccaagaaattcactaccatgatggtcacactcaactgccctgaactacagccacctaccaagaagaagagagtcacacgtgtgaagcagtgtcgttgcatatccatcgatttggattaagccaaatccaggtgcacccagcatgtcctaggaatgcagccccaggaagtcccagacctaaaacaaccagattcttacttggcttaaacctagaggccagaagaacccccagctgcctcctggcaggagcctgcttgtgcgtagttcgtgtgcatgagtgtggatgggtgcctgtgggtgtttttagacaccagagaaaacacagtctctgctagagagcactccctattttgtaaacatatctgctttaatggggatgtaccagaaacccacctcaccccggctcacatctaaaggggcggggccgtggtctggttctgactttgtgtttttgtgccctcctggggaccagaatctcctttcggaatgaatgttcatggaagaggctcctctgagggcaagagacctgttttagtgctgcattcgacatggaaaagtccttttaacctgtgcttgcatcctcctttcctcctcctcctcacaatccatctcttcttaagttgatagtgactatgtcagtctaatctcttgtttgccaaggttcctaaattaattcacttaaccatgatgcaaatgtttttcattttgtgaagaccctccagactctgggagaggctggtgtgggcaaggacaagcaggatagtggagtgagaaagggagggtggagggtgaggccaaatcaggtccagcaaaagtcagtagggacattgcagaagcttgaaaggccaataccagaacacaggctgatgcttctgagaaagtcttttcctagtatttaacagaacccaagtgaacagaggagaaatgagattgccagaaagtgattaactttggccgttgcaatctgctcaaacctaacaccaaactgaaaacataaatactgaccactcctatgttcggacccaagcaagttagctaaaccaaaccaactcctctgctttgtccctcaggtggaaaagagaggtagtttagaactctctgcataggggtgggaattaatcaaaaacctcagaggctgaaattcctaatacctttcctttatcgtggttatagtcagctcatttccattccactatttcccataatgcttctgagagccactaacttgattgataaagatcctgcctctgctgagtgtacctgacagtagtctaagatgagagagtttagggactactctgttttagcaagagatattttgggggtctttttgttttaactattgtcaggagattgggctaaagagaagacgacgagagtaaggaaataaagggaattgcctctggctagagagtagttaggtgttaatacctggtagagatgtaagggatatgacctccctttctttatgtgctcactgaggatctgaggggaccctgttaggagagcatagcatcatgatgtattagctgttcatctgctactggttggatggacataactattgtaactattcagtatttactggtaggcactgtcctctgattaaacttggcctactggcaatggctacttaggattgatctaagggccaaagtgcagggtgggtgaactttattgtactttggatttggttaacctgttttcttcaagcctgaggttttatatacaaactccctgaatactctttttgccttgtatcttctcagcctcctagccaagtcctatgtaatatggaaaacaaacactgcagacttgagattcagttgccgatcaaggctctggcattcagagaacccttgcaactcgagaagctgtttttatttcgtttttgttttgatccagtgctctcccatctaacaactaaacaggagccatttcaaggcgggagatattttaaacacccaaaatgttgggtctgattttcaaacttttaaactcactactgatgattctcacgctaggcgaatttgtccaaacacatagtgtgtgtgttttgtatacactgtatgaccccaccccaaatctttgtattgtccacattctccaacaataaagcacagagtggatttaattaagcacacaaatgctaaggcagaattttgagggtgggagagaagaaaagggaaagaagctgaaaatgtaaaaccacaccagggaggaaaaatgacattcagaaccagcaaacactgaatttctcttgttgttttaactctgccacaagaatgcaatttcgttaacggagatgacttaagttggcagcagtaatcttcttttaggagcttgtaccacagtcttgcacataagtgcagatttggctcaagtaaagagaatttcctcaacactaacttcactgggataatcagcagcgtaactaccctaaaagcatatcactagccaaagagggaaatatctgttcttcttactgtgcctatattaagactagtacaaatgtggtgtgtcttccaactttcattgaaaatgccatatctataccatattttattcgagtcactgatgatgtaatgatatattttttcattattatagtagaatatttttatggcaagatatttgtggtcttgatcatacctattaaaataatgccaaacaccaaatatgaattttatgatgtacactttgtgcttggcattaaaagaaaaaaacacacatcctggaagtctgtaagttgttttttgttactgtaggtcttcaaagttaagagtgtaagtgaaaaatctggaggagaggataatttccactgtgtggaatgtgaatagttaaatgaaaagttatggttatttaatgtaattattacttcaaatcctttggtcactgtgatttcaagcatgttttctttttctcctttatatgactttctctgagttgggcaaagaagaagctgacacaccgtatgttgttagagtcttttatctggtcaggggaaacaaaatcttgacccagctgaacatgtcttcctgagtcagtgcctgaatctttattttttaaattgaatgttccttaaaggttaacatttctaaagcaatattaagaaagactttaaatgttattttggaagacttacgatgcatgtatacaaacgaatagcagataatgatgactagttcacacataaagtccttttaaggagaaaatctaaaatgaaaagtggataaacagaacatttataagtgatcagttaatgcctaagagtgaaagtagttctattgacattcctcaagatatttaatatcaactgcattatgtattatgtctgcttaaatcatttaaaaacggcaaagaattatatagactatgaggtaccttgctgtgtaggaggatgaaaggggagttgatagtctcataaaactaatttggcttcaagtttcatgaatctgtaactagaatttaattttcaccccaataatgttctatatagcctttgctaaagagcaactaataaattaaacctattctttc

SEQ ID NO: 4135 - DNA, 393 bp, Homo sapiens
ctttctgtgccgataacgctcacgcaagcatggttaacgtccctaaaacccgccggactttctgtaagaagtgtggcaagcaccaaccccataaagtgacacagtacaagaagggcaaggattctctgtatgcccagggaaagcggcgttatgacaggaagcagagtggctatggtgggcaaactaagccaattttctggaaaaaggctaaaactacaaagattgtgctaaggcttgagtgcattgagcccaactgcagatctaagagaatgctggctattaaaagatgcaagcattttgaactgggaggagataagaagagaaagggccaagtgattcagttctaagtgtcatcttttattatgaagacaataaaatcttgagtttatgttc

SEQ ID NO: 4136 - DNA, 2774 bp, Homo sapiens
aggaggaggaggaagatcaggaggaggaggaagaagaggaaaaaagagaaaaagaagaaatatcacagaaaaaaaaattcttcgttgtctagactgggctttttttcccccctaaaaaatagcatattggagaattgggagaagtctctttggtttggaaaaaaaaaaaaggaatcttcagcctagatcactttcttatccggactgggatattaaatatacgacacatccaggagtttattggagcgcagactgatggcgcaaaggtacgatgagctgccccattacggcgggatggacggagtaggggttcccgcttccatgtacggagaccctcacgcgccgcggccgatccccccggttcaccacctgaaccacgggccgccgctccacgccacacagcactacggcgcgcacgccccgcaccccaatgtcatgccggccagtatgggatccgctgtcaacgacgccttgaagcgggacaaggacgcgatctatgggcacccgttgtttcctctgttagctctggtctttgagaagtgcgagctggcgacctgcactccccgggaacctggagtggctggcggagacgtctgctcctccgactccttcaacgaggacatcgcggtcttcgccaagcaggttcgcgccgaaaagccacttttttcctcaaatccagagctggacaatttgatgatacaagcaatacaagtactaaggtttcatcttttggagttagaaaaggtccacgaactgtgcgataacttctgccaccgatacattagctgtttgaaggggaaaatgcccatcgacctcgtcattgatgaaagagacggcagctccaagtcagatcatgaagaactttcaggctcctccacaaatctcgctgaccataacccttcttcttggcgagaccacgatgatgcaacctcaacccactcagcaggcaccccagggccctccagtgggggccatgcttcccagagcggagacaacagcagtgagcaaggggatggtttagacaacagtgtagcttcacctggtacaggtgacgatgatgatccggataaggacaaaaaacgccagaagaaaagaggcattttccccaaagtagcaacaaatatcatgagagcatggctcttccagcatctcacagtttattaatgccagaagaagaatagtacagcccatgattgaccagtcaaatcgagcagtgagccaaggagcagcatatagtccagagggtcagcccatggggagctttgtgttggatggtcagcaacacatggggatccggcctgcaggacctatgagtggaatgggcatgaatatgggcatggatgggcaatggcactacatgtaaccttcatcatgtaaagcaatcgcaaagcaagggggaagtttgcagagcatgccaggggactacgtttctcagggtggtcctatgggaatgagtatggcacagccaagttacactcctccccagatgaccccacaccctactcaattaagacatggacccccaatgcattcatatttgccaagccatccccaccacccagccatgatgatgcacggaggaccccctacccaccctggaatgactatgtcagcacagagccccacaatgttaaattctgtagatcccaatgttggcggacaggttatggacattcatgcccaatagtataagggaactcaagggaaaaggaaacacacgcaaaaactattttaagactttctgaactttgaccagatgttgacacttaatatgaaattccagacagctgtgattattttttacttttgtcatttttcatcaagcaacagaggaccaatgcaacaagaacacaaatgtgaaatcatgggctgactgagacaattctgtccatgtaaagatcctctggaaaaagactccgagagttataactactgtagtataaatataggaactaagttaaacttgtacatttctgttgatcacgccgttatgttgcctcaaatagttttagaagagaaaaaaaaatatatccttgttttccacactatgtgtgttgttcccaaaagaatgactgttttggttcatcagtgaattcaccatccaggagagactgtggtatatattttaaacctgttgggccaatgagaaaagaaccacactggagatcatgatgaacttttggctgaacctcatcactcgaactccagcttcagaatgtgttttcatgcccggcctttgttcctccataaatgtgtcctttagtttcaaacagatctttatagttcgtgcttcataagccaattcttattattatttttgggggactcttcttcaaagagcttgccaatgaagatttaaagacagagcaggagcttcttccaggagttctgagccttggttgtggacaaaacaatcttaagttgggcagctttcctcaacacaaaaaaaagttattaatggtcattgaaccataactaggactttatcagaaactcaaagcttgggggataaaaaggagcaagagaatactgtaacaaacttcgtacagagttcggtctattaattgtttcatgttagatattctatgtgtttacctcaattgaaaaaaaaaagaatgtttttgctagtatcagatctgctgtggaattggtattgtatgtccatgaattcttcttttctcagcacgtgttcctcactagaagaaaatgctgttacctttaagctttgtcaaatttacattaaaatacttgtatgaggactgtgacgttatgtt

SEQ ID NO: 4137 - protein, 302 aa, Homo sapiens
MAQRYDELPHYGGMDGVGVPASMYGDPHAPRPIPPVHHLNHGPPLHATQHYGAHAPHPNVMPASMGSAVNDALKRDKDAIYGHPLFPLLALVFEKCELATCTPREPGVAGGDVCSSDSFNEDIAVFAKQVRAEKPLFSSNPELDNLMIQAIQVLRFHLLELEKVHELCDNFCHRYISCLKGKMPIDLVIDERDGSSKSDHEELSGSSTNLADHNPSSWRDHDDATSTHSAGTPGPSSGGHASQSGDNSSEQGDGLDNSVASPGTGDDDDPDKDKKRQKKRGIFPKVATNIMRAWLFQHLTVY

SEQ ID NO: 4138 - DNA, 5719 bp, Homo sapiens
ggacgcacaggcattccccgcgcccctccagccctcgccgccctcgccaccgctcccggccgccgcgctccggtacacacaggatccctgctgggcaccaacagctccaccatggggctggcctggggactaggcgtcctgttcctgatgcatgtgtgtggcaccaaccgcattccagagtctggcggagacaacagcgtgtttgacatctttgaactcaccggggccgcccgcaaggggtctgggcgccgactggtgaagggccccgacccttccagcccagctttccgcatcgaggatgccaacctgatcccccctgtgcctgatgacaagttccaagacctggtggatgctgtgcgggcagaaaagggtttcctccttctggcatccctgaggcagatgaagaagacccggggcacgctgctggccctggagcggaaagaccactctggccaggtcttcagcgtggtgtccaatggcaaggcgggcaccctggacctcagcctgaccgtccaaggaaagcagcacgtggtgtctgtggaagaagctctcctggcaaccggccagtggaagagcatcaccctgtttgtgcaggaagacagggcccagctgtacatcgactgtgaaaagatggagaatgctgagttggacgtccccatccaaagcgtcttcaccagagacctggccagcatcgccagactccgcatcgcaaaggggggcgtcaatgacaatttccagggggtgctgcagaatgtgaggtttgtctttggaaccacaccagaagacatcctcaggaacaaaggctgctccagctctaccagtgtcctcctcacccttgacaacaacgtggtgaatggttccagccctgccatccgcactaactacattggccacaagacaaaggacttgcaagccatctgcggcatctcctgtgatgagctgtccagcatggtcctggaactcaggggcctgcgcaccattgtgaccacgctgcaggacagcatccgcaaagtgactgaagagaacaaagagttggccaatgagctgaggcggcctcccctatgctatcacaacggagttcagtacagaaataacgaggaatggactgttgatagctgcactgagtgtcactgtcagaactcagttaccatctgcaaaaaggtgtcctgccccatcatgccctgctccaatgccacagttcctgatggagaatgctgtcctcgctgttggcccagcgactctgcggacgatggctggtctccatggtccgagtggacctcctgttctacgagctgtggcaatggaattcagcagcgcggccgctcctgcgatagcctcaacaaccgatgtgagggctcctcggtccagacacggacctgccacattcaggagtgtgacaagagatttaaacaggatggtggctggagccactggtccccgtggtcatcttgttctgtgacatgtggtgatggtgtgatcacaaggatccggctctgcaactctcccagcccccagatgaacgggaaaccctgtgaaggcgaagcgcgggagaccaaagcctgcaagaaagacgcctgccccatcaatggaggctggggtccttggtcaccatgggacatctgttctgtcacctgtggaggaggggtacagaaacgtagtcgtctctgcaacaaccccacaccccagtttggaggcaaggactgcgttggtgatgtaacagaaaaccagatctgcaacaagcaggactgtccaattgatggatgcctgtccaatccctgctttgccggcgtgaagtgtactagctaccctgatggcagctggaaatgtggtgcttgtccccctggttacagtggaaatggcatccagtgcacagatgttgatgagtgcaaagaagtgcctgatgcctgcttcaaccacaatggagagcaccggtgtgagaacacggaccccggctacaactgcctgccctgccccccacgcttcaccggctcacagcccttcggccagggtgtcgaacatgccacggccaacaaacaggtgtgcaagccccgtaacccctgcacggatgggacccacgactgcaacaagaacgccaagtgcaactacctgggccactatagcgaccccatgtaccgctgcgagtgcaagcctggctacgctggcaatggcatcatctgcggggaggacacagacctggatggctggcccaatgagaacctggtgtgcgtggccaatgcgacttaccactgcaaaaaggataattgccccaaccttcccaactcagggcaggaagactatgacaaggatggaattggtgatgcctgtgatgatgacgatgacaatgataaaattccagatgacagggacaactgtccattccattacaacccagctcagtatgactatgacagagatgatgtgggagaccgctgtgacaactgtccctacaaccacaacccagatcaggcagacacagacaacaatggggaaggagacgcctgtgctgcagacattgatggagacggtatcctcaatgaacgggacaactgccagtacgtctacaatgtggaccagagagacactgatatggatggggttggagatcagtgtgacaattgccccttggaacacaatccggatcagctggactctgactcagaccgcattggagatacctgtgacaacaatcaggatattgatgaagatggccaccagaacaatctggacaactgtccctatgtgcccaatgccaaccaggctgaccatgacaaagatggcaagggagatgcctgtgaccacgatgatgacaacgatggcattcctgatgacaaggacaactgcagactcgtgcccaatcccgaccagaaggactctgacggcgatggtcgaggtgatgcctgcaaagatgattttgaccatgacagtgtgccagacatcgatgacatctgtcctgagaatgttgacatcagtgagaccgatttccgccgattccagatgattcctctggaccccaaagggacatcccaaaatgaccctaactgggttgtacgccatcagggtaaagaactcgtccagactgtcaactgtgatcctggactcgctgtaggttatgatgagtttaatgctgtggacttcagtggcaccttcttcatcaacaccgaaagggacgatgactatgctggatttgtctttggctaccagtccagcagccgcttttatgttgtgatgtggaagcaagtcacccagtcctactgggacaccaaccccacgagggctcagggatactcgggcctttctgtgaaagttgtaaactccaccacagggcctggcgagcacctgcggaacgccctgtggcacacaggaaacacccctggccaggtgcgcaccctgtggcatgaccctcgtcacataggctggaaagatttcaccgcctacagatggcgtctcagccacaggccaaagacgggtttcattagagtggtgatgtatgaagggaagaaaatcatggctgactcaggacccatctatgataaaacctatgctggtggtagactagggttgtttgtcttctctcaagaaatggtgttcttctctgacctgaaatacgaatgtagagatccctaatcatcaaattgttgattgaaagactgatcataaaccaatgctggtattgcaccttctggaactatgggcttgagaaaacccccaggatcacttctccttggcttccttcttttctgtgcttgcatcagtgtggactcctagaacgtgcgacctgcctcaagaaaatgcagttttcaaaaacagactcagcattcagcctccaatgaataagacatcttccaagcatataaacaattgctttggtttccttttgaaaaagcatctacttgcttcagttgggaaggtgcccattccactctgcctttgtcacagagcagggtgctattgtgaggccatctctgagcagtggactcaaaagcattttcaggcatgtcagagaagggaggactcactagaattagcaaacaaaaccaccctgacatcctccttcaggaacacggggagcagaggccaaagcactaaggggagggcgcatacccgagacgattgtatgaagaaaatatggaggaactgttacatgttcggtactaagtcattttcaggggattgaaagactattgctggatttcatgatgctgactggcgttagctgattaacccatgtaaataggcacttaaatagaagcaggaaagggagacaaagactggcttctggacttcctccctgatccccacccttactcatcacctgcagtggccagaattagggaatcagaatcaaaccagtgtaaggcagtgctggctgccattgcctggtcacattgaaattggtggcttcattctagatgtagcttgtgcagatgtagcaggaaaataggaaaacctaccatctcagtgagcaccagctgcctcccaaaggaggggcagccgtgcttatatttttatggttacaatggcacaaaattattatcaacctaactaaaacattccttttctcttttttcctgaattatcatggagttttctaattctctcttttggaatgtagattttttttaaatgctttacgatgtaaaatatttattttttacttattctggaagatctggctgaaggattattcatggaacaggaagaagcgtaaagactatccatgtcatctttgttgagagtcttcgtgactgtaagattgtaaatacagattatttattaactctgttctgcctggaaatttaggcttcatacggaaagtgtttgagagcaagtagttgacatttatcagcaaatctcttgcaagaacagcacaaggaaaatcagtctaataagctgctctgccccttgtgctcagagtggatgttatgggattctttttttctctgttttatcttttcaagtggaattagttggttatccatttgcaaatgttttaaattgcaaagaaagccatgaggtcttcaatactgttttaccccatcccttgtgcatatttccagggagaaggaaagcatatacacttttttctttcatttttccaaaagagaaaaaaatgacaaaaggtgaaacttacatacaaatattacctcatttgttgtgtgactgagtaaagaatttttggatcaagcggaaagagtttaagtgtctaacaaacttaaagctactgtagtacctaaaaagtcagtgttgtacatagcataaaaactctgcagagaagtattcccaataaggaaatagcattgaaatgttaaatacaatttctgaaagttatgttttttttctatcatctggtataccattgctttatttttataaattattttctcattgccattggaatagatatctcagattgtgtagatatgctatttaaataatttatcaggaaatactgcctgtagagttagtatttctatttttatataatgtttgcacactgaattgaagaattgttggttttttcttttttttgttttgtttttttttttttttttttttgcttttgacctcccatttttactatttgccaatacctttttctaggaatgtgcttttttttgtacacatttttatccattttacattctaaagcagtgtaagttgtatattactgtttcttatgtacaaggaacaacaataaatcatatggaaatttatattt

SEQ ID NO: 4139 - DNA, 3702 bp, Homo sapiens
gtttgttagggagtcgtgtgcgtgccttggtcgcttctgtagctccgagggcaggttgcggaagaaagcccaggcggtctgtggcccagaggaaaggcctgcagcaggacgaggacctgagccaggaatgcaggatggcggcggtgaagaaggaagggggtgctctgagtgaagccatgtccctggagggagatgaatgggaactgagtaaagaaaatgtacaacctttaaggcaagggcggatcatgtccacgcttcagggagcactggcacaagaatctgcctgtaacaatactcttcagcagcagaaacgggcatttgaatatgaaattcgattttacactggaaatgaccctctggatgtttgggataggtatatcagctggacagagcagaactatcctcaaggtgggaaggagagtaatatgtcaacgttattagaaagagctgtagaagcactacaaggagaaaaacgatattatagtgatcctcgatttctcaatctctggcttaaattagggcgtttatgcaatgagcctttggatatgtacagttacttgcacaaccaagggattggtgtttcacttgctcagttctatatctcatgggcagaagaatatgaagctagagaaaactttaggaaagcagatgcgatatttcaggaagggattcaacagaaggctgaaccactagaaagactacagtcccagcaccgacaattccaagctcgagtgtctcggcaaactctgttggcacttgagaaagaagaagaggaggaagtttttgagtcttctgtaccacaacgaagcacactagctgaactaaagagcaaagggaaaaagacagcaagagctccaatcatccgtgtaggaggtgctctcaaggctccaagccagaacagaggactccaaaatccatttcctcaacagatgcaaaataatagtagaattactgtttttgatgaaaatgctgatgaggcttctacagcagagttgtctaagcctacagtccagccatggatagcaccccccatgcccagggccaaagagaatgagctgcaagcaggcccttggaacacaggcaggtccttggaacacaggcctcgtggcaatacagcttcactgatagctgtacccgctgtgcttcccagtttcactccatatgtggaagagactgcacaacagccagttatgacaccatgtaaaattgaacctagtataaaccacatcctaagcaccagaaagcctggaaaggaagaaggagattctctacaaagggttcagagccatcagcaagcgtctgaggagaagaaagagaagatgatgtattgtaaggagaagatttatgcaggagtaggggaattctcctttgaagaaattcgggctgaagttttccggaagaaattaaaagagcaaagggaagccgagctattgaccagtgcagagaagagagcagaaatgcagaaacagattgaagagatggagaagaagctaaaagaaatccaaactactcagcaagaaagaacaggtgatcagcaagaagagacgatgcctacaaaggagacaactaaactgcaaattgcttccgagtctcagaaaataccaggaatgactctatccagttctgtttgtcaagtaaactgttgtgccagagaaacttcacttgcggagaacatttggcaggaacaacctcattctaaaggtcccagtgtacctttctccatttttgatgagtttcttctttcagaaaagaagaataaaagtcctcctgcagatcccccacgagttttagctcaacgaagaccccttgcagttctcaaaacctcagaaagcatcacctcaaatgaagatgtgtctccagatgtttgtgatgaatttacaggaattgaacccttgagcgaggatgccattatcacaggcttcagaaatgtaacaatttgtcctaacccagaagacacttgtgactttgccagagcagctcgttttgtatccactccttttcatgagataatgtccttgaaggatctcccttctgatcctgagagactgttaccggaagaagatctagatgtaaagacctctgaggaccagcagacagcttgtggcactatctacagtcagactctcagcatcaagaagctgagcccaattattgaagacagtcgtgaagccacacactcctctggcttctctggttcttctgcctcggttgcaagcacctcctccatcaaatgtcttcaaattcctgagaaactagaacttactaatgagacttcagaaaaccctactcagtcaccatggtgttcacagtatcgcagacagctactgaagtccctaccagagttaagtgcctctgcagagttgtgtatagaagacagaccaatgcctaagttggaaattgagaaggaaattgaattaggtaatgaggattactgcattaaacgagaatacctaatatgtgaagattacaagttattctgggtggcgccaagaaactctgcagaattaacagtaataaaggtatcttctcaacctgtcccatgggacttttatatcaacctcaagttaaaggaacgtttaaatgaagattttgatcatttttgcagctgttatcaatatcaagatggctgtattgtttggcaccaatatataaactgcttcacccttcaggatcttctccaacacagtgaatatattacccatgaaataacagtgttgattatttataaccttttgacaatagtggagatgctacacaaagcagaaatagtccatggtgacttgagtccaaggtgtctgattctcagaaacagaatccacgatccctatgattgtaacaagaacaatcaagctttgaagatagtggacttttcctacagtgttgaccttagggtgcagctggatgtttttaccctcagcggctttcggactgtacagatcctggaaggacaaaagatcctggctaactgttcttctccctaccaggtagacctgtttggtatagcagatttagcacatttactattgttcaaggaacacctacaggtcttctgggatgggtccttctggaaacttagccaaaatatttctgagctaaaagatggtgaattgtggaataaattctttgtgcggattctgaatgccaatgatgaggccacagtgtctgttcttggggagcttgcagcagaaatgaatggggtttttgacactacattccaaagtcacctgaacaaagccttatggaaggtagggaagttaactagtcctggggctttgctctttcagtgagctaggcaatcaagtctcacagattgctgcctcagagcaatggttgtattgtggaacactgaaactgtatgtgctgtaatttaatttaggacacatttagatgcactaccattgctgttctactttttggtacaggtatattttgacgtcactgatattttttatacagtgatatacttactcatggccttgtctaacttttgtgaagaactattttattctaaacagactcattacaaatggttaccttgttatttaacccatttgtctctacttttccctgtacttttcccatttgtaatttgtaaaatgttctcttatgatcaccatgtattttgtaaataataaaatagtatctgttaaaaaaaaaaaaaaaaaaaaaaaaaaaaaaaaaaaaaaaaaaaaaaaaaaaaaa

SEQ ID NO: 4140 - protein, 1050 aa, Homo sapiens
MAAVKKEGGALSEAMSLEGDEWELSKENVQPLRQGRIMSTLQGALAQESACNNTLQQQKRAFEYEIRFYTGNDPLDVWDRYISWTEQNYPQGGKESNMSTLLERAVEALQGEKRYYSDPRFLNLWLKLGRLCNEPLDMYSYLHNQGIGVSLAQFYISWAEEYEARENFRKADAIFQEGIQQKAEPLERLQSQHRQFQARVSRQTLLALEKEEEEEVFESSVPQRSTLAELKSKGKKTARAPIIRVGGALKAPSQNRGLQNPFPQQMQNNSRITVFDENADEASTAELSKPTVQPWIAPPMPRAKENELQAGPWNTGRSLEHRPRGNTASLIAVPAVLPSFTPYVEETAQQPVMTPCKIEPSINHILSTRKPGKEEGDSLQRVQSHQQASEEKKEKMMYCKEKIYAGVGEFSFEEIRAEVFRKKLKEQREAELLTSAEKRAEMQKQIEEMEKKLKEIQTTQQERTGDQQEETMPTKETTKLQIASESQKIPGMTLSSSVCQVNCCARETSLAENIWQEQPHSKGPSVPFSIFDEFLLSEKKNKSPPADPPRVLAQRRPLAVLKTSESITSNEDVSPDVCDEFTGIEPLSEDAIITGFRNVTICPNPEDTCDFARAARFVSTPFHEIMSLKDLPSDPERLLPEEDLDVKTSEDQQTACGTIYSQTLSIKKLSPIIEDSREATHSSGFSGSSASVASTSSIKCLQIPEKLELTNETSENPTQSPWCSQYRRQLLKSLPELSASAELCIEDRPMPKLEIEKEIELGNEDYCIKREYLICEDYKLFWVAPRNSAELTVIKVSSQPVPWDFYINLKLKERLNEDFDHFCSCYQYQDGCIVWHQYINCFTLQDLLQHSEYITHEITVLIIYNLLTIVEMLHKAEIVHGDLSPRCLILRNRIHDPYDCNKNNQALKIVDFSYSVDLRVQLDVFTLSGFRTVQILEGQKILANCSSPYQVDLFGIADLAHLLLFKEHLQVFWDGSFWKLSQNISELKDGELWNKFFVRILNANDEATVSVLGELAAEMNGVFDTTFQSHLNKALWKVGKLTSPGALLFQ

SEQ ID NO: 4141 - DNA, 4519 bp, Homo sapiens
cagccagggccaccccaggggctataagagcaactagatttctggagcagctcggggatgggtgccatttgagcccagcttggctccccctcctggctggcctccttcctgcccttctgcctgcctgtgtctgctgagattctgcaaagaggaacgttggcaccatgtctctgctcaaccctgtcctgctgccccccaaggtgaaggcctatctgagccaaggggagcgcttcatcaaatgggatgatgaaactacagttgcctctccagttatcctccgtgtggatcctaagggctactacttatactggacgtatcaaagtaaggagatggagtttctggatatcaccagcatccgggatactcgctttgggaagtttgccaagatgcccaagagccagaagctccgggacgtcttcaacatggactttcctgataacagtttcctgctgaagacactcacggtggtgtccggcccggacatggtggacctcaccttccacaacttcgtctcctacaaggagaacgtgggcaaggcctgggctgaggacgtactggccctagtcaaacatccgctgacggccaacgcctcccgcagcaccttcctggacaagatccttgtgaagctcaagatgcagctcaactctgaagggaagattccggtgaagaactttttccagatgtttcctgctgaccgcaagcgggtggaagctgctctcagtgcctgccacctccccaaaggcaaaaatgacgccatcaatcctgaggacttcccagaacctgtctacaagagtttcctcatgagcctctgtcctcggccagaaatagatgagatcttcacttcttaccatgctaaggccaaaccctacatgacgaaggagcacctgaccaaattcatcaaccagaaacagcgggactcccggcttaactccctgctgttcccgccagcacggcctgaccaggtgcagggcctcatcgacaagtatgagcccagtggcatcaatgcacagaggggccagctgtcacctgaaggcatggtctggtttctctgtgggccagagaacagcgtgctggcccaggacaagctgctgctccaccacgacatgacgcagccactcaatcattacttcatcaactcgtcccacaacacctacctgacagccggccagttctcaggcctctcctcggctgagatgtaccgccaggtgctgctctctggctgccgttgcgtggagctagactgctggaaggggaaaccccctgacgaggagcccattatcacccatggcttcaccatgaccacagacatcttcttcaaagaagcaattgaggctattgcagaaagtgcctttaagacctccccctatcccatcatcctgtcgtttgagaaccatgtggactcaccccgccagcaggctaagatggctgagtattgccggacgatctttggggatatgctgctcacagagcccctggaaaagttcccactaaaaccaggtgtccccctgcccagccctgaggatctcaggggcaagatcctcatcaagaacaagaagaaccagttttctggccccacctcctccagtaaggataccggtggggaggctgagggcagcagcccacccagtgcccctgcagtgtgggctggcgaggaagggactgagctggaggaggaggaggtggaagaggaagaggaggaggagtcaggaaacctggatgaagaagagattaagaagatgcagtcggatgagggcacagcgggcctggaagtgacggcttatgaggagatgtccagcctagtcaattacatccagcccaccaagttcgtctcctttgagttctctgcccaaaagaaccgaagttatgtcatctcgtccttcacagagctcaaggcatatgacctgctctccaaggcctcggtgcagtttgtggactacaacaagcgccagatgagccgcatttaccccaagggaacccgcatggactcctccaactacatgccccagatgttctggaatgctggatgccagatggttgccctcaacttccagacgatggacttgcccatgcagcagaacatggcagtatttgagttcaacgggcagagcggctacctcctcaagcatgagttcatgcgccggccggacaagcagttcaaccccttctcagtggaccgcatcgacgtggtggtggccaccaccctttccattacggtgatctctgggcagttcctgtcagaacgcagcgtgcgcacctatgtagaagtggagctgtttggccttcctggggaccccaagaggcgctatcgaactaagctgtcacccagtactaactccatcaatcctgtctggaaggaggagccctttgtctttgagaagatcttgatgcctgagctggcctccctcagagtggctgtgatggaggaaggcaacaagtttcttggacaccgcatcatccccatcaatgccctaaattctgggtaccaccacctgtgcctgcacagtgagagcaacatgcccctcaccatgcctgcgctcttcatcttcctggagatgaaggactacatacctggtgcttgggcagatctcactgtggccctcgccaaccccattaagttcttcagtgcccatgacacgaagtctgtgaagctcaaggaggccatgggaggtctgcctgagaagcccttcccactggcgagtccagttgccagccaggtcaatggggcgttggccccaacgagcaatgggtcaccagcagccagggccggggccagggaagaggctatgaaagaagctgcggagccgcggaccgccagcctggaggagctccgggagctaaagggcgtggtgaagctgcagcggcggcacgagaaggagctgcgagagttggagcggcgcggagcgcggcgctgggaggagctgctgcagcggggcgcggcgcagctggcggagctcgggccaccgggcgtggggggcgtcggggcctgcaagctcggtcccggcaagggctctcgcaagaagaggagcctgccccgcgaggagagcgccggagccgcgccgggcgagggccctgagggcgtggacgggcgcgtgcgggagctgaaagacaggctggagctggagctgctgcggcagggcgaggagcagtacgagtgcgttctgaagcgcaaggagcagcacgtggccgagcaaatctccaaaatgatggagctggccagagagaaacaggcggcagagctgaaggccctgaaggagacgtcggagaacgacaccaaagagatgaagaaaaagctggagacaaagagactggagcggatccagggcatgaccaaagtcaccacagacaagatggcccaggagaggttgaagagagagattaacaactcccacatccaggaagtagtgcaggtgatcaagcagatgacggagaacttggagaggcaccaggagaagctggaggagaagcaggcggcttgcctggaacagatacgggagatggaaaagcagttccagaaggaggcgctggcagagtacgaggccaggatgaagggtctggaggcagaggtgaaggagtcggtgagggcctgcctcaggacctgctttccctccgaggccaaggacaagcctgagagggcctgcgagtgccccccagagctgtgtgagcaggacccactcatagcaaaggcagatgcccaggagagccgcctctgatgcccccatcccactgggacatttagcaaggaggttcagccccttctctgggatgtggttctattcccccaggaaaaaggagccccagccttctgaggctgtgggaacctgtggctgccttggacgctgcagccccctcctcaacggccaggccagagtctgagacaggacccaggcaccctcacggcagggcctctctggggcctagaagtcttctcaagctgacttcctacctccccctccatctctagataagtgtcatatatttgttgagggcaaaagactatggactggaaggcagaaagtgggatcctggccccactctgcctttcctattgagcaaccagctctgggctcagtttcctcacctggagggttggacccactcacctccactctagccccgaaccctcctgccccaggcttccaggccccatcaggcctgccctgagttggccttgtccactccttgaggcagatcctggcactacctcacagctccctggggacggccactccctggctgagggccctcccctcccctctgcctgtccggaacgggaggctgaaatggaaaagctgccttggccctgcttggctgagtcacaaggggcagtgggctcttgggtgctgttccaccctgaccctggctcacccctcttcctaggcctgggggcaggcagttcctaccatgtacccctctcaggctgcctgcctgacaaggtcagcatcatttgctctcctgaatttatgaggtttatttatttttctctttcctactcctattaaagaacctcgtcccagtgaaa

SEQ ID NO: 4142 - protein, 1181 aa, Homo sapiens
MSLLNPVLLPPKVKAYLSQGERFIKWDDETTVASPVILRVDPKGYYLYWTYQSKEMEFLDITSIRDTRFGKFAKMPKSQKLRDVFNMDFPDNSFLLKTLTVVSGPDMVDLTFHNFVSYKENVGKAWAEDVLALVKHPLTANASRSTFLDKILVKLKMQLNSEGKIPVKNFFQMFPADRKRVEAALSACHLPKGKNDAINPEDFPEPVYKSFLMSLCPRPEIDEIFTSYHAKAKPYMTKEHLTKFINQKQRDSRLNSLLFPPARPDQVQGLIDKYEPSGINAQRGQLSPEGMVWFLCGPENSVLAQDKLLLHHDMTQPLNHYFINSSHNTYLTAGQFSGLSSAEMYRQVLLSGCRCVELDCWKGKPPDEEPIITHGFTMTTDIFFKEAIEAIAESAFKTSPYPIILSFENHVDSPRQQAKMAEYCRTIFGDMLLTEPLEKFPLKPGVPLPSPEDLRGKILIKNKKNQFSGPTSSSKDTGGEAEGSSPPSAPAVWAGEEGTELEEEEVEEEEEEESGNLDEEEIKKMQSDEGTAGLEVTAYEEMSSLVNYIQPTKFVSFEFSAQKNRSYVISSFTELKAYDLLSKASVQFVDYNKRQMSRIYPKGTRMDSSNYMPQMFWNAGCQMVALNFQTMDLPMQQNMAVFEFNGQSGYLLKHEFMRRPDKQFNPFSVDRIDVVVATTLSITVISGQFLSERSVRTYVEVELFGLPGDPKRRYRTKLSPSTNSINPVWKEEPFVFEKILMPELASLRVAVMEEGNKFLGHRIIPINALNSGYHHLCLHSESNMPLTMPALFIFLEMKDYIPGAWADLTVALANPIKFFSAHDTKSVKLKEAMGGLPEKPFPLASPVASQVNGALAPTSNGSPAARAGAREEAMKEAAEPRTASLEELRELKGVVKLQRRHEKELRELERRGARRWEELLQRGAAQLAELGPPGVGGVGACKLGPGKGSRKKRSLPREESAGAAPGEGPEGVDGRVRELKDRLELELLRQGEEQYECVLKRKEQHVAEQISKMMELAREKQAAELKALKETSENDTKEMKKKLETKRLERIQGMTKVTTDKMAQERLKREINNSHIQEVVQVIKQMTENLERHQEKLEEKQAACLEQIREMEKQFQKEALAEYEARMKGLEAEVKESVRACLRTCFPSEAKDKPERACECPPELCEQDPLIAKADAQESRL

SEQ ID NO: 4143 - DNA, 1960 bp, Homo sapiens
atgttcccccgcccgctgaccccgctggcggccccaaatggcgccgagcccctgggccgggcgctgaggcgggcccctctgggcagggcccgggcggggctgggtgggccgcccctgctgctgccgtccatgctgatgtttgcggtgatcgtggcctccagcgggctgctgctcatgatcgagcggggcatcctggccgagatgaagcccctgcccctgcacccgcccggccgcgagggcacagcctggcgcgggaaagcccccaagcctgggggcctgtccctcagggctggggacgcggacttgcaagtgcggcaggacgtccggaacaggaccctgcgggcggtgtgcggacagccaggcatgccccgggacccctgggacttgccggtggggcagcggcgcaccctgctgcgccacatcctcgtaagtgaccgttaccgcttcctctactgctacgtccccaaggtggcctgctctaactggaagcgggtgatgaaggtgctggcaggcgtcctggacagcgtggacgtccgcctcaagatggaccaccgcagtgacctggtgttcctggccgacctgcggcctgaggagattcgctaccgcctgcagcactactttaagttcctgtttgtgcgggagcccttggaacgcctcctctctgcctaccgcaacaagtttggcgagatccgagagtaccagcaacgctatggggctgagatagtgaggcggtacagggctggagcggggcccagccctgcaggcgacgatgtcacattccccgagttcctgagatacctggtggatgaggaccctgagcgcatgaatgagcattggatgcccgtgtaccacctgtgccagccttgtgccgtgcactatgactttgtgggctcctatgagaggctggaggctgatgcaaatcaggtgctggagtgggtacgggcaccacctcacgtccgatttccagctcgccaggcctggtaccggccagccagccccgaaagcctgcattaccacttgtgcagtgccccccgggccctgctgcaggatgtgctgcctaagtatatcctggacttctccctctttgcctacccactgcctaatgtcaccaaggaggcgtgtcagcagtgaccatgggtgtggggccagcagctggtggggactggtttcaacgccagctttctgtgcttctgcctgtcattcggagaaactctggctctggggcttggggcttctcaggatcctggatggcagagactgccctcagaagttccttgtccagggtgggcacccacagtgactcagaggacagggctaggcaggagacctgctgctcctcattggggggatctcttggggggcagacaccagtttgccaatgaagcaacacatctgatctaaagactggctccagaccccgggctgccaggattatgcagtccacttggtctaccttaatttaacctgtggccaaactcagagatggtaccagccaggggcaagcatgaccagagccagggaccctgtggctctgatcccccatttatccaccccatgtgcctcaggactagagtgagcaatcataccttataaatgacttttgtgcctttctgctccagtctcaaaatttcctacacctgccagttctttacatttttccaaggaaaggaaaacggaagcagggttcttgcctggtagctccaggacccagctctgcaggcacccaaagaccctctgtgcccagcctcttccttgagttctcggaacctcctccctaattctcccttccttccccacaaggcctttgaggttgtgactgtggctggtatatctggctgccatttttctgatgcatttatttaaaatttgtactttttgatagaacccttgtaagggctttgttttcctaatagctgactttttaataaagcagttttatatataaaaaaaaaaaaaaaaa

SEQ ID NO: 4144 - protein, 376 aa, Homo sapiens
MFPRPLTPLAAPNGAEPLGRALRRAPLGRARAGLGGPPLLLPSMLMFAVIVASSGLLLMIERGILAEMKPLPLHPPGREGTAWRGKAPKPGGLSLRAGDADLQVRQDVRNRTLRAVCGQPGMPRDPWDLPVGQRRTLLRHILVSDRYRFLYCYVPKVACSNWKRVMKVLAGVLDSVDVRLKMDHRSDLVFLADLRPEEIRYRLQHYFKFLFVREPLERLLSAYRNKFGEIREYQQRYGAEIVRRYRAGAGPSPAGDDVTFPEFLRYLVDEDPERMNEHWMPVYHLCQPCAVHYDFVGSYERLEADANQVLEWVRAPPHVRFPARQAWYRPASPESLHYHLCSAPRALLQDVLPKYILDFSLFAYPLPNVTKEACQQ

SEQ ID NO: 4145 - DNA, 1638 bp, Homo sapiens
atgtggctggaccgccgcggatggctcagggttcttggacattggcgctacgaccttaggcgccctagctttaccaggacttggagtggcgataagggcccaatggcagaaacagtgtctacccaggttgggacagagggcgggctgagggcttcgcatcagcaaaacggtgacgctggtggcgacgcgaaggttgagctgtcccccgggcccccgaagccggctggccgggaagtggagccggccccagtaggcggggagcatccctcggctgcagccccaggcccgggcaagcataagaagcggcggggcgcaaccagggagcgtgtcgtgccgcccccgaagaagcggcggaccggggtgagcttcggagatgagcactttgcagaaaccagttattacttcgagggcggcctgcgtaaggtgcggccctattactttgacttccggacctactgcaaaggtcgctgggtgggccacagcttgctgcacgtcttcagtaccgagttccgagctcagcccctggcctactatgaggccgcggtccgggcgggccgcctgcaactcaacgagaagccggtgcaggacctcaacatcgtgctcaaggacaatgatttcttgcggaacacagtgcacaggcatgagccaccagtcacagcagagcccattcgcctgctagctgagaacgaagatgtggtggttgtagacaagccttcctccattcccgttcacccctgtggccgcttccgacacaacacagttatcttcatcctaggcaaggagcaccaactcaaggagctacaccccttgcatcggcttgaccgccttacctcaggggtgcttatgtttgccaagacagctgcagtctctgagagaattcacgagcaggttcgggaccggcagctggagaaggagtacgtgtgccgggtggaaggggagttccccactgaggaagtgacctgtaaagaacccatcttagtggtgtcttacaaagtaggggtgtgccgtgtagatccccggggcaagccctgtgagacagtgttccagaggctaagctacaatggccagtccagtgtggtacggtgccggccactcacaggccgcacacaccagattcgagtccaccttcagttcttgggccatcccattctcaacgaccccatctacaactcagttgcctggggtccttctcgaggccggggcggctacattcccaagacaaacgaggagttgctacgggacctggtagcagagcaccaggccaaacagagcctggatgtgctagatctctgtgagggtgacctgtccccaggactcacagactctacggccccctcctcagagttgggcaaggacgacctggaagagttggctgcagctgcccagaagatggaggaagtagctgaggcagcccctcaggagttggacacaatagccttggcatcagagaaggcagttgaaacagatgtcatgaatcaagagacagacccactctgtgcagagtgccggctggtgcgacaggatcccttgccccaagaccttgtgatgttcctacatgccctacgctataaagggccaggctttgagtacttttcaccaatgcctgcctgggcacaggatgactggcaaaaggactga

SEQ ID NO: 4146 - protein, 545 aa, Homo sapiens
MWLDRRGWLRVLGHWRYDLRRPSFTRTWSGDKGPMAETVSTQVGTEGGLRASHQQNGDAGGDAKVELSPGPPKPAGREVEPAPVGGEHPSAAAPGPGKHKKRRGATRERVVPPPKKRRTGVSFGDEHFAETSYYFEGGLRKVRPYYFDFRTYCKGRWVGHSLLHVFSTEFRAQPLAYYEAAVRAGRLQLNEKPVQDLNIVLKDNDFLRNTVHRHEPPVTAEPIRLLAENEDVVVVDKPSSIPVHPCGRFRHNTVIFILGKEHQLKELHPLHRLDRLTSGVLMFAKTAAVSERIHEQVRDRQLEKEYVCRVEGEFPTEEVTCKEPILVVSYKVGVCRVDPRGKPCETVFQRLSYNGQSSVVRCRPLTGRTHQIRVHLQFLGHPILNDPIYNSVAWGPSRGRGGYIPKTNEELLRDLVAEHQAKQSLDVLDLCEGDLSPGLTDSTAPSSELGKDDLEELAAAAQKMEEVAEAAPQELDTIALASEKAVETDVMNQETDPLCAECRLVRQDPLPQDLVMFLHALRYKGPGFEYFSPMPAWAQDDWQKD

SEQ ID NO: 4147 - DNA, 1638 bp, Homo sapiens
taaggagagtgcggcgcttcccgaggcgtgcagctgggaactgcaactcatctgggttgtgcgcagaaggctggggcaagcgagtagagaagtggagcgtaagccaggggcgttgggggccgtgcgggtcgggcgcgtgccacgcccgcggggtgaagtcggagcgcggggcctgctggagagaggagcgctgcggaccgagtaatggcaatgcagatgcagcttgaagcaaatgcagatacttcagtggaagaagaaagctttggcccacaacccatttcacggttagagcagtgtggcataaatgccaacgatgtgaagaaattggaagaagctggattccatactgtggaggctgttgcctatgcgccaaagaaggagctaataaatattaagggaattagtgaagccaaagctgataaaattctggctgaggcagctaaattagttccaatgggtttcaccactgcaactgaattccaccaaaggcggtcagagatcatacagattactactggctccaaagagcttgacaaactacttcaaggtggaattgagactggatctatcacagaaatgtttggagaattccgaactgggaagacccagatctgtcatacgctagctgtcacctgccagcttcccattgaccggggtggaggtgaaggaaaggccatgtacattgacactgagggtacctttaggccagaacggctgctggcagtggctgagaggtatggtctctctggcagtgatgtcctggataatgtagcatatgctcgagcgttcaacacagaccaccagacccagctcctttatcaagcatcagccatgatggtagaatctaggtatgcactgcttattgtagacagtgccaccgccctttacagaacagactactcgggtcgaggtgagctttcagccaggcagatgcacttggccaggtttctgcggatgcttctgcgactcgctgatgagtttggtgtagcagtggtaatcactaatcaggtggtagctcaagtggatggagcagcgatgtttgctgctgatcccaaaaaacctattggaggaaatatcatcgcccatgcatcaacaaccagattgtatctgaggaaaggaagaggggaaaccagaatctgcaaaatctacgactctccctgtcttcctgaagctgaagctatgttcgccattaatgcagatggagtgggagatgccaaagactgaatcattgggtttttcctctgttaaaaaccttaagtgctgcagcctaatgagagtgcactgctccctggggttctctacaggcctcttcctgttgtgactgccaggataaagcttccgggaaaacagctattatatcagcttttctgatggtataaacaggagacaggtcagtagtcacaaactgatctaaaatgtttattccttctgtagtgtattaatctctgtgtgttttctttggttttggaggaggggtatgaagtatctttgacatggtgccttaggaatgacttgggtttaacaagctgtctactggacaatcttatgtttccaagagaactaaagctggagagacctgacccttctctcacttctaaattaatggtaaaataaaatgcctcagctatgtagcaaagg

SEQ ID NO: 4148 - DNA, 1528 bp, Homo sapiens
ggcacgaggcaggccaggtgtgtgcgtccgtcggtctttccgtgcccacgccggagaccagccccggaggccgcctgggcctatccctgtgccaggcaccatgaagcaggagtctgcagccccgaacaccccgcccacctcgcagtcccctacgccgtccgctcagttcccccgaaacgacggcgaccctcaagcgctgtggattttcgggtacggctccctggtgtggaggcccgacttcgcctacagcgacagccgtgtgggcttcgtgcgcggctacagccgccgtttctggcagggagacaccttccatcggggcagcgacaagatgcctggccgtgtggtgacgctccttgaagatcatgagggctgcacttggggcgtggcataccaagtgcaaggggagcaggtaagcaaggccctgaagtacctgaatgtgcgagaggcagtgcttggtggctacgataccaaggaggtcaccttctatccccaagatgctcctgaccaaccactgaaggcattggcctatgtggccaccccacagaaccctggttacctgggccctgcgcctgaagaggccattgccacgcagatcctggcctgccggggcttctccggccacaaccttgaatacttgctgcgtctggcagacttcatgcagctctgtgggcctcaggcgcaggacgagcacctggcagccatcgtggacgctgtgggcaccatgttgccctgcttctgccccaccgagcaggctctggcgctggtgtgaggggctgagcccctgcggggagtgctcatgtggacatcagggccagacacccactccagtgcacaagacagacttgcgaccgcttgagcccactgagcagatatggtgggtggctggaggcttctctttctcagtccctgcctgtctgccagcctgcagctctcctgcttgacactgacttactacttgaaactttatttattgcaccatgttggtgtggtgggcaggtggagggcctgccctggacacaggggccctgctgagcagtggccccatcctggaacttgaccagattccccccagtgctgctgctaaccccacaccacccaggcctccacctccccagggagtctccaagagcctcgatcctctgctcactcagcccagccatccatagccctgggaattccacctgccaaggatcccagcaggctggatgagggatagtagggcatgaggagaaggagccctgtaaggactgaggccccggccagcccttctcctccaccagttccccagagcagagctggagctgatgcctggacacagctgctgagcctggcctgggcctcttacccacttggttgttttcttgtccctctgtctgtctgtctatctacttgtctgtctgggccactcctgcctgtgtgttggtctattcctgggaagctcatcactacaggccctggcaaccttcccagtctgtcccatactgttacccataaaactatctctttaaaaaaaaaaaaaaaaaaaaaa

SEQ ID NO: 4149 - protein, 222 aa, Homo sapiens
MKQESAAPNTPPTSQSPTPSAQFPRNDGDPQALWIFGYGSLVWRPDFAYSDSRVGFVRGYSRRFWQGDTFHRGSDKMPGRVVTLLEDHEGCTWGVAYQVQGEQVSKALKYLNVREAVLGGYDTKEVTFYPQDAPDQPLKALAYVATPQNPGYLGPAPEEAIATQILACRGFSGHNLEYLLRLADFMQLCGPQAQDEHLAAIVDAVGTMLPCFCPTEQALALV

SEQ ID NO: 4150 - DNA, 1155 bp, Homo sapiens
aggccacagggcatggatcagccccactgcatctcaagtgaactgtatagccaagtcttaaacctctcacggggcaagcctgacacagaccccctttagatgctcaggcatactgtttccatcccgattccactcttcggctctgacacgtcccttgcaaagtctccgcaggtgctgtgaagagccttccatggtagagatttctcttaagagtgtgatttctcatagggctagtaagggagattgtatacctgttgtccacagtcttcaggcagctccccaggtctctgaaccccagagtgtcgtcattggagagagcagtgactgcgagagatggtggaggccgctaagcatggtagaggctagaggaagtctatccacaggcagttgtgttcccagcaattcctcccatcctgcatggttcacaccaagagaaccttcagatcctaccagcaaccgtagcaccttccacccaggggactcccagaagccagtaaagagaccaggagccacctcaatcagcaggacagcctcactgcccctcttgcagagtcccctttgcccatcctgaatgcacagtctccctgctcatgcccttcagtcccctgcttggctgtatgcactgtctatattgcactgagagaggaagggacagcaggagtgaggtgaagagggcggagagagggggcaggctcggcaccggccctcccagcccggccagcctgagcttgctgccctccagtagagacagaggggcagtgtttgcaagggaggtgtttctgcctgtccctgcctgatgtccctggtggagcaggtacctccgggcgggcaagcctctgatttgcacacctgaaaatcgcggaattgagtttcgatagattgatttttaaaacttttttggagtagggggtataggggaatcatttaatttaaatcattaagattcccctgctcaaacccagattcctgtgtacagatgctatttagagggaatcagaaaaatgccaagccttttctctttgaatgtgctatttttataactgaacttgtacatatgtataaagagagacacatcttccttttactaactggataaaaaaatcttaaataaaatggagtgagataattttaaaaaaaaaaaaaaaaaaaaaaaaa

SEQ ID NO: 4151 - protein, 126 aa, Homo sapiens
MVEISLKSVISHRASKGDCIPVVHSLQAAPQVSEPQSVVIGESSDCERWWRPLSMVEARGSLSTGSCVPSNSSHPAWFTPREPSDPTSNRSTFHPGDSQKPVKRPGATSISRTASLPLLQSPLCPS

SEQ ID NO: 4152 - DNA, 2268 bp, Homo sapiens
  unsure 13: unknown base
gggatttgaaccncgctgacgaagtttggtgatccatcttccgagtatcgccgggatttcgaatcgcgatgatcatcccctctctagaggagctggactccctcaagtacagtgacctgcagaacttagccaagagtctgggtctccgggccaacctgagggcaaccaagttgttaaaagccttgaaaggctacattaaacatgaggcaagaaaaggaaatgagaatcaggatgaaagtcaaacttctgcatcctcttgtgatgagactgagatacagatcagcaaccaggaagaagctgagagacagccacttggccatgtcaccaaaacaaggagaaggtgcaagactgtccgtgtggaccctgactcacagcagaatcattcagagataaaaataagtaatcccactgaattccagaatcatgaaaagcaggaaagccaggatctcagagctactgcaaaagttccttctccaccagacgagcaccaagaagctgagaatgctgtttcctcaggtaacagagattcaaaggtaccttcagaaggaaagaaatctctctacacagatgagtcatccaaacctggaaaaaataaaagaactgcaatcactactccaaactttaagaagcttcatgaagctcattttaaggaaatggagtccattgatcaatatattgagagaaaaagaaacattttgaagaacacaattccatgaatgaactgaagcagcagcccatcaataagggaggggtcaggactccagtacctccaagaggaagactctctgtggcttctactcccatcagccaacgacgctcgcaaggccggtcttgtggccctgcaagtcagagtaccttgggtctgaaggggtcactcaagcgctctgctatctctgcagctaaaacgggtgtcaggttttcagctgctactaaagataatgagcataagcgttcactgaccaagactccagccagaaagtctgcacatgtgaccgtgtctgggggcaccccaaaaggcgaggctgtgcttgggacacacaaattaaagaccatcacggggaattctgctgctgttattaccccattcaagttgacaactgaggcaacgcagactccagtctccaataagaaaccagtgtttgatcttaaagcaagtttgtctcgtcccctcaactatgaaccacacaaaggaaagctaaaaccatgggggcaatctaaagaaaataattatctaaatcaacatgtcaacagaattaacttctacaagaaaacttacaaacaaccccatctccagacaaaggaagagcaacggaagaaacgcgagcaagaacgaaaggagaagaaagcaaaggttttgggaatgcgaaggggcctcattttggctgaagattaataattttttaatatcttgtaaatattcctgtattctcaacttttttccttttgtaaatttttttttttttgctgtcatccccactttagtcacgagatctttttctgctaactgttcatagtctgtgtagtgtccatgggttcttcatgtgctatgatctctgaaaagacgttatcaccttaaagctcaaattctttgggatggtttttacttaagtccattaacaattcaggtttctaacgagacccatcctaaaattctgtttctagatttttaatgtcaagttcccaagttccccctgctggttctaatattaacagaactgcagtcttctgctagccaatagcatttacctgatggcagctagttatgcaagcttcaggagaatttgaacaataacaagaatagggtaagctgggatagaaaggccacctcttcactctctatagaatatagtaacctttatgaaacggggccatatagtttggttatgacatcaatattttacctaggtgaaattgtttaggcttatgtaccttcgttcaaatatcctcatgtaattgccatctgtcactcactatattcacaaaaataaaactctacaactcattctaacattgcttacttaaaagctacatagccctatcgaaatgcgaggattaatgctttaatgcttttagagacagggtctcactgtgttgcccaggctggtctcaaactccaccaaatgtacttcttattcattttatggaaaagactaggctttgcttagtatcatgtccatgtttccttcacctcagtggagcttctgagttttatactgctcaagatcgtcataaataaaattttttctcattgtcaaaaaaaaaaaaaaa

SEQ ID NO: 4153 - protein, 226 aa, Homo sapiens
MNELKQQPINKGGVRTPVPPRGRLSVASTPISQRRSQGRSCGPASQSTLGLKGSLKRSAISAAKTGVRFSAATKDNEHKRSLTKTPARKSAHVTVSGGTPKGEAVLGTHKLKTITGNSAAVITPFKLTTEATQTPVSNKKPVFDLKASLSRPLNYEPHKGKLKPWGQSKENNYLNQHVNRINFYKKTYKQPHLQTKEEQRKKREQERKEKKAKVLGMRRGLILAED

SEQ ID NO: 4154 - DNA, 1323 bp, Homo sapiens
atgatcatcccctctctagaggagctggactccctcaagtacagtgacctgcagaacttagccaagagtctgggtctccgggccaacctgagggcaaccaagttgttaaaagccttgaaaggctacattaaacatgaggcaagaaaaggaaatgagaatcaggatgaaagtcaaacttctgcatcctcttgtgatgagactgagatacagatcagcaaccaggaagaagctgagagacagccacttggccatgtcaccaaaacaaggagaaggtgcaagactgtccgtgtggaccctgactcacagcagaatcattcagagataaaaataagtaatcccactgaattccagaatcatgaaaagcaggaaagccaggatctcagagctactgcaaaagttccttctccaccagacgagcaccaagaagctgagaatgctgtttcctcaggtaacagagattcaaaggtaccttcagaaggaaagaaatctctctacacagatgagtcatccaaacctggaaaaaataaaagaactgcaatcactactccaaactttaagaagcttcatgaagctcattttaaggaaatggagtccattgatcaatatattgagagaaaaaagaaacattttgaagaacacaattccatgaatgaactgaagcagcccatcaataagggaggggtcaggactccagtacctccaagaggaagactctctgtggcttctactcccatcagccaacgacgctcgcaaggccggtcttgtggccctgcaagtcagagtaccttgggtctgaaggggtcactcaagcgctctgctatctctgcagctaaaacgggtgtcaggttttcagctgctactaaagataatgagcataagcgttcactgaccaagactccagccagaaagtctgcacatgtgaccgtgtctgggggcaccccaaaaggcgaggctgtgcttgggacacacaaattaaagaccatcacggggaattctgctgctgttattaccccattcaagttgacaactgaggcaacgcagactccagtctccaataagaaaccagtgtttgatcttaaagcaagtttgtctcgtcccctcaactatgaaccacacaaaggaaagctaaaaccatgggggcaatctaaagaaaataattatctaaatcaacatgtcaacagaattaacttctacaagaaaacttacaaacaaccccatctccagacaaaggaagagcaacggaagaaacgcgagcaagaacgaaaggagaagaaagcaaaggttttgggaatgcgaaggggcctcattttggctgaagattaa

SEQ ID NO: 4155 - protein, 440 aa, Homo sapiens
MIIPSLEELDSLKYSDLQNLAKSLGLRANLRATKLLKALKGYIKHEARKGNENQDESQTSASSCDETEIQISNQEEAERQPLGHVTKTRRRCKTVRVDPDSQQNHSEIKISNPTEFQNHEKQESQDLRATAKVPSPPDEHQEAENAVSSGNRDSKVPSEGKKSLYTDESSKPGKNKRTAITTPNFKKLHEAHFKEMESIDQYIERKKKHFEEHNSMNELKQPINKGGVRTPVPPRGRLSVASTPISQRRSQGRSCGPASQSTLGLKGSLKRSAISAAKTGVRFSAATKDNEHKRSLTKTPARKSAHVTVSGGTPKGEAVLGTHKLKTITGNSAAVITPFKLTTEATQTPVSNKKPVFDLKASLSRPLNYEPHKGKLKPWGQSKENNYLNQHVNRINFYKKTYKQPHLQTKEEQRKKREQERKEKKAKVLGMRRGLILAED

SEQ ID NO: 4156 - DNA, 3794 bp, Homo sapiens
ccccgccctcctccctcctcgctcgcgggccgggcccggcatggtgcggcgtcgccgccgatggcgctgaggcggagcatggggcggccggggctcccgccgctgccgctgccgccgccaccgcggctcgggctgctgctggcggctctggcttctctgctgctcccggagtccgccgccgcaggtctgaagctcatgggagccccggtgaagctgacagtgtctcaggggcagccggtgaagctcaactgcagtgtggaggggatggaggagcctgacatccagtgggtgaaggatggggctgtggtccagaacttggaccagttgtacatcccagtcagcgagcagcactggatcggcttcctcagcctgaagtcagtggagcgctctgacgccggccggtactggtgccaggtggaggatgggggtgaaaccgagatctcccagccagtgtggctcacggtagaaggtgtgccatttttcacagtggagccaaaagatctggcagtgccacccaatgcccctttccaactgtcttgtgaggctgtgggtccccctgaacctgttaccattgtctggtggagaggaactacgaagatcgggggacccgctccctctccatctgttttaaatgtaacaggggtgacccagagcaccatgttttcctgtgaagctcacaacctaaaaggcctggcctcttctcgcacagccactgttcaccttcaagcactgcctgcagcccccttcaacatcaccgtgacaaagctttccagcagcaacgctagtgtggcctggatgccaggtgctgatggccgagctctgctacagtcctgtacagttcaggtgacacaggccccaggaggctgggaagtcctggctgttgtggtccctgtgcccccctttacctgcctgctccgggacctggtgcctgccaccaactacagcctcagggtgcgctgtgccaatgccttggggccctctccctatgctgactgggtgccctttcagaccaagggtctagccccagccagcgctccccaaaacctccatgccatccgcacagattcaggcctcatcttggagtgggaagaagtgatccccgaggcccctttggaaggccccctgggaccctacaaactgtcctgggttcaagacaatggaacccaggatgagctgacagtggaggggaccagggccaatttgacaggctgggatccccaaaaggacctgatcgtacgtgtgtgcgtctccaatgcagttggctgtggaccctggagtcagccactggtggtctcttctcatgaccgtgcaggccagcagggccctcctcacagccgcacatcctgggtacctgtggtccttggtgtgctaacggccctggtgacggctgctgccctggccctcatcctgcttcgaaagagacggaaagagacgcggtttgggcaagcctttgacagtgtcatggcccggggagagccagccgttcacttccgggcagcccggtccttcaatcgagaaaggcccgagcgcatcgaggccacattggacagcttgggcatcagcgatgaactaaaggaaaaactggaggatgtgctcatcccagagcagcagttcaccctgggccggatgttgggcaaaggagagtttggttcagtgcgggaggcccagctgaagcaagaggatggctcctttgtgaaagtggctgtgaagatgctgaaagctgacatcattgcctcaagcgacattgaagagttcctcagggaagcagcttgcatgaaggagtttgaccatccacacgtggccaaacttgttggggtaagcctccggagcagggctaaaggccgtctccccatccccatggtcatcttgcccttcatgaagcatggggacctgcatgccttcctgctcgcctcccggattggggagaacccctttaacctacccctccagaccctgatccggttcatggtggacattgcctgcggcatggagtacctgagctctcggaacttcatccaccgagacctggctgctcggaattgcatgctggcagaggacatgacagtgtgtgtggctgacttcggactctcccggaagatctacagtggggactactatcgtcaaggctgtgcctccaaactgcctgtcaagtggctggccctggagagcctggccgacaacctgtatactgtgcagagtgacgtgtgggcgttcggggtgaccatgtgggagatcatgacacgtgggcagacgccatatgctggcatcgaaaacgctgagatttacaactacctcattggcgggaaccgcctgaaacagcctccggagtgtatggaggacgtgtatgatctcatgtaccagtgctggagtgctgaccccaagcagcgcccgagctttacttgtctgcgaatggaactggagaacatcttgggccagctgtctgtgctatctgccagccaggaccccttatacatcaacatcgagagagctgaggagcccactgcgggaggcagcctggagctacctggcagggatcagccctacagtggggctggggatggcagtggcatgggggcagtgggtggcactcccagtgactgtcggtacatactcacccccggagggctggctgagcagccagggcaggcagagcaccagccagagagtcccctcaatgagacacagaggcttttgctgctgcagcaagggctactgccacacagtagctgttagcccacaggcagagggcatcggggccatttggccggctctggtggccactgagctggctgactaagccccgtctgaccccagcccagacagcaaggtgtggaggctcctgtggtagtcctcccaagctgtgctgggaagcccggactgaccaaatcacccaatcccagttcttcctgcaaccactctgtggccagcctggcatcagtttaggccttggcttgatggaagtgggccagtcctggttgtctgaacccaggcagctggcaggagtggggtggttatgtttccatggttaccatgggtgtggatggcagtgtggggagggcaggtccagctctgtgggccctaccctcctgctgagctgcccctgctgcttaagtgcatgcattgagctgcctccagcctggtggcccagctattaccacacttggggtttaaatatccaggtgtgcccctccaagtcacaaagagatgtccttgtaatattcccttttaggtgagggttggtaaggggttggtatctcaggtctgaatcttcaccatctttctgattccgcaccctgcctacgccaggagaagttgaggggagcatgcttccctgcagctgaccgggtcacacaaaggcatgctggagtacccagcctatcaggtgcccctcttccaaaggcagcgtgccgagccagcaagaggaaggggtgctgtgaggcttgcccaggagcaagtgaggccggagaggagttcaggaacccttctccatacccacaatctgagcacgctaccaaatctcaaaatatcctaagactaacaaaggcagctgtgtctgagcccaacccttctaaacggtgacctttagtgccaacttcccctctaactggacagcctcttctgtcccaagtctccagagagaaatcaggcctgatgagggggaattcctggaacctggaccccagccttggtgggggagcctctggaatgcatggggcgggtcctagctgttagggacatttccaagctgttagttgctgtttaaaatagaaataaaattgaagactaaagaccta

SEQ ID NO: 4157 - DNA, 324 bp, Homo sapiens
atgaataaaactgacaaaaatccttgctttcagaaatttgtcattgccatctcaaccaaaactggcattagcaatgtaaaaatcccaaaacatcttattgatgctcacttcgagaagcagttgcagaagcccagacaccaggaaggtgagatctctgacacagaaaaagagaactacaagactacagagcagtgcaagattgatcagaaagctgtggactcacaaattgtacgaaaaatcaaagctattcctcagctccagggctacctgcgatctgtgtttgccctgacgaatggaatttatcctcacaaattggtgttttaa

SEQ ID NO: 4158 - protein, 107 aa, Homo sapiens
MNKTDKNPCFQKFVIAISTKTGISNVKIPKHLIDAHFEKQLQKPRHQEGEISDTEKENYKTTEQCKIDQKAVDSQIVRKIKAIPQLQGYLRSVFALTNGIYPHKLVF

SEQ ID NO: 4159 - DNA, 2880 bp, Homo sapiens
gggagagtcgaacccggagcagggtcccatccgagcgtggactggcggcaggatgttcagctggatggggcggcaggcgggcgggcgcgaacgcgctggcggcgcggacgcggtgcagacggtgacgggcgggctgcgctcgctctacctgcgcaaggtgctgccgctggaggaggcgtaccgcttccacgagttccactcgcctgcgctggaggacgccgacttcgagaacaagcccatgatcctgctggtgggccagtacagcaccggcaagaccaccttcatcagatacctactggagcaggatttcccaggcatgaggattggtccggagcccaccacagactccttcatcgccgtgatgtatggagagactgagggcagcaccccagggaatgctttagtcgtggaccccaaaaagccgtttagaaagctcagtcgctttggaaacgctttcctgaatcgattcatgtgctcacagctccccaatcaggtcctgaagagcatcagcgtcatcgacagccccggcatcctttctggggagaagcagcgcatcagccgaggctatgacttctgccaggtcctgcagtggtttgccgagagggtggacaggatcatcctgctctttgacgctcacaagctggacatctcagatgaattctcagaggccatcaaggccttccggggccaggacgacaagatccgtgtcgtgctgaacaaggccgaccaagtggacacgcagcagctgatgcgggtctacggggccctcatgtggtccctaggcaaggtcatcaacacgcccgaggtactgcgcgtctacattggctccttctgggcgcagcccctgcagaacacggacaaccgccggctcttcgaggctgaggcccaggacctctttagagacatccagagcctcccccagaaggcagcggtgcgcaagctcaacgacctcatcaagcgagcgaggctggccaaggtgcatgcctacatcatcagctacctgaagaaggagatgccaagtgtatttggaaaggaaaacaagaagagagagcttatcagcaggctaccggaaatctacattcagctacagcgagaataccagatttctgcaggggacttccctgaggtcaaggctatgcaggaacagcttgagaactatgacttcaccaaattccactcgctgaagcccaagctgatcgaggcagtggacaacatgctgagcaacaagatctcgcccctcatgaacctcatcagccaggaggagacgagcacgcccacgcagctggtgcagggcggcgccttcgatggcaccaccgagggccccttcaaccagggctacggggagggtgccaaggagggcgccgacgaggaggagtgggtcgtggccaaagacaagcccgtctacgacgagctcttctacactctgtcgcccatcaatggcaagatatcaggtgtcaacgccaagaaggagatggtgacctccaagctgcccaacagcgtcctgggcaagatctggaagctggccgactgcgactgcgacggcatgcttgatgaggaggagttcgcgctggccaagcacctcatcaagatcaagctcgacggctacgagctgcccagcagcctgcccccccacctcgtgcccccctcgcacaggaagtccctgcccaaggccgactgaggggtgggctgcagaacggggtgggaactgggggacctgggcctcaggcctgctccaccactgactcaccgaatgaccttgggcaaggcactgccctctctgtgccttggtttccccatctgtagaatggggagggtggacactggaaactagatgacttctttcacctccaaaattcccttagtttctatgaaaatattgggggtaggggggtggattaggagattgaagggttgagaagaaagagaaattgtccaaagagtcctcagaacctgcctggagaaatgcgcatgggggtgggcctggtaagtcccaggaaccacaggaagtgagctaaggctcacccagagcagctgggtctccaggctgcctgggctttttgtcctcatgaacaactctggagcagctgtctgtccctcagagggcacctggaggcagcaaagattatcttatttattttattttgttttctgctatatttagagtggcaaaaaaatagagcagagggtttctgctgtctccagactgtctaccaaagagaaggcgacagatgcctcctgggtttggaagggggatgcactgtggatctgccatccattctgcagtctccagcagagcaggcagtcaggccccagcgtgcctccatcccagtgccccgatgaccatctggtcagccctcccaacctcccttccagggggcttaccagcaaagccatattcggctaggaatttggaattcacaacctttattaacccctggcaaaacttcccgtttgcatgtcaaatcacattgaagcctgaaaattagcttttcttactggtttttccaataagtaatagcaaagcccacttatcatacttaaactacagtaaagaaaagaggtggttctctgcagtgatcgtttagtgtggccctcaaacattaaatatcccgaggtctccttggtgggtggcaggatttaaattcaatcaaatcctgtcctagtgtgtgcagtgtcttcggccctgtggacacaggtgaatgagggaccagccctgccctgggctgttgagaagagatcagtccacccagagttagacattgtttttgtagaaaacaggcatttattatgtctagggttttgtgttttttttttttccttacaggataaaagcctttatacagaaacaaaatggaacctttcatataaaaccttttcttt

SEQ ID NO: 4160 - DNA, 728 bp, Homo sapiens
cgaacccggagcagggtcccatccgagcgtggactggcggcaggatgttcagctggatggggcggcaggcgggcgggcgcgaacgcgctggcggcgcggacgcggtgcagacggtgacgggcgggctgcgctcgctctacctgcgcaaggtgctgccgctggaggaggcgtaccgcttccacgagttccactcgcctgcgctggaggacgccgacttcgagaacaagcccttctacactctgtcgcccatcaatggcaagatatcaggtgtcaacgccaagaaggagatggtgacctccaagctgcccaacagcgtcctgggcaagatctggaagctggccgactgcgactgcgacggcatgcttgatgaggaggagttcgcgctggccaagcacctcatcaagatcaagctcgacggctacgagctgcccagcagcctgcccccccacctcgtgcccccctcgcacaggaagtccctgcccaaggccgactgaggggtgggctgcagaacggggtgggaactgggggacctgggcctcaggcctgctccaccactgactcaccgaatgaccttgggcaaggcactgccctctctgtgccttggtttccccatctgtagaatggggagggtggacactggaaactagatgacttctttcacctccaaaattcccttagtttctatgaaaatattgggggtaggggggtggattaggagattgaagggt

SEQ ID NO: 4161 - DNA, 2466 bp, Homo sapiens
atgccgaccgtcattagcgcatctgtggctccaaggacagcggctgagccccggtccccagggccagttcctcacccggcccagagcaaggccactgaggctgggggtggaaacccaagtggcatctattcagccatcatcagccgcaattttcctattatcggagtgaaagagaagacattcgagcaacttcacaagaaatgtctagaaaagaaagttctttatgtggaccctgagttcccaccggatgagacctctctcttttatagccagaagttccccatccagttcgtctggaagagacctccggaaatttgcgagaatccccgatttatcattgatggagccaacagaactgacatctgtcaaggagagctaggggactgctggtttctcgcagccattgcctgcctgaccctgaaccagcaccttcttttccgagtcataccccatgatcaaagtttcatcgaaaactacgcagggatcttccacttccagttctggcgctatggagagtgggtggacgtggttatagatgactgcctgccaacgtacaacaatcaactggttttcaccaagtccaaccaccgcaatgagttctggagtgctctgctggagaaggcttatgctaagctccatggttcctacgaagctctgaaaggtgggaacaccacagaggccatggaggacttcacaggaggggtggcagagttttttgagatcagggatgctcctagtgacatgtacaagatcatgaagaaagccatcgagagaggctccctcatgggctgctccattgatgatggcacgaacatgacctatggaacctctccttctggtctgaacatgggggagttgattgcacggatggtaaggaatatggataactcactgctccaggactcagacctcgaccccagaggctcagatgaaagaccgacccggacaatcattccggttcagtatgagacaagaatggcctgcgggctggtcagaggtcacgcctactctgtcacggggctggatgaggtcccgttcaaaggtgagaaagtgaagctggtgcggctgcggaatccgtggggccaggtggagtggaacggttcttggagtgatagatggaaggactggagctttgtggacaaagatgagaaggcccgtctgcagcaccaggtcactgaggatggagagttctggatgtcctatgaggatttcatctaccatttcacaaagttggagatctgcaacctcacggccgatgctctgcagtctgacaagcttcagacctggacagtgtctgtgaacgagggccgctgggtacggggttgctctgccggaggctgccgcaacttcccagatactttctggaccaaccctcagtaccgtctgaagctcctggaggaggacgatgaccctgatgactcggaggtgatttgcagcttcctggtggccctgatgcagaagaaccggcggaaggaccggaagctaggggccagtctcttcaccattggcttcgccatctacgaggttcccaaagagatgcacgggaacaagcagcacctgcagaaggacttcttcctgtacaacgcctccaaggccaggagcaaaacctacatcaacatgcgggaggtgtcccagcgcttccgcctgcctcccagcgagtacgtcatcgtgccctccacctacgagccccaccaggagggggaattcatcctccgggtcttctctgaaaagaggaacctctctgaggaagttgaaaataccatctccgtggatcggccagtgaaaaagaaaaaaaccaagcccatcatcttcgtttcggacagagcaaacagcaacaaggagctgggtgtggaccaggagtcagaggagggcaaaggcaaaacaagccctgataagcaaaagcagtccccacagccacagcctggcagctctgatcaggaaagtgaggaacagcaacaattccggaacattttcaagcagatagcaggagatgacatggagatctgtgcagatgagctcaagaaggtccttaacacagtcgtgaacaaacacaaggacctgaagacacacgggttcacactggagtcctgccgtagcatgattgcgctcatggatacagatggctctggaaagctcaacctgcaggagttccaccacctctggaacaagattaaggcctggcagaaaattttcaaacactatgacacagaccagtccggcaccatcaacagctacgagatgcgaaatgcagtcaacgacgcaggattccacctcaacaaccagctctatgacatcattaccatgcggtacgcagacaaacacatgaacatcgactttgacagtttcatctgctgcttcgttaggctggagggcatgttcagagcttttcatgcatttgacaaggatggagatggtatcatcaagctcaacgttctggagtggctgcagctcaccatgtatgcctga

SEQ ID NO: 4162 - protein, 821 aa, Homo sapiens
MPTVISASVAPRTAAEPRSPGPVPHPAQSKATEAGGGNPSGIYSAIISRNFPIIGVKEKTFEQLHKKCLEKKVLYVDPEFPPDETSLFYSQKFPIQFVWKRPPEICENPRFIIDGANRTDICQGELGDCWFLAAIACLTLNQHLLFRVIPHDQSFIENYAGIFHFQFWRYGEWVDVVIDDCLPTYNNQLVFTKSNHRNEFWSALLEKAYAKLHGSYEALKGGNTTEAMEDFTGGVAEFFEIRDAPSDMYKIMKKAIERGSLMGCSIDDGTNMTYGTSPSGLNMGELIARMVRNMDNSLLQDSDLDPRGSDERPTRTIIPVQYETRMACGLVRGHAYSVTGLDEVPFKGEKVKLVRLRNPWGQVEWNGSWSDRWKDWSFVDKDEKARLQHQVTEDGEFWMSYEDFIYHFTKLEICNLTADALQSDKLQTWTVSVNEGRWVRGCSAGGCRNFPDTFWTNPQYRLKLLEEDDDPDDSEVICSFLVALMQKNRRKDRKLGASLFTIGFAIYEVPKEMHGNKQHLQKDFFLYNASKARSKTYINMREVSQRFRLPPSEYVIVPSTYEPHQEGEFILRVFSEKRNLSEEVENTISVDRPVKKKKTKPIIFVSDRANSNKELGVDQESEEGKGKTSPDKQKQSPQPQPGSSDQESEEQQQFRNIFKQIAGDDMEICADELKKVLNTVVNKHKDLKTHGFTLESCRSMIALMDTDGSGKLNLQEFHHLWNKIKAWQKIFKHYDTDQSGTINSYEMRNAVNDAGFHLNNQLYDIITMRYADKHMNIDFDSFICCFVRLEGMFRAFHAFDKDGDGIIKLNVLEWLQLTMYA

SEQ ID NO: 4163 - DNA, 3776 bp, Homo sapiens
caacaatttatagaattggattgaaagtgccacctgatgaaagggatcctcgagtccccatgctgacctggagcacctgcgctttcactatccaggcaattgaaaatctattgggagatgaaggaaaacctctgtttggagcacttcaaaataggcagcataatggtctgaaagcattaatgcagtttgcagttgcacagaggattacctgtcctcaggtcctgatacagaaacatctggttcgtcttctatcagttgttcttcctaacataaaatcagaagatacaccatgccttctgtctatagatctgtttcatgttttggtgggtgctgtgttagcattcccatccttgtattgggatgaccctgttgatctgcagccttcttcagttagttcttcctataaccacctttatctcttccatttgatcaccatggcacacatgcttcagatactacttacagtagacacaggcctaccccttgctcaggttcaagaagacagtgaagaggctcattccgcatcttctttctttgcagaaatttctcaatatacaagtggctccattgggtgtgatattcctggctggtatttgtgggtctcactgaagaatggcatcaccccttatcttcgctgtgctgcattgtttttccactatttacttggggtaactccgcctgaggaactgcataccaattctgcagaaggagagtacagtgcactctgtagctatctatctttacctacaaatttgttcctgctcttccaggaatattgggatactgtaaggcccttgctccagaggtggtgtgcagatcctgccttactaaactgtttgaagcaaaaaaacaccgtggtcaggtaccctagaaaaagaaatagtttgatagagcttcctgatgactatagctgcctcctgaatcaagcttctcatttcaggtgcccacggtctgcagatgatgagcgaaagcatcctgtcctctgccttttctgtggggctatactatgttctcagaacatttgctgccaggaaattgtgaacggggaagaggttggagcttgcatttttcacgcacttcactgtggagccggagtctgcattttcctaaaaatcagagaatgccgagtggtcctggttgaaggtaaagccagaggctgtgcctatccagctccttacttggatgaatatggagaaacagaccctggcctgaagaggggcaacccccttcatttatctcgtgagcggtatcggaagctccatttggtctggcaacaacactgcattatagaagagattgctaggagccaagagactaatcagatgttatttggattcaactggcagttactgtgagctccaactctgcctcaagacaatcacaaatgacgacagtagtaaaggctgattcaaaattatggaaaactttctgagggctgggaaagtattggagggtcttttgctccatgtccaggttcacttacatcaataaaatatttcttaatggagtattgctttcaattagcaaacatatgcttcacaggaaaaaaggacatagatcaatctgttttatgtgctagtatttccaggaatttattccccttcataatttgtctcatttcattttatttcatccacttggtagatgaagtcacgtcaaacagttgtagacattttatatgttggttaactcttctgcaattttgtatttggtgttttccccccaagtttagttcaactgacattggatcactgacaaaattctaataatctgtgatagtcttccttgcagttaaagaagaattgcagaaaccatgcaatatacttgggaaagattccaaaaataaattttttattatttctcttttaaggaaatacccctaatgtgccacctgctgctatcaccacaaattaaactcaatctctatgtggacagaggatgatttctgccaatatggaaaagcttttttctcactgtaggcctcaagaaaagttagggtaatgtatttgttattcattcctgacggtacaaagagcttgcagttctcacctctgactaccagtagctttgttgagttttgaaataatacttgacattttccaaaggcaaatctcattctgcaaggagattgtggcaccatcctgtttgactctcagaaacctcttgtaattctgatgtaaaaactgtagaatgaagatgagaaaattctcgcaatgagtggatcatgacaactgtaaattagaacaatcagatttaaaccaattccgcagtcttctatatctttgtaaaagacaaatccttgatgttgtctgtgtgcaaccttttcataaactctggttttatgactagtacaaaccaccaaaaaagccatgtgatcaatagtctgtgtcctgttataacatgctgtggttgagccatcttgtttataaataatagagctctcctgaatttgtgcatagacttcttggttcctggcttttgttttttgtatcaagagattgtgatataaaacagcagaagataaatggaaaccttccattttaacttacgttgtttctggggtaatgttagaaccttgaaagatgcattcaaagactgtatcttattttgcccttggctattagtgtctcacatatgtgtgtaaatgttttcctaccttctttttgctcagcaaaggcaagcaagtaaaatatatttgctaagtgattagtgatgcacatttggggctagatttttttggtacttttatgtaaagaaaagtggattttgcagtaagggattggcatgagcaggcgtcagaatcacaatcatgattttctacttgaataattacaattcagaaggtatctggataaatagatacatgtctagtgaacaatttgtaacaataacaggtaaggatcaggaaattcagtattcagtttgtcagatttgccagaatgatgaaagtatttgaacatgtgtgtttgtttcttatataattgtattgagtggattgtttgactgggaaatctgggctagaataggaaacagaagatactgacttctaccctaatagatgggccccaatttagcaaagataaactgactttatttttagtcctttttatattaacttaataaattctggagttaggctctcaagaggacagagggactgtctggcaatggccagccagacctttactgccaaagaacccatttcatattgcgttccactgattgagattgattcagatttttgcactgtagatgagcgtatgtctcagtgctgccccaagccccagggatttctcattatgttcaaatgtcctagtgatttaccttaatcattgcaaacaattatgcttatgaagtttacttacaaacaagcaactgagtcactttattttctttagtgtagtatgtgaaggcactggttcaacaggatggctccagaactgtgtttttctaatgtttggtaaggggctagtgagaattttaatgatatggtgaagaaaaatatatctgtataattaatttattatattggtgtatgggctgtgagttcaccttttagtggtcatttgtcatttcataacaactatgcattttggttcactgtgatgatgatctatatttagtgactgcaacatgtttataccactgattcaaattccatccatgatgaagttatacaaataatgcatatattgataacttttattgcaaaaatgtaaatttaaaacttgtataatgttcttgtgctttttaaaataaaatatatgtgtatattt

SEQ ID NO: 4164 - protein, 306 aa, Homo sapiens [sequence omitted]

SEQ ID NO: 4165 - DNA, 863 bp, Homo sapiens
ccttttggctctctgaccagcaccatggcggttggcaagaacaagagccttacgaaaggcggcaaaaagggagccaagaagaaagtggttgatccgttttctaagaaaaattggtatgatacgaaagcacctgctatgttcaatatatgaaatattggaaagatgctggtcaccaggacccaaggaaccaaaattgcatctgatgatctcaagggtcatgtgtttgaagtgagtcttgctgatttgcagaatgatgaagttgcatttagaaaattcaagctgattactgaagatgttcagggtaaaaactgcctgactaacttccatggcatggatcttacccgtgacaaaacgtgttccatggtcaaaaaatggcagacaatgattgaagctcatgttgatgtcaagactaccgatggttacttgcttcatctgttctgtgttggttttaataaaaaacgcaacaatcagatatggaagacctcttatgctcagcaccaacaggtccgccaaatccggaagaagatgatggaaatcacgacccgagaggtgcagactaatgacttgaaagaagtggtcaataaattgattccagacagcattggaaaagacatagaaaaggcttgccaatctatttatcctctccgtgatgtcttcgttagaaaagtaaaaatgctgaagaagcccaagtttgaattgggaaggctcatggagcttcatggtgaaggcagtagttctggaaaagccactggggatgagacaggtgctaaagttggacgagctgatggatatgaaccaccagtccaagaatctgtttaaagttcagacttcaaatagtggcaaataaaaagtgctatttgtga

SEQ ID NO: 4166 - protein, 264 aa, Homo sapiens
WRLARTRALRKAAKREPRRKWLIRFLRKIGMIRKHLLCSIYENIGKMLVTRTQGTKIASDDLKGHVFEVSLADLQNDEVAFRKFKLITEDVQGKNCLTNFHGMDLTRDKTCSMVKKWQTMIEAHVDVKTTDGYLLHLFCVGFNKKRNNQIWKTSYAQHQQVRQIRKKMMEITTREVQTNDLKEVVNKLIPDSIGKDIEKACQSIYPLRDVFVRKVKMLKKPKFELGRLMELHGEGSSSGKATGDETGAKVGRADGYEPPVQESV

SEQ ID NO: 4167 - DNA, 4479 bp, Homo sapiens
cacaaccgtgacagactgccattcctgagtctcttctggccatgggcccccggagccgtgagcgtcgggcaggcgcggtacagaacaccaacgacagcagcgccctcagcaagcgttccctggccgcgcgcgggtacgtgcaggacccctttgccgcgttgctggttccgggcgcggcgcgccgcgcaccgctcattcaccgaggctactacgtccgcgcacgcgccgtgaggcactgcgtgcgcgcttttttggagcagattggcgcgccccaggccgcgcttcgcgcgcagatcttgtctctcggcgctggcttcgactcgctctattttcgcttaaaaaccgcgggccgcctggcccgggctgcagtctgggaggtggattttccggacgtggcgcggcgcaaagcagaaaggattggagagacgccagagctgtgcgcgttaaccgggcctttcgagaggggggagcccgcgtccgcgctgtgctttgagagcgcagactactgcatcctgggtctggacttgcggcagctccagcgagtggaggaggccctgggcgccgcggggctcgacgcagcctcacccactctgctcctggccgaggcggtgctgacctacctcgagccggagagtgccgcggccctcatcgcctgggcagcccagcgttttcctaatgcccttttcgtggtctatgagcagatgaggcctcaagacgcctttggccagttcatgctgcaacattttcggcagctaaactcccccctgcatggcctggagcgttttcctgacgtggaggcgcagcggcgccgcttccttcaagctggctggaccgcctgcggtgccgtggacatgaatgaattctatcactgctttcttcccgcagaagaacgccggcgggtggaaaatattgaaccctttgacgaatttgaggagtggcatctgaagtgcgcccattatttcattctggcagcttctaggggagacaccctctcccacaccctagtgtttccatcctcagaggcatttcctcgcgtaaatcctgcttcgccttcaggggtattccctgccagcgtagtcagtagcgagggccaggtcccaaacctgaagagatatggccacgcctctgtcttcttgagcccagacgttattctcagtgcaggaggatttggagagcaggaggggcggcactgccgagtgagccagtttcacttgctctcaagagattgtgactctgaatggaaaggcagccaaataggcagttgtgggactggagttcagtgggatggacgcctttatcacaccatgacaagactctcagagagtcgggttctggttctgggagggagactgtccccagtaagtccagccttgggggttctccagcttcatttttttaagagtgaggataataacactgaggacctgaaagtgacaataacaaaggctggccgaaaggatgattccactttgtgttgttggcggcattcaacaacagaagtgtcctgtcagaatcaggaatatttgtttgtgtatgggggtcgaagcgtggtggaacctgtactaagtgactggcatttcctccatgtagggacaatggcttgggtcaggatcccagtggagggagaagtacctgaagcccggcattctcacagtgcctgcacttggcaagggggagcccttattgctggaggtctcggggcttctgaggagccattgaactctgtgctctttctgagaccaatctcttgtggattcctctgggagtcagtagacatccagcctcccattaccccaaggtactcccacacagctcatgtgctcaatggaaagctgttactggttggagggatctggattcattcctcctcatttcctggagtgactgtgatcaatttgactacaggattgagctctgagtatcagattgacacaacatatgtgccatggccattaatgttacacaaccatactagtatccttcttcctgaagagcaacagctcctgctccttggaggtggtgggaactgcttttcctttggtacctacttcaacccccatacagtcacattagacctttcttccttaagtgctgggcagtaaggactggactaatattcaggacccactaaagtagacaataaagttttccacaaataggatgaccctctagctatagatactgccactcctcctttccccatcctttttttcccttagcactattcagtgcaaaaagtgaaaaaggttggtaaaataggtaaaatacctagaaacaatcactacagaaaacagctgaagacagtggccatgcagtccgagaggagtagtggtctgcctctaattttctaatctaagttcgtttattgagttacagtggtctttagtaaagtaaaacaatttcccaatcccaggccttgtgatttgagatggtaccttagaaaaagttacacgcagttccgtggttgaatatatttgagatggtaccttagaaaaagtttcacgcagatccttggttgaatatagttgagggagcgtagtattgacaattcttcatgtaggaaacctgaaatgaacacagtcacagtttgattaaaacattgtcctgtttgttgcaacagaaaactcggatagttttaacaacaggaaacacttgtaggacttcctttaccaacatactttttaaatgttttgctattggttccatatttatttagatttataagtgtcaataaagcaaacttttgatgcctcaattcattttgcacggggtataataatgttttgttccagatatactctccacctttcactgttctgtgctccaagaggctgacctttatgggctgcatcaaggagctctctttactttttggttgagttccaccagtcagaggcaccagaggggaatgggggcaaaaagaagagtgagagtgagttggtatttattcccaattcttcccctgttggtttgcaagttggcagtggcagcattcttctgtcaaaggctacagctcctgccgtgtaatcctttcctgaagacagagttctaattctgcatcatcccaggtttcagtaattgttcctttacttcaccttttcaggcctaggagttgtgatggctctttgctagacctgaactgtactgtccaatgtggtagctattgacaacatgtgactatttaaacgaattaataaattcagtggcttagtcacattgaccacattttaagtgcttaataactatgtgtggctttggctactgtattagacaatgtagatgtagaacatttcatcgttacagaaatttctactggacactgctgactggatatcttgacttggtttcccttaaccctactcagccccttatagttagcatcccattaaactcaattatcccttttaaatgggaatctgttgcctagtgagccatgtgagatcaatgaaatagctattcatccttaaaatttgagccttaatttgtcatctaaattatgcataccttgtgaaatatacacctcaaaaaatgtagtggctttggtggtaataagtgtattactttagtatttcttcttagtcctagaaaccttagtagttttcattctacaagtgcctaaatgattattatgaaccatcattgatgacaaattgcatcctttatttctattaattttgcatataaatggatgtgaaaggtgattaatataaaaaccaagtagcaaacacaaacctaagtgtatggagaggacagtcttggctctgttagatgaagcctccccgggggagaccagctgaatgagggttgtggtataggctgggcatggtggctcacgcctataattccagcactttgggaggccaagacagaaggatcacttaaagccaggagtttaagaccagcccaggcaacaaagtcagatccccatctctacaaaaaaataagtaggcacggtggtgtgtgcttgtagtcttggatactctggaggctgaggtgatagtgagctgtgattgtgccactgcactcctgcctggttgacagagtgagaccccgtctcttaaaaagaaaaaaaaaaaaggttgttgtccaacttcagctttcctgagactttgtaagagccatttctagggaaagcattggttatggctatgactgagtcctgggaaacagggcttattacagctgggaagacatctggcaaggcgatcagtgggccaggtagtagaaaactggcagggaatatgatcagcaggagaaaatggctgttctgtatttcctgtttctaagtttactacagcacaccccagctttcaggagcagataaaagcagaacactgtgatgaggccaggcgcagtggcacatgccttgatcccagcactttgggaggccaaggctggcagatcacttgaactcaggagttggagaccagcctggccaatatggtgaaactccgtctctacccaaaaaaaaaaaaaaaa

SEQ ID NO: 4168 - DNA, 2006 bp, Homo sapiens
gaatgatccacgaactgctcttggctctgagcgggtaccctgggtccattttcacctggaacaagcggagtggcctgcaggtatcgcaggacttccctttcctccaccccagtgagaccagtgtcctgaatcgactctgccggctcggcacagactatattcgcttcactgagttcattgaacagtacacgggccatgtgcaacagcaggatcaccatccatctcaacagggccaaggtgggttacatggaatctacctgcgggccttctgcacagggctggattctgttttgcagccttatcgccaagcactgcttgatttggaacaagagttcctgggtgatccccatctctccatatcacatgtcaactacttcctagaccagttccagcttctttttccctctgtgatggttgtagtagaacaaattaaaagtcaaaagattcatggttgtcaaatcctggaaacagtctacaaacacagctgtggggggttgcctcctgttcgaagtgcactggaaaaaatcctggccgtttgtcatggggtcatgtataaacagctctcagcctggatgctccatggactcctcttggaccagcatgaagaattctttatcaaacaggggccatcttctggtaatgtcagtgcccagccagaagaggacgaggaggatctgggcattgggggactgacaggaaaacaactgagagaactgcaggacttgcgcctgattgaggaagagaacatgctggcaccatctctgaagcagttttccctacgagtggagattttgccatcctacattccagtgagggttgctgaaaaaatcctatttgttggagaatctgtccagatgtttgagaatcaaaatgtgaacctgactagaaaaggatccattttgaaaaaccaggaagacacttttgctgcagagctgcaccgtctcaagcagcagccactcttcagcttggtggactttgaacaggtggtggatcgcattcgcagcactgtggctgagcatctctggaagttgatggtagaagaatccgatttactgggtcagctgaagatcattaaagacttttaccttctgggacgtggagaactgtttcaggccttcattgacacagctcaacacatgttgaaaacaccacccactgcagtaactgagcatgatgtgaatgtggcctttcaacagtcagcacacaaggtattgctagatgatgacaaccttctccctctgttgcacttgacaatcgagtatcacggaaaggagcacaaagcagatgctactcaggcaagagaagggccttctcgggaaacttctccccgggaagcccctgcatctggctgggcagccctaggtctttcctacaaagtacagtggccactacatattctcttcaccccagctgtcctggaaaagtacaatgttgtttttaagtacttactgagtgtgcgccgggtgcaagctgagctgcagcactgctgggccctacaaatgcagcgcaagcacctcaagtcgaaccagactgatgcaatcaagtggcgcctaagaaatcacatggcatttttggtggataatcttcagtactatctccaggtagatgtgttggagtctcagttctcccagctgcttcatcagatcaattctacccgagactttgaaagcatccgattggctcatgaccacttcctgagcaatttgctggctcaatcctttatcctattgaaacctgtgtttcactgcctgaatgaaatcctagatctctgtcacagtttttgttcgctggtcagtcagaacctaggcccactggatgagcgtggagccgcccagctgagcattctcgtgaagggctttagccgccagtcttcactcctgttcaagattctctccagtgttcggaatcatcagatcaactcagatttggctcaactactgttacgactagattataacaaatactatacccaggctggtggaactctgggcagtttcgggatgtga

SEQ ID NO: 4169 - protein, 667 aa, Homo sapiens
MIHELLLALSGYPGSIFTWNKRSGLQVSQDFPFLHPSETSVLNRLCRLGTDYIRFTEFIEQYTGHVQQQDHHPSQQGQGGLHGIYLRAFCTGLDSVLQPYRQALLDLEQEFLGDPHLSISHVNYFLDQFQLLFPSVMVVVEQIKSQKIHGCQILETVYKHSCGGLPPVRSALEKILAVCHGVMYKQLSAWMLHGLLLDQHEEFFIKQGPSSGNVSAQPEEDEEDLGIGGLTGKQLRELQDLRLIEEENMLAPSLKQFSLRVEILPSYIPVRVAEKILFVGESVQMFENQNVNLTRKGSILKNQEDTFAAELHRLKQQPLFSLVDFEQVVDRIRSTVAEHLWKLMVEESDLLGQLKIIKDFYLLGRGELFQAFIDTAQHMLKTPPTAVTEHDVNVAFQQSAHKVLLDDDNLLPLLHLTIEYHGKEHKADATQAREGPSRETSPREAPASGWAALGLSYKVQWPLHILFTPAVLEKYNVVFKYLLSVRRVQAELQHCWALQMQRKHLKSNQTDAIKWRLRNHMAFLVDNLQYYLQVDVLESQFSQLLHQINSTRDFESIRLAHDHFLSNLLAQSFILLKPVFHCLNEILDLCHSFCSLVSQNLGPLDERGAAQLSILVKGFSRQSSLLFKILSSVRNHQINSDLAQLLLRLDYNKYYTQAGGTLGSFGM

SEQ ID NO: 4170 - DNA, 6266 bp, Homo sapiens
cgttgtttggcgtgtttttttttttgttttttgtcactgcctgcctgggtcctgcccgaggtctccatcctcggtttccctgtccttgccccgggccctgggagtgctctggaaggctgcgcagtattggaggggacagaatgaccttccggccttgagtccctggggagcagatggaccctactggaagtcagttggattcagatttctctcagcaagatactccttgcctgataattgaagattctcagcctgaaagccaggttctagaggatgattctggttctcacttcagtatgctatctcgacaccttcctaatctccagacgcacaaagaaaatcctgtgttggatgttgtgtccaatcctgaacaaacagctggagaagaacgaggagacggtaatagtgggttcaatgaacatttgaaagaaaacaaggttgcagaccctgtggattcttctaacttggacacatgtggttccatcagtcaggtcattgagcagttacctcagccaaacaggacaagcagtgttctgggaatgtcagtggaatctgctcctgctgtggaggaagagaagggagaagagttggaacagaaggagaaagagaaggaagaagatacttcaggcaatactacacattcccttggtgctgaagatactgcctcatcacagttgggttttggggttctggaactctcccagagccaggatgttgaggaaaatactgtgccatatgaagtggacaaagagcagctacaatcagtaaccaccaactctggttataccaggctgtctgatgtggatgctaatactgcaattaagcatgaagaacagtccaacgaagatatccccatagcagaacagtccagcaaggacatccctgtgacagcacagcccagtaaggatgtacatgttgtaaaagagcaaaatccaccacctgcaaggtcagaggacatgccttttagccccaaagcatctgttgctgctatggaagcaaaagaacagttgtctgcacaagaacttatggaaagtggactgcagattcagaagtcaccagagcctgaggttttgtcaactcaggaagacttgtttgaccagagcaataaaacagtatcttctgatggttgctctactccttcaagggaggaaggtgggtgttctttggcttccactcctgccaccactctgcatctcctgcagctctctggtcagaggtcccttgttcaggacagtctttccacgaattcttcagatcttgttgctccttctcctgatgctttccgatctactccttttatcgttcctagcagtcccacagagcaagaagggagacaagataagccaatggacacgtcagtgttatctgaagaaggaggagagccttttcagaagaaacttcaaagtggtgaaccagtggagttagaaaacccccctctcctgcctgagtccactgtatcaccacaagcctcaacaccaatatctcagagcacaccagtcttccctcctgggtcacttcctatcccatcccagcctcagttttctcatgacatttttattccttccccaagtctggaagaacaatcaaatgatgggaagaaagatggagatatgcatagttcatctttgacagttgagtgttctaaaacttcagagattgaaccaaagaattcccctgaggatcttgggctatctttgacaggggattcttgcaagttgatgctttctacaagtgaatatagtcagtccccaaagatggagagcttgagttctcacagaattgatgaagatggagaaaacacacagattgaggatacggaacccatgtctccagttctcaattctaaatttgttcctgctgaaaatgatagtatcctgatgaatccagcacaggatggtgaagtacaactgagtcagaatgatgacaaaacaaagggagatgatacagacaccagggatgacattagtattttagccactggttgcaagggcagagaagaaacggtagcagaagatgtttgtattgatctcacttgtgattcggggagtcaggcagttccgtcaccagctactcgatctgaggcactttctagtgtgttagatcaggaggaagctatggaaattaaagaacaccatccagaggaggggtcttcagggtctgaggtggaagaaatccctgagacaccttgtgaaagtcaaggagaggaactcaaagaagaaaatatggagagtgttccgttgcacctttctctgactgaaactcagtcccaagggttgtgtcttcaaaaggaaatgccaaaaaaagaatgctcagaagctatggaagttgaaaccagtgtgattagtattgattcccctcaaaagttggcaatacttgaccaagaattggaacataaggaacaggaagcttgggaagaagctacttcagaggactccagtgttgtcattgtagatgtgaaagagccatctcccagagttgatgtttcttgtgaacctttggagggagtggagaagtgctcagattcccagtcatgggaggatattgctccagaaatagaaccatgtgctgagaatagattagacaccaaggaagaaaagagtgtagaatatgaaggagatctgaaatcagggactgcagaaacagaacctgtagagcaagattcttcacagccttccttacctttagtgagagcagatgatcctttaagacttgaccaggagttgcagcagccccaaactcaggagaaaacaagtaattcattaacagaagactcaaaaatggctaatgcaaagcagctaagctcagatgcagaggcccagaagctggggaagccctctgcccatgcctcacaaagcttctgtgaaagttctagtgaaaccccatttcatttcactttgcctaaagaaggtgatatcatcccaccattgactggtgcaaccccacctcttattgggcacctaaaattggagcccaagagacacagtactcctattggtattagcaactatccagaaagcaccatagcaaccagtgatgtcatgtctgaaagcatggtggagacccatgatcccatacttgggagtggaaaaggggattctggggctgccccagacgtggatgataaattatgtctaagaatgaaactggttagtcctgagactgaggcgagtgaagagtctttgcagttcaacctggaaaagcctgcaactggtgaaagaaaaaatggatctactgctgttgctgagtctgttgccagtccccagaagaccatgtctgtgttgagctgtatctgtgaagccaggcaagagaatgaggctcgaagtgaggatccccccaccacacccatcagggggaacttgctccactttccaagttctcaaggagaagaggagaaagaaaaattggagggtgaccatacaatcaggcagagtcaacagcctatgaagcccattagtcctgtcaaggaccctgtttctcctgcttcccagaagatggtcatacaagggccatccagtcctcaaggagaggcaatggtgacagatgtgctagaagaccagaaagaaggacggagtactaataaggaaaatcctagtaaggccttgattgaaaggcccagccaaaataacataggaatccaaaccatggagtgttccttgagggtcccagaaactgtttcagcagcaacccagactataaagaatgtgtgtgagcaggggaccagtacagtggaccagaactttggaaagcaagatgccacagttcagactgagagggggagtggtgagaaaccagtcagtgctcctggggatgatacagagtcgctccatagccagggagaagaagagtttgatatgcctcagcctccacatggccatgtcttacatcgtcacatgagaacaatccgggaagtacgcacacttgtcactcgtgtcattacagatgtgtattatgtggatggaacagaagtagaaagaaaagtaactgaggagactgaagagccaattgtagagtgtcaggagtgtgaaactgaagtttccccttcacagactgggggctcctcaggtgacctgggggatatcagctccttctcctccaaggcatccagcttacaccgcacatcaagtgggacaagtctctcagctatgcacagcagtggaagctcagggaaaggagccggaccactcagagggaaaaccagcgggacagaacccgcagattttgccttacccagctcccgaggaggcccaggaaaactgagtcctagaaaaggggtcagtcagacagggacgccagtgtgtgaggaggatggtgatgcaggccttggcatcagacagggagggaaggctccagtcacgcctcgtgggcgtgggcgaaggggccgcccaccttctcggaccactggaaccagagaaacagctgtgcctggccccttgggcatagaggacatttcacctaacttgtcaccagatgataaatccttcagccgtgtcgtgccccgagtgccagactccaccagacgaacagatgtgggtgctggtgctttgcgtcgtagtgactctccagaaattcctttccaggctgctgctggcccttctgatggcttagatgcctcctctccaggaaatagctttgtagggctccgtgttgtagccaagtggtcatccaatggctacttttactctgggaaaatcacacgagatgtcggagctgggaagtataaattgctctttgatgatgggtacgaatgtgatgtgttgggcaaagacattctgttatgtgaccccatcccgctggacactgaagtgacggccctctcggaggatgagtatttcagtgcaggagtggtgaaaggacataggaaggagtctggggaactgtactacagcattgaaaaagaaggccaaagaaagtggtataagcgaatggctgtcatcctgtccttggagcaaggaaacagactgagagagcagtatgggcttggcccctatgaagcagtaacacctcttacaaaggcagcagatatcagcttagacaatttggtggaagggaagcggaaacggcgcagtaacgtcagctccccagccacccctactgcctccagtagcagcagcacaacccctacccgaaagatcacagaaagtcctcgtgcctccatgggagttctctcaggcaaaagaaaacttatcacttctgaagaggaacggtcccctgccaagcgaggtcgcaagtctgccacagtaaaacctggtgcagtaggggcaggagagtttgtgagcccctgtgagagtggagacaacaccggtgaaccctctgccctggaagagcagagagggcctttgcctctcaacaagaccttgtttctgggctacgcatttctccttaccatggccacaaccagtgacaagttggccagccgctccaaactgccagatggtcctacaggaagcagtgaagaagaggaggaatttttggaaattcctcctttcaacaagcagtatacagaatcccagcttcgagcaggagctggctatatccttgaagatttcaatgaagcccagtgtaacacagcttaccagtgtcttctaattgcggatcagcattgtcgaacccggaagtacttcctgtgccttgccagtgggattccttgtgtgtctcatgtctgggtccatgatagttgccatgccaaccagctccagaactaccgtaattatctgttgccagctgggtacagccttgaggagcaaagaattctggactggcaaccccgtgaaaatcctttccagaatctgaaggtactcttggtatcagaccaacagcagaacttcctggagctctggtctgagatcctcatgactggtggtgcagcctctgtgaagcagcaccattcaagtgcccataacaaagatattgctttaggggtatttgatgtggtggtgacggacccctcatgcccagcctcggtgctgaagtgtgctgaagcattgcagctgcctgtggtgtcacaagagtgggtgatccagtgcctcattgttggggagagaattggattcaagcagcatccaaaatataaacacgattatgtttctcactaaagatacttggtcttactggttttattccctgctatcgtggagattgtgttttaaccaggttttaaatgtgtcttgtgtgtaactggattccttgcatggatcttgtatatagttttatttgctgaacttttatgataaaataaatgttgaatctctttggttgtagtaactggg

SEQ ID NO: 4171 - protein, 1972 aa, Homo sapiens
MDPTGSQLDSDFSQQDTPCLIIEDSQPESQVLEDDSGSHFSMLSRHLPNLQTHKENPVLDVVSNPEQTAGEERGDGNSGFNEHLKENKVADPVDSSNLDTCGSISQVIEQLPQPNRTSSVLGMSVESAPAVEEEKGEELEQKEKEKEEDTSGNTTHSLGAEDTASSQLGFGVLELSQSQDVEENTVPYEVDKEQLQSVTTNSGYTRLSDVDANTAIKHEEQSNEDIPIAEQSSKDIPVTAQPSKDVHVVKEQNPPPARSEDMPFSPKASVAAMEAKEQLSAQELMESGLQIQKSPEPEVLSTQEDLFDQSNKTVSSDGCSTPSREEGGCSLASTPATTLHLLQLSGQRSLVQDSLSTNSSDLVAPSPDAFRSTPFIVPSSPTEQEGRQDKPMDTSVLSEEGGEPFQKKLQSGEPVELENPPLLPESTVSPQASTPISQSTPVFPPGSLPIPSQPQFSHDIFIPSPSLEEQSNDGKKDGDMHSSSLTVECSKTSEIEPKNSPEDLGLSLTGDSCKLMLSTSEYSQSPKMESLSSHRIDEDGENTQIEDTEPMSPVLNSKFVPAENDSILMNPAQDGEVQLSQNDDKTKGDDTDTRDDISILATGCKGREETVAEDVCIDLTCDSGSQAVPSPATRSEALSSVLDQEEAMEIKEHHPEEGSSGSEVEEIPETPCESQGEELKEENMESVPLHLSLTETQSQGLCLQKEMPKKECSEAMEVETSVISIDSPQKLAILDQELEHKEQEAWEEATSEDSSVVIVDVKEPSPRVDVSCEPLEGVEKCSDSQSWEDIAPEIEPCAENRLDTKEEKSVEYEGDLKSGTAETEPVEQDSSQPSLPLVRADDPLRLDQELQQPQTQEKTSNSLTEDSKMANAKQLSSDAEAQKLGKPSAHASQSFCESSSETPFHFTLPKEGDIIPPLTGATPPLIGHLKLEPKRHSTPIGISNYPESTIATSDVMSESMVETHDPILGSGKGDSGAAPDVDDKLCLRMKLVSPETEASEESLQFNLEKPATGERKNGSTAVAESVASPQKTMSVLSCICEARQENEARSEDPPTTPIRGNLLHFPSSQGEEEKEKLEGDHTIRQSQQPMKPISPVKDPVSPASQKMVIQGPSSPQGEAMVTDVLEDQKEGRSTNKENPSKALIERPSQNNIGIQTMECSLRVPETVSAATQTIKNVCEQGTSTVDQNFGKQDATVQTERGSGEKPVSAPGDDTESLHSQGEEEFDMPQPPHGHVLHRHMRTIREVRTLVTRVITDVYYVDGTEVERKVTEETEEPIVECQECETEVSPSQTGGSSGDLGDISSFSSKASSLHRTSSGTSLSAMHSSGSSGKGAGPLRGKTSGTEPADFALPSSRGGPGKLSPRKGVSQTGTPVCEEDGDAGLGIRQGGKAPVTPRGRGRRGRPPSRTTGTRETAVPGPLGIEDISPNLSPDDKSFSRVVPRVPDSTRRTDVGAGALRRSDSPEIPFQAAAGPSDGLDASSPGNSFVGLRVVAKWSSNGYFYSGKITRDVGAGKYKLLFDDGYECDVLGKDILLCDPIPLDTEVTALSEDEYFSAGVVKGHRKESGELYYSIEKEGQRKWYKRMAVILSLEQGNRLREQYGLGPYEAVTPLTKAADISLDNLVEGKRKRRSNVSSPATPTASSSSSTTPTRKITESPRASMGVLSGKRKLITSEEERSPAKRGRKSATVKPGAVGAGEFVSPCESGDNTGEPSALEEQRGPLPLNKTLFLGYAFLLTMATTSDKLASRSKLPDGPTGSSEEEEEFLEIPPFNKQYTESQLRAGAGYILEDFNEAQCNTAYQCLLIADQHCRTRKYFLCLASGIPCVSHVWVHDSCHANQLQNYRNYLLPAGYSLEEQRILDWQPRENPFQNLKVLLVSDQQQNFLELWSEILMTGGAASVKQHHSSAHNKDIALGVFDVVVTDPSCPASVLKCAEALQLPVVSQEWVIQCLIVGERIGFKQHPKYKHDYVSH

SEQ ID NO: 4172 - DNA, 1528 bp, Homo sapiens
ccggctcccattccggctccagcctccaatccgacccccatttcggctgcagcctcggacctagctccggccctcggtctatccggttgcatcctccctccctgttccggatcttatcttgcgccagcgcctactccaggatcccgtagccagacctcaagccatggctggtcccttctcccgtctgctgtccgcccgcccgggactcaggctcctggctttggccggagcggggtctctagccgctgggtttctgctccgaccggaacctgtacgagctgccagtgaacgacggaggctgtatcccccgagcgctgagtacccagacctccgaaagcacaacaactgcatggccagtcacctgaccccagcagtctatgcacggctctgcgacaagaccacacccactggttggacgctagatcagtgtatccagactggcgtggacaaccctggccaccccttcatcaagactgtgggcatggtggctggagatgaggagacctatgaggtatttgctgacctgtttgaccctgtgatccaagagcgacacaatggatatgacccccggacaatgaagcacaccacggatctagatgccagtaaaatccgttctggctactttgatgagaggtatgtattgtcctctagagtcagaactggccgaagcatccgaggactcagtctgcctccagcttgcactcgagcagagcgacgagaggtggaacgtgttgtggtggatgcactgagtggcctgaagggtgacctggctggacgttactataggctcagtgagatgacagaggctgaacagcagcagcttattgatgaccactttctgtttgataagcctgtgtccccgttgctgactgcagcaggaatggctcgagactggccagatgctcgtggaatttggcacaacaatgagaagagcttcctgatctgggtgaatgaggaggatcatacacgggtgatctccatggagaagggtggtaacatgaagagagtgtttgaaagattctgccgaggcctcaaagaggtggagagacttatccaagaacgtggctgggagttcatgtggaatgagcgtttgggatacatcttgacctgtccatctaacctgggcactggacttcgggcaggagtgcacatcaaactgcccctgctaagcaaagatagccgcttcccaaagatcctggagaacctaagactccaaaaacgtggtactggaggagtggacactgctgctacaggcggtgtctttgatatttctaatttggaccgactaggcaaatcagaggtggagctggtgcaactggtcatcgatggagtaaactatttgattgattgtgaacggcgtctggagagaggccaggatatccgcatccccacacctgtcatccacaccaagcattaactccccatcgccagctgatgactcaagattcccaggagttttgctcattctaatgatggcccattctacttgctctggacctgcccccgcatcccctgcctccatcctagt

SEQ ID NO: 4173 - protein, 417 aa, Homo sapiens
MAGPFSRLLSARPGLRLLALAGAGSLAAGFLLRPEPVRAASERRRLYPPSAEYPDLRKHNNCMASHLTPAVYARLCDKTTPTGWTLDQCIQTGVDNPGHPFIKTVGMVAGDEETYEVFADLFDPVIQERHNGYDPRTMKHTTDLDASKIRSGYFDERYVLSSRVRTGRSIRGLSLPPACTRAERREVERVVVDALSGLKGDLAGRYYRLSEMTEAEQQQLIDDHFLFDKPVSPLLTAAGMARDWPDARGIWHNNEKSFLIWVNEEDHTRVISMEKGGNMKRVFERFCRGLKEVERLIQERGWEFMWNERLGYILTCPSNLGTGLRAGVHIKLPLLSKDSRFPKILENLRLQKRGTGGVDTAATGGVFDISNLDRLGKSEVELVQLVIDGVNYLIDCERRLERGQDIRIPTPVIHTKH

SEQ ID NO: 4174 - DNA, 2074 bp, Homo sapiens
caagcagcgggttagtggtcgcgcgcccgacctccgcagtcccagccgagccgcgacccttccggccgtccccaccccacctcgccgccatgcgcctccgccgcctagcgctgttcccgggtgtggcgctgcttcttgccgcggcccgcctcgccgctgcctccgacgtgctagaactcacggacgacaacttcgagagtcgcatctccgacacgggctctgcgggcctcatgctcgtcgagttcttcgccccctggtgtggacactgcaagagacttgcacctgagtatgaagctgcagctaccagattaaaaggaatagtcccattagcaaaggttgattgcactgccaacactaacacctgtaataaatatggagtcagtggatatccaaccctgaagatatttagagatggtgaagaagcaggtgcttatgatggacctaggactgctgatggaattgtcagccacttgaagaagcaggcaggaccagcttcagtgcctctcaggactgaggaagaatttaagaaattcattagtgataaagatgcctctatagtaggttttttcgatgattcattcagtgaggctcactccgagttcctaaaagcagccagcaacttgagggataactaccgatttgcacatacgaatgttgagtctctggtgaacgagtatgatgataatggagagggtatcatcttatttcgtccttcacatctcactaacaagtttgaggacaagactgtggcatatacagagcaaaaaatgaccagtggcaaaattaaaaagtttatccaggaaaacatttttggtatctgccctcacatgacagaagacaataaagatttgatacagggcaaggacttacttattgcttactatgatgtggactatgaaaagaacgctaaaggttccaactactggagaaacagggtaatgatggtggcaaagaaattcctggatgctgggcacaaactcaactttgctgtagctagccgcaaaacctttagccatgaactttctgattttggcttggagagcactgctggagagattcctgttgttgctatcagaactgctaaaggagagaagtttgtcatgcaggaggagttctcgcgtgatgggaaggctctggagaggttcctgcaggattactttgatggcaatctgaagagatacctgaagtctgaacctatcccagagagcaatgatgggcctgtgaaggtagtggtagcagagaattttgatgaaatagtgaataatgaaaataaagatgtgctgattgaattttatgccccttggtgtggtcactgtaagaacctggagcccaagtataaagaacttggcgagaagctcagcaaagacccaaatatcgtcatagccaagatggatgccacagccaatgatgtgccttctccatatgaagtcagaggttttcctaccatatacttctctccagccaacaagaagctaaatccaaagaaatatgaaggtggccgtgaattaagtgattttattagctatctacaaagagaagctacaaacccccctgtaattcaagaagaaaaacccaagaagaagaagaaggcacaggaggatctctaaagcagtagccaaacaccactttgtaaaaggactcttccatcagagatgggaaaaccattggggaggactaggacccatatgggaattattacctctcagggccgagaggacagaatggatataatctgaatcctgttaaattttctctaaactgtttcttagctgcactgtttatggaaataccaggaccagtttatgtttgtggttttgggaaaaattatttgtgttgggggaaatgttgtgggggtggggttgagttgggggtattttctaattttttttgtacatttggaacagtgacaataaatgagacccctttaaactgtcaaaaaaaaaaaaaaaaaaaaaaaaaaaaaaaaaaaaaaaaaaaaaaaaaaaaaaaaaaaaaaaaaaaaaaaaaaaaaaaaaaaaaaaaaaaaaaaaaaaaaaaaaaaaaaaaaaaaaaaaaaaaaaaaaaaaaaaaaaaa

SEQ ID NO: 4175 - protein, 505 aa, Homo sapiens
MRLRRLALFPGVALLLAAARLAAASDVLELTDDNFESRISDTGSAGLMLVEFFAPWCGHCKRLAPEYEAAATRLKGIVPLAKVDCTANTNTCNKYGVSGYPTLKIFRDGEEAGAYDGPRTADGIVSHLKKQAGPASVPLRTEEEFKKFISDKDASIVGFFDDSFSEAHSEFLKAASNLRDNYRFAHTNVESLVNEYDDNGEGIILFRPSHLTNKFEDKTVAYTEQKMTSGKIKKFIQENIFGICPHMTEDNKDLIQGKDLLIAYYDVDYEKNAKGSNYWRNRVMMVAKKFLDAGHKLNFAVASRKTFSHELSDFGLESTAGEIPVVAIRTAKGEKFVMQEEFSRDGKALERFLQDYFDGNLKRYLKSEPIPESNDGPVKVVVAENFDEIVNNENKDVLIEFYAPWCGHCKNLEPKYKELGEKLSKDPNIVIAKMDATANDVPSPYEVRGFPTIYFSPANKKLNPKKYEGGRELSDFISYLQREATNPPVIQEEKPKKKKKAQEDL

SEQ ID NO: 4176 - DNA, 1408 bp, Homo sapiens
ggcacgaggcgggccaaccgcccggacctcggcgctttcttctaggatccgcatgaatcgctttgggctatcggaagagctatccccagttctcgggagaaagagtccgcgaccagcgtctgacctctcactcagagtccccagtcctgccttagtttccccagcgaccctgaatttggagttgctgtctctaagtgaaagctgaacctgcaaccccttgagggtttcagccgcagaggggcgggagaaagggcctggttggtaggcgggctcagcggttcgcgcccagttagccccgagcttcggagacccgagagaccagaggatggctgacacgaaggggcacccgagacagcgcctgggctttttcccgcccgcggttccaccgctctgaaaccgatttctaacagagagagacatagtcttgctctgttacccatgctggagtacggtggcgagatcacgactcactacaactttgaattcctggattcaagcaatcctcccatctcagcctcctgagtagctaaggactacagggcgactttgtcagtaccccaaactgtccccgcatgaggtcactctgcacggtcacgtgctcgagcccgcgggagcgccacatcgccagccgcacccctccacccccaccctgcccacgtgacccggcctagtttctccaggcccgtccctacgtctcactcgggaagccccgccccacgctgagcgctccgcctgcgaccctccgccacttacccaccccggctcaagcacgacccgtggatccacgtgctttttcttgtccaatgggagccggctcccgggcgcgaaggggcggggaggaaaggaacgactgtgctacgttgccagaaggggcgggacctgcaacgtccgacagaacgaggggacgtaacggaggcaggttggagccgctgccgtcgccatgacccgcggtaaccagcgtgagctcgcccgccagaagaatatgaaaaagcagagcgactcggttaagggaaagcgccgagatgacgggctttctgctgccgcccgcaagcagagggactcggagatcatgcagcagaagcagaaaaaggcaaacgagaagaaggaggaacccaagtagctttgtggcttcgtgtccaaccctcttgcccttcgcctgtgtgcctggagccagtcccaccacgctcgcgtttcctcctgtagtgctcacaggtcccagcaccgatggcattccctttgccctgagtctgcagcgggtcccttttgtgcttccttcccctcaggtagcctctctccccctgggccactcccgggggtgagggggttaccccttcccagtgttttttattcctgtggggctcaccccaaagtattaaaagtagctttgtaaaaaaaaaaaaaaaaaaaa

SEQ ID NO: 4177 - protein, 98 aa, Homo sapiens
MTGFLLPPASRGTRRSCSRSRKRQTRRRRNPSSFVASCPTLLPFACVPGASPTTLAFPPVVLTGPSTDGIPFALSLQRVPFVLPSPQVASLPLGHSRG

SEQ ID NO: 4178 - DNA, 925 bp, Homo sapiens
ggcacgagccgagatgtctcgctccgtggccttagctgtgctcgcgctactctctctttctggcctggaggctatccagcgtactccaaagattcaggtttactcacgtcatccagcagagaatggaaagtcaaatttcctgaattgctatgtgtctgggtttcatccatccgacattgaagttgacttactgaagaatggagagagaattgaaaaagtggagcattcagacttgtctttcagcaaggactggtctttctatctcttgtactacactgaattcacccccactgaaaaagatgagtatgcctgccgtgtgaaccatgtgactttgtcacagcccaagatagttaagtgggatcgagacatgtaagcagcatcatggaggtttgaagatgccgcatttggattggatgaattccaaattctgcttgcttgctttttaatattgatatgcttatacacttacactttatgcacaaaatgtagggttataataatgttaacatggacatgatcttctttataattctactttgagtgctgtctccatgtttgatgtatctgagcaggttgctccacaggtagctctaggagggctggcaacttagaggtggggagcagagaattctcttatccaacatcaacatcttggtcagatttgaactcttcaatctcttgcactcaaagcttgttaagatagttaagcgtgcataagttaacttccaatttacatactctgcttagaatttgggggaaaatttagaaatataattgacaggattattggaaatttgttataatgaatgaaacattttgtcatataagattcatatttacttcttatacatttgataaagtaaggcatggttgtggttaatctggtttatttttgttccacaagttaaataaatcataaaacttg

SEQ ID NO: 4179 - protein, 119 aa, Homo sapiens
MSRSVALAVLALLSLSGLEAIQRTPKIQVYSRHPAENGKSNFLNCYVSGFHPSDIEVDLLKNGERIEKVEHSDLSFSKDWSFYLLYYTEFTPTEKDEYACRVNHVTLSQPKIVKWDRDM

SEQ ID NO: 4180 - DNA, 854 bp, Homo sapiens
gtatatatgtgattcagatatgtatttctgacttgaagtgaaatatgctggaaaactcacacaactatgggagaactatcctatccctgaaccaggcccaaatgaggtcttgctgaggatgcattctgttggaatctgtggctcagatgtccactactgggagtatggtcgaattgggaattttattgtgaaaaagcccatggtgctgggacatgaagcttcgggaacagtcgaaaaagtgggatcatcggcaaagcacctaaaaccaggtgatcgtgttgccatcgaatctggtgctccccgagaaaatgatgaattctgcaagatgggccgatacaatctgtcaccttccatcttcttctgtgccacaccccccgatgatgggaacctctgccggttctataagcacaatgcagccttttgttacaagcttcctgacaatgtcacctttgaggaaggcgccctgattgatccactttctgtggggatccatgcctgcaggagaggcggagttaccctgggacacaaggtccttgtgtgtggagctggggcaatcggggtagtcactttgctcgtggccaaggcaatgggagcagctcaagtagtggtgactgatctgtctgctacccgattgtccaaagccaaggagattggggctgatttagtcctccagatctccaaggagagccctcaggaaatcgccaggaaagtagaaggtctgctggggtgcaagccggaagtcaccatcgagtgcacggggcagaggcctccatccaggcaggcatctacgccactcgctctggtgggaacctcgtgcttgtggggctgggctctgagatgaccaccgtacccct

SEQ ID NO: 4181 - protein, 240 aa, Homo sapiens
MHSVGICGSDVHYWEYGRIGNFIVKKPMVLGHEASGTVEKVGSSAKHLKPGDRVAIESGAPRENDEFCKMGRYNLSPSIFFCATPPDDGNLCRFYKHNAAFCYKLPDNVTFEEGALIDPLSVGIHACRRGGVTLGHKVLVCGAGAIGVVTLLVAKAMGAAQVVVTDLSATRLSKAKEIGADLVLQISKESPQEIARKVEGLLGCKPEVTIECTGQRPPSRQASTPLALVGTSCLWGWALR

SEQ ID NO: 4182 - DNA, 1719 bp, Homo sapiens
cgcacggccgcgcagatctgtcttgctggaagctttttcctagaggttgagcggtttgcacaatgtcggaaatggctgagttgtccgagctgtatgaagagagcagtgacctgcagatggatgtgatgcctggcgagggtgaccttccgcagatggaggtaggcagcgggagccgggagctatccctgcgtccctcccgcagcggggcccaacagctcgaggaggaaggcccaatggaggaggaggaggcccagccaatggcggcgccagaggggaaacggagccttgctaacgggcccaacgctggggagcagccaggccaggtggcgggcgcagacttcgagagcgaggacgagggcgaggaatttgatgactgggaggacgactacgactatcccgaagaggagcagctcagtggtgccggctacagagtatcagccgctcttgaagaagccgacaagatgtttctgagaacaagagaaccagccctggatggcgggtttcagatgcattatgagaagaccccgtttgatcagttagcttttatcgaagagcttttttcactgatggttgtcaatcgtctgaccgaagaactcggctgtgatgagattattgatagagagtagttagatgctgttaaaagaggaggaaactacttgaggagggacccaactttccgctatcttttgggttcattccaaatagttttgtgccattgaaaaacttgaccttcaaaaaaatttgtttttcagaatagaacacaataggacagtgactgcacagttgtgaaaaaggaagagaatcattaaagaaaaagaaaaaagattttaagaccgttgaaatcaattatcaagaacgtcctaaaacacctatggctttgactttgttattgatccagattattttccttgcattggggaaaatatctttcatatttgtttgctgtaaagatggttttgcaagaataagtcatgaccaagacaaactgccaatacaaaagcccactgatactaattatataatgagaaaaaaatgtatccaactaggacacatatcttttgagttatttggactgaaagcttaagaaaacttggaaaattctattttgtgatctagtcaagccacagttatcaaaggctacattttcagtgtaagataaatggatgagtaaactcaaatatgtatcacgtgtgctttgtatcttaagatgtgtttccaagagcatctgaaattttgtttgtacatgtatcttgatcatttataaagccactgtgatctataaatcaagaaaatccattgtcataaccatttttaaaagtcaaaaattaagacatccttaattaaaaagtttcaaatctagacactaaatgtgtgtgaatgtacaaagaaaacaaaccattgcttatgctgttatatactagagaaattttgttttgcttgctgttttaacttgacagatgaaggactttagttgaacttcatattgtaagaactgttaataaaagttgtcaagtaaaaagcgctatatctaaaaagactttatgaacagttattctatcaacttttaaaggttttaaacctgcccagaaattaccttggtatctgaagtttccctctgtctcctcctctaattaagcttgttatttgtcatgcaccagcattggagataataaaatttcttgttctgtgtaaaaaaaaaaaaaaaaaaaaaaaaaaaaa

SEQ ID NO: 4183 - protein, 187 aa, Homo sapiens
MSEMAELSELYEESSDLQMDVMPGEGDLPQMEVGSGSRELSLRPSRSGAQQLEEEGPMEEEEAQPMAAPEGKRSLANGPNAGEQPGQVAGADFESEDEGEEFDDWEDDYDYPEEEQLSGAGYRVSAALEEADKMFLRTREPALDGGFQMHYEKTPFDQLAFIEELFSLMVVNRLTEELGCDEIIDRE

SEQ ID NO: 4184 - DNA, 9665 bp, Homo sapiens
gagcccggcccgggggacgggcggcgggatagcgggaccccggcggcgcggtgcgcttcagggcgcagcggcggccgcagaccgagccccgggcgcggcaagaggcggcgggagccggtggcggctcggcatcatgcgtcgagggcgtctgctggagatcgccctgggatttaccgtgcttttagcgtcctacacgagccatggggcggacgccaatttggaggctgggaacgtgaaggaaaccagagccagtcgggccaagagaagaggcggtggaggacacgacgcgcttaaaggacccaatgtctgtggatcacgttataatgcttactgttgccctggatggaaaaccttacctggcggaaatcagtgtattgtccccatttgccggcattcctgtggggatggattttgttcgaggccaaatatgtgcacttgcccatctggtcagatagctccttcctgtggctccagatccatacaacactgcaatattcgctgtatgaatggaggtagctgcagtgacgatcactgtctatgccagaaaggatacatagggactcactgtggacaacctgtttgtgaaagtggctgtctcaatggaggaaggtgtgtggccccaaatcgatgtgcatgcacttacggatttactggaccccagtgtgaaagagattacaggacaggcccatgttttactgtgatcagcaaccagatgtgccagggacaactcagcgggattgtctgcacaaaaacgctctgctgtgccacagtcggccgagcctggggccacccctgtgagatgtgtcctgcccagcctcacccctgccgccgtggcttcattccaaatatccgcacgggagcttgtcaagatgtggatgaatgccaggccatccccgggctctgtcagggaggaaattgcattaatactgttgggtcttttgagtgcaaatgccctgctggacacaaacttaatgaagtgtcacaaaaatgtgaagatattgatgaatgcagcaccattcctggaatctgtgaagggggtgaatgtacaaacacagtcagcagttacttttgcaaatgtccccctggtttttacacctctccagatggtaccagatgcatagatgttcgcccaggatactgttacacagctctgacaaacgggcgctgctctaaccagctgccacagtccataaccaaaatgcagtgctgctgtgatgccggccgatgctggtctccaggggtcactgtcgcccctgagatgtgtcccatcagagcaaccgaggatttcaacaagctgtgctctgttcctatggtaattcctgggagaccagaatatcctcccccaccccttggccccattcctccagttctccctgttcctcctggctttcctcctggacctcaaattccggtccctcgaccaccagtggaatatctgtatccatctcgggagccaccaagggtgctgccagtaaacgttactgattactgccagttggtccgctatctctgtcaaaatggacgctgcattccaactcctgggagttgccggtgtgagtgcaacaaagggttccagctggacctccgtggggagtgtattgatgttgatgaatgtgagaaaaacccctgtgctggtggtgagtgtattaacaaccagggttcgtacacctgtcagtgccgagctggatatcagagcacactcacgcggacagaatgccgagacattgatgagtgtttacagaatggccggatctgcaataatggacgctgcatcaacacagatggcagttttcattgcgtgtgtaatgcgggctttcatgttacacgagatgggaagaactgtgaagatatggatgaatgcagcataaggaacatgtgccttaatggaatgtgtatcaatgaagatggcagttttaaatgtatttgcaaacctggattccagctggcatcagatggacgttattgcaaagacattaacgagtgtgaaacccctgggatctgcatgaatgggcgttgcgtcaacactgatggctcctacagatgtgaatgcttccctggactggctgtgggtctggatggccgtgtgtgtgttgacacacacatgcggagcacatgctatggtggatacaagagaggccagtgtatcaaacctttgtttggtgctgtcactaaatctgaatgctgttgcgccagcactgagtatgcatttggggaaccttgccagccgtgtcctgcacagaattcagcggaatatcaggcactctgcagcagtgggccaggaatgacgtcagcaggcagtgatataaatgaatgtgcactagatcctgatatttgcccaaatggaatctgtgaaaaccttcgtgggacctataaatgtatatgcaattcaggatatgaagtggattcaactgggaaaaactgcgttgatattaatgaatgtgtactgaacagtctcctttgtgacaatggacaatgtagaaatactcctggaagttttgtctgtacctgccccaagggatttatctacaaacctgatctaaaaacatgtgaagacattgatgaatgcgaatcaagtccttgcattaatggagtctgcaagaacagcccaggctcttttatttgtgaatgttcttctgaaagtactttggatccaacaaaaaccatctgcatagaaaccatcaagggcacttgctggcagactgtcattgatgggcgatgtgagatcaacatcaatggagccaccttaaagtcccagtgctgctcctccctcggtgctgcgtggggaagcccgtgcaccctatgccaagttgatcccatatgtggtaaagggtactcaagaattaaaggaacacaatgtgaagatatagatgaatgtgaagtgttcccaggagtgtgtaaaaatggcctgtgtgttaacactagggggtcattcaagtgtcagtgtcccagtggaatgactttggatgccacaggaaggatctgtcttgatatccgcctggaaacctgcttcctgaggtacgaggacgaggagtgcaccctgcctattgctggccgccaccgcatggacgcctgctgctgctccgtcggggcagcctggggtactgaggaatgcgaggagtgtcccatgagaaatactcctgagtacgaggagctgtgtccgagaggacccggatttgccacaaaagaaattacaaatggaaagcctttcttcaaagatatcaatgagtgcaagatgatacccagcctctgcacccacggcaagtgcagaaacaccattggcagctttaagtgcaggtgtgacagcggctttgctcttgattctgaagaaaggaactgcacagacattgacgaatgccgcatatctcctgacctctgtggcagaggccagtgtgtgaacacccctggggactttgaatgcaagtgtgacgaaggctatgaaagtggattcatgatgatgaagaactgcatggatattgatgagtgtcagagagatcctctcctatgccgaggtggtgtttgccataacacagagggaagttaccgctgtgaatgcccgcctggccatcagctgtcccccaacatctccgcgtgtatcgacatcaatgaatgtgagctgagtgcacacctgtgccccaatggccgttgcgtgaacctcatagggaagtatcagtgtgcctgcaaccctggctaccattcaactcccgataggctattttgtgttgacattgatgaatgcagcataatgaatggtggttgtgaaaccttctgcacaaactctgaaggcagctatgaatgtagctgtcagccgggatttgcactaatgcctgaccagagatcatgcaccgacatcgatgagtgtgaagataatcccaatatctgtgatggtggtcagtgcacaaatatccctggagagtacaggtgcttgtgttatgatggattcatggcatctgaagacatgaagacttgtgtagatgtcaatgagtgtgacctgaatccaaatatctgcctaagtgggacctgtgaaaacacgaaaggctcatttatctgccactgtgatatgggctactccggcaaaaaaggaaaaactggctgtacagacatcaatgaatgtgaaattggagcacacaactgtggcaaacatgctgtatgtaccaatacagcaggaagcttcaaatgtagctgcagtcccgggtggattggagatggcattaagtgcactgatctggacgaatgttccaatggaacccatatgtgcagccagcatgcagactgcaagaataccatgggatcttaccgctgtctgtgcaaggaaggatacacaggtgatggcttcacttgtacagaccttgatgagtgctctgagaacctgaatctctgtggcaatggccagtgcctcaatgcaccaggaggataccgctgtgaatgcgacatgggcttcgtgcccagtgctgacgggaaagcctgtgaagatattgatgagtgctcccttccgaacatctgtgtctttggaacttgccacaacctccctggcctgttccgctgtgagtgtgagataggctacgaactggacagaagcggcgggaactgcacagatgtgaatgaatgcctggatccaaccacgtgcatcagtgggaactgtgtcaacactccaggcagctatatctgtgactgcccacctgattttgaactgaacccaactcgagttggctgtgttgatacccgctctggaaattgctatttggatattcgacctcgaggagacaatggagatacagcctgcagcaatgaaattggagttggtgtttccaaagcttcctgctgctgttctctgggtaaagcctggggtactccttgtgagatgtgtcctgctgtgaacacatccgagtacaaaattctttgtcctggaggggaaggtttccgaccaaatcctatcaccgttatattggaagatattgatgagtgccaggagctaccagggctgtgccaaggaggaaaatgtatcaacacctttgggagtttccagtgccgctgtccaaccggctactacctgaatgaagatacacgagtgtgtgatgatgtgaatgaatgtgagactcctggaatctgtggtccagggacatgttacaacaccgttggcaactacacctgtatctgtcctccagactacatgcaagtgaatgggggaaataattgcatggatatgagaagaagtttgtgctacagaaactactatgctgacaaccagacctgtgatggagaattgttattcaacatgaccaagaagatgtgctgctgttcctacaacattggccgggcgtggaacaagccctgtgaacagtgtcccatcccaagtacagatgagtttgctacactctgtggaagtcaaaggccaggctttgtcatcgacatttataccggtttacccgttgatattgatgagtgccgggagatcccaggggtctgtgaaaatggagtgtgtatcaacatggttggcagcttccgatgtgaatgtccagtgggattcttctataatgacaagttgttggtttgtgaagatattgacgagtgtcagaacggcccagtgtgccagcgcaacgccgaatgcatcaacactgcaggcagctaccgctgtgactgtaagcccggctaccgcttcacctccacaggacagtgcaatgatcgtaatgaatgtcaagaaatccccaatatatgcagtcatgggcagtgcattgacacagttggaagcttttattgcctttgccacactggttttaaaacaaatgatgaccaaaccatgtgcttggacataaatgaatgtgaaagagatgcctgtgggaatggaacttgccggaacacaattggttccttcaactgccgctgcaatcatggtttcatcctttctcacaacaatgactgtatagatgttgatgaatgtgcaagtggaaatgggaatctttgcagaaatggccaatgcattaatacagtggggtctttccagtgccagtgcaatgaaggctatgaggtggctccagatgggaggacctgtgtggatatcaatgaatgtcttctagaacccagaaaatgtgcaccaggtacctgtcaaaacttggatgggtcctacagatgcatttgcccacctggatacagtcttcaaaatgagaagtgtgaagatattgatgagtgtgtcgaagagccagaaatttgtgccctgggcacatgcagtaacactgaaggcagcttcaaatgtctgtgtccagaagggttttccttgtcctccagtggaagaaggtgccaagatttgcgaatgagctactgttatgcgaagtttgaaggaggaaagtgttcatcacccaaatccagaaatcactccaagcaggaatgctgctgtgccttgaagggagaaggctggggagacccctgcgagctctgccccacggaacctgatgaggccttccgccagatatgtccttatggaagtgggatcatcgtgggacctgatgattcagcagttgatatggacgaatgcaaagaacccgatgtctgtaaacatggacagtgcatcaatacagatggttcctatcgctgcgagtgtccctttggttatattctagcagggaatgaatgtgtagatactgatgaatgttctgttggcaatccttgtggaaatggaacctgcaagaatgtgattggaggttttgaatgcacctgcgaggagggatttgagcccggtccaatgatgacatgtgaagatataaatgaatgtgcccagaatcctctgctctgtgccttccgatgtgtgaacacttatgggtcatatgaatgcaaatgtcccgtgggatatgtgctcagagaagaccgtaggatgtgcaaagatgaggatgagtgtgaagagggaaaacatgactgtactgaaaaacaaatggaatgcaagaacctcattggcacatatatgtgcatctgtggacccgggtatcagcggagacctgatggagaaggctgtgtagatgagaatgaatgtcagacgaagccagggatctgtgagaatgggcgctgcctcaacacccgtgggagctacacctgtgagtgtaatgatgggtttaccgccagccccaaccaggacgagtgccttgacaatcgggaagggtactgcttcacagaggtgctacaaaacatgtgtcagatcggctccagcaacaggaaccccgtcaccaaatcggaatgctgctgtgacggagggagaggctggggtccccactgtgagatctgccctttccaggggactgtggctttcaagaaactctgtccccatggccgaggattcatgaccaatggagcagatatcgatgaatgcaaggttattcacgatgtttgccgaaatggggaatgtgtcaatgacagaggatcatatcattgcatttgtaaaactgggtacactccagatataactgggacttcctgtgtagatctgaacgagtgcaaccaggctcccaaaccctgcaattttatctgcaaaaacacagaagggagttaccagtgttcatgcccgaaaggctacattctgcaagaggatggaaggagctgcaaagatcttgatgagtgtgcaaccaagcaacacaactgccagttcctatgtgttaacaccattggcggcttcacatgcaaatgtcctcccggatttacccaacaccatacgtcctgcattgataacaatgaatgcacctctgacatcaatctgtgcgggtctaagggcatttgccagaacactcctggaagcttcacctgtgaatgccagcggggattctcacttgatcagaccggctccagctgtgaagacgtggacgagtgtgagggtaaccaccgctgccagcatggctgccagaacatcattgggggctacaggtgcagctgcccccagggctacctccagcactaccagtggaaccagtgtgttgatgaaaacgaatgcctcagcgctcacatctgcggaggagcctcctgtcacaacaccctggggagctacaagtgcatgtgtcccgccggcttccagtatgaacagttcagtggaggatgccaagacatcaatgaatgtggctctgcgcaggccccctgcagctatggctgttccaataccgagggcggttacctgtgtggctgtccacctggttacttccgcataggccaagggcactgtgtttctggaatgggcatgggccgaggaaacccagagccacctgtcagtggtgaaatggatgacaattcactctccccagaggcttgttacgagtgtaagatcaatggctaccccaaacggggcaggaaacggagaagcacaaacgaaactgatgcctccaatatcgaggatcagtctgagacagaagccaatgtgagtcttgcaagttgggatgttgagaagacagccatctttgctttcaatatttcccacgtcagtaacaaggttcgaatcctagaactccttccagctcttacaactctgacgaatcacaacagatacttgatcgaatctggaaatgaagatggcttctttaaaatcaaccaaaaggaagggatcagctacctccacttcacaaagaagaagccagtggctggaacctattcattacaaatcagtagtactccactttataaaaagaaagaacttaaccaactagaagacaaatatgacaaagactacctcagtggtgaactgggtgataatctgaagatgaaaatccaggttttgcttcattaattcaccatccagagaccaaataattaaaagaaaaacaaatatagataggtagaactatattttcccccaatcagaatcatcatatcataggtacaatctttcaccaagtaaatttgtataaataagcactattctttgtattaccaaagcaaggtacaggtgactaccctagttcaaaacaaccactttctcaggcttctcatgtgtgtagctaagctaccttgtcatatgtgttgattcttgaaaactgggacgtgtatttccattgggggttggccatttatgctgacatgccatccttccagcaaacgtacgggaatgtgctttcaattgatggactactctattttttgcaaatttgtaaactttgcttctccaaatacaagtactaggttgtccatttatggtacctatttggtgctagtaaattttcaaactagatttataaatgcactgtaatatgtacacaacttagaaaccaaattacaagtattcagttccaatacttcattaatttcaatcaaccaaagttagttcagtagcttatctcagttatgagtataatacattacatgtaaattaagtgtgtgtatactgtaatcgtgctattttttatcattgaaacatttataaactagaataataatgcccttaatgtgagggtttgtaatggtgcttattaagaccaaagacttgttaaatgtatacaccaagtggtaatgaaatttcggtgactggcccacacgtgcatagaggtctgggaggaccaggaaacagcctcagtggccagaggatcaccagtgcatccttcatcacagcatgtgcaatatgccaagattaccctcggtcattcctgtcaacaaggggtcaatgtcataaatgtcacaataaaacaatctcttcttttttttagttt

SEQ ID NO: 4185 - protein, 2871 aa, Homo sapiens
MRRGRLLEIALGFTVLLASYTSHGADANLEAGNVKETRASRAKRRGGGGHDALKGPNVCGSRYNAYCCPGWKTLPGGNQCIVPICRHSCGDGFCSRPNMCTCPSGQIAPSCGSRSIQHCNIRCMNGGSCSDDHCLCQKGYIGTHCGQPVCESGCLNGGRCVAPNRCACTYGFTGPQCERDYRTGPCFTVISNQMCQGQLSGIVCTKTLCCATVGRAWGHPCEMCPAQPHPCRRGFIPNIRTGACQDVDECQAIPGLCQGGNCINTVGSFECKCPAGHKLNEVSQKCEDIDECSTIPGICEGGECTNTVSSYFCKCPPGFYTSPDGTRCIDVRPGYCYTALTNGRCSNQLPQSITKMQCCCDAGRCWSPGVTVAPEMCPIRATEDFNKLCSVPMVIPGRPEYPPPPLGPIPPVLPVPPGFPPGPQIPVPRPPVEYLYPSREPPRVLPVNVTDYCQLVRYLCQNGRCIPTPGSCRCECNKGFQLDLRGECIDVDECEKNPCAGGECINNQGSYTCQCRAGYQSTLTRTECRDIDECLQNGRICNNGRCINTDGSFHCVCNAGFHVTRDGKNCEDMDECSIRNMCLNGMCINEDGSFKCICKPGFQLASDGRYCKDINECETPGICMNGRCVNTDGSYRCECFPGLAVGLDGRVCVDTHMRSTCYGGYKRGQCIKPLFGAVTKSECCCASTEYAFGEPCQPCPAQNSAEYQALCSSGPGMTSAGSDINECALDPDICPNGICENLRGTYKCICNSGYEVDSTGKNCVDINECVLNSLLCDNGQCRNTPGSFVCTCPKGFIYKPDLKTCEDIDECESSPCINGVCKNSPGSFICECSSESTLDPTKTICIETIKGTCWQTVIDGRCEININGATLKSQCCSSLGAAWGSPCTLCQVDPICGKGYSRIKGTQCEDIDECEVFPGVCKNGLCVNTRGSFKCQCPSGMTLDATGRICLDIRLETCFLRYEDEECTLPIAGRHRMDACCCSVGAAWGTEECEECPMRNTPEYEELCPRGPGFATKEITNGKPFFKDINECKMIPSLCTHGKCRNTIGSFKCRCDSGFALDSEERNCTDIDECRISPDLCGRGQCVNTPGDFECKCDEGYESGFMMMKNCMDIDECQRDPLLCRGGVCHNTEGSYRCECPPGHQLSPNISACIDINECELSAHLCPNGRCVNLIGKYQCACNPGYHSTPDRLFCVDIDECSIMNGGCETFCTNSEGSYECSCQPGFALMPDQRSCTDIDECEDNPNICDGGQCTNIPGEYRCLCYDGFMASEDMKTCVDVNECDLNPNICLSGTCENTKGSFICHCDMGYSGKKGKTGCTDINECEIGAHNCGKHAVCTNTAGSFKCSCSPGWIGDGIKCTDLDECSNGTHMCSQHADCKNTMGSYRCLCKEGYTGDGFTCTDLDECSENLNLCGNGQCLNAPGGYRCECDMGFVPSADGKACEDIDECSLPNICVFGTCHNLPGLFRCECEIGYELDRSGGNCTDVNECLDPTTCISGNCVNTPGSYICDCPPDFELNPTRVGCVDTRSGNCYLDIRPRGDNGDTACSNEIGVGVSKASCCCSLGKAWGTPCEMCPAVNTSEYKILCPGGEGFRPNPITVILEDIDECQELPGLCQGGKCINTFGSFQCRCPTGYYLNEDTRVCDDVNECETPGICGPGTCYNTVGNYTCICPPDYMQVNGGNNCMDMRRSLCYRNYYADNQTCDGELLFNMTKKMCCCSYNIGRAWNKPCEQCPIPSTDEFATLCGSQRPGFVIDIYTGLPVDIDECREIPGVCENGVCINMVGSFRCECPVGFFYNDKLLVCEDIDECQNGPVCQRNAECINTAGSYRCDCKPGYRFTSTGQCNDRNECQEIPNICSHGQCIDTVGSFYCLCHTGFKTNDDQTMCLDINECERDACGNGTCRNTIGSFNCRCNHGFILSHNNDCIDVDECASGNGNLCRNGQCINTVGSFQCQCNEGYEVAPDGRTCVDINECLLEPRKCAPGTCQNLDGSYRCICPPGYSLQNEKCEDIDECVEEPEICALGTCSNTEGSFKCLCPEGFSLSSSGRRCQDLRMSYCYAKFEGGKCSSPKSRNHSKQECCCALKGEGWGDPCELCPTEPDEAFRQICPYGSGIIVGPDDSAVDMDECKEPDVCKHGQCINTDGSYRCECPFGYILAGNECVDTDECSVGNPCGNGTCKNVIGGFECTCEEGFEPGPMMTCEDINECAQNPLLCAFRCVNTYGSYECKCPVGYVLREDRRMCKDEDECEEGKHDCTEKQMECKNLIGTYMCICGPGYQRRPDGEGCVDENECQTKPGICENGRCLNTRGSYTCECNDGFTASPNQDECLDNREGYCFTEVLQNMCQIGSSNRNPVTKSECCCDGGRGWGPHCEICPFQGTVAFKKLCPHGRGFMTNGADIDECKVIHDVCRNGECVNDRGSYHCICKTGYTPDITGTSCVDLNECNQAPKPCNFICKNTEGSYQCSCPKGYILQEDGRSCKDLDECATKQHNCQFLCVNTIGGFTCKCPPGFTQHHTSCIDNNECTSDINLCGSKGICQNTPGSFTCECQRGFSLDQTGSSCEDVDECEGNHRCQHGCQNIIGGYRCSCPQGYLQHYQWNQCVDENECLSAHICGGASCHNTLGSYKCMCPAGFQYEQFSGGCQDINECGSAQAPCSYGCSNTEGGYLCGCPPGYFRIGQGHCVSGMGMGRGNPEPPVSGEMDDNSLSPEACYECKINGYPKRGRKRRSTNETDASNIEDQSETEANVSLASWDVEKTAIFAFNISHVSNKVRILELLPALTTLTNHNRYLIESGNEDGFFKINQKEGISYLHFTKKKPVAGTYSLQISSTPLYKKKELNQLEDKYDKDYLSGELGDNLKMKIQVLLH

SEQ ID NO: 4186 - DNA, 682 bp, Homo sapiens
aagatgctgaaaggaaagaaggccaagggaaagaaggtggctccggcccctgcagtcgtgaagaagcaggaggctaagaaagtggtgaatcccgtttgagcaaaggcctaagaattttggcattggacaggacatccagcccaaaagagacctcacccgctttgtgaaatggccccactatatcaggctgctggcaaaggggatgtccccacgaagagaccacctgtccttcgagcaggagttgacaccgtcaccaccttggtggacaataagaaagctcagctggtgctgattgcacacgacgtggatcccatcgagctggttgtcttcttgcctgccctgtgtcgtaaaatgggggtcccttactgcattatcaaggggaaggcaagactgggacgtctagtccacaggaagacctgcaccactgtggccttcacacaggtgaactcggaagacaaaggcgctttggctaagctggtggaagctatcaggaccaattacaacgacagatacgatgagatccgccgtcactggggcggcaacgtcctggatcctaagtctgtggctcgcatcgccaagctcgaaaaggcaaaggctaaagaacttgccactaaattgggttaaatgtacactgttgagttttctgtacataaaataattaaaataatataaattttccttc

SEQ ID NO: 4187 - DNA, 2637 bp, Homo sapiens
ggcacgaggcccctgcgtgcggcgcttctcccaggccccaccttccatccagtgccctggaccctcggctgggtagcgccaccagagcgaccaaacgtcccgcgccttccaggccgcactccagagccaaaagagctccatggcggcggcggccaagcccaacaacctttccctggtggtgcacggaccgggggacttgcgcctggagaactatcctatccctgaaccaggcccaaatgaggtcttgctgaggatgcattctgttggaatctgtggctcagatgtccactactgggagtatggtcgaattgggaattttattgtgaaaaagcccatggtgctgggacatgaagcttcgggaacagtcgaaaaagtgggatcatcggtaaagcacctaaaaccaggtgatcgtgttgccatcgagcctggtgctccccgagaaaatgatgaattctgcaagatgggccgatacaatctgtcaccttccatcttcttctgtgccacgccccccgatgacgggaacctctgccggttctataagcacaatgcagccttttgttacaagcttcctgacaatgtcacctttgaggaaggcgccctgatcgagccactttctgtggggatccatgcctgcaggagaggcggagttaccctgggacacaaggtccttgtgtgtggagctgggccaatcgggatggtcactttgctcgtggccaaagcaatgggagcagctcaagtagtggtgactgatctgtctgctacccgattgtccaaagccaaggagattggggctgatttagtcctccagatctccaaggagagccctcaggaaatcgccaggaaagtagaaggtcagctggggtgcaagccggaagtcaccatcgagtgcacgggggcagaggcctccatccaggcgggcatctacgccactcgctctggtgggaccctcgtgcttgtggggctgggctctgagatgaccaccgtacccctactgcatgcagccatccgggaggtggatatcaagggcgtgtttcgatactgcaacacgtggccagtggcgatttcgatgcttgcgtccaagtctgtgaatgtaaaacccctcgtcacccataggtttcctctggagaaagctctggaggcctttgaaacatttaaaaagggattggggttgaaaatcatgctcaagtgtgaccccagtgaccagaatccctgatgttaatgggctctgccctcatccccacagtcttgggatctcagggcacaatggctggacatgggtgggctctgatgcagaactttctcttttgaatgttaagaataactaatacaattcattgtgaacagaagtccttaagcagaggaattggtgtgccttaaagatacaatctgggatagtttgggggaacttgtagccagaatgccctgttcatgctgagcaaagttcagcaagtagagcagagtttggcaggcaggtgccaggaactccccttcttcctggagtgccttcattgaggaaggaaatctggcccttgggtttcctggttccactgctactgacccagaggggaatgagggctgagttatgaaaagataacttcatgaagacttaactggcccagaagctgattttcatgaaaatctgccactcagggtctgggatgaaggcttgtcagcacttccagtttagaacgcaatgtttctagagacatattggctgtttgttttgatgataaaaggagaataagaaaaggcatcactttcctggatccaggataatttttaaaccaatcaaatgaaaaaaacaaacaaacaaaaaaggaaatgtcatgtgaggttaaaccagtttgcattcccctaatgtggaaaaagtaagaggactactcagcactgtttgaagattgcctcttctacagcttctgagaattgtgttatttcacttgccaagtgaaggaccccctccccaacatgccccagcccacccctaagcatggtcccttgtcaccaggcaaccaggaaactgctacttgtggacctcaccagagaccaggagggtttggttagctcacaggacttcccccaccccagaagattagcatcccatactagactcatactcaactcaactaggctcatactcaattgatggttattagacaattccatttctttctggttattataaacagaaaatctttcctcttctcattaccagtaaaggctcttggtatctttctgttggaatgatttctatgaacttgtcttattttaatggtgggttttttttctggtaagatttagacctaaatcgcatcatgccaacttgtgactttgagactattcatcaagaatgaggatatagtagccatgacatagcttgagctatagcctttaattccttactttggctatgggtggagggtgagtttgaagaggttctgattttcttgtaacctgggaaagccatgaccttgtgcccgattctttcagattgctttgggtaataaatattggtggtggtatctgaaaaaaaaaaaaaaaaaaaaaaaaaaaaaaaaaaaaaaaaaaaaaaaaaaaaaaaaaaaaaaaaaaaaaaaaaaaaaaaaaaaaaaaaaaaaaaaaaaaaaaaaaaaaaaaaaa

SEQ ID NO: 4188 - protein, 357 aa, Homo sapiens
MAAAAKPNNLSLVVHGPGDLRLENYPIPEPGPNEVLLRMHSVGICGSDVHYWEYGRIGNFIVKKPMVLGHEASGTVEKVGSSVKHLKPGDRVAIEPGAPRENDEFCKMGRYNLSPSIFFCATPPDDGNLCRFYKHNAAFCYKLPDNVTFEEGALIEPLSVGIHACRRGGVTLGHKVLVCGAGPIGMVTLLVAKAMGAAQVVVTDLSATRLSKAKEIGADLVLQISKESPQEIARKVEGQLGCKPEVTIECTGAEASIQAGIYATRSGGTLVLVGLGSEMTTVPLLHAAIREVDIKGVFRYCNTWPVAISMLASKSVNVKPLVTHRFPLEKALEAFETFKKGLGLKIMLKCDPSDQNP

SEQ ID NO: 4189 - DNA, 2316 bp, Homo sapiens
ggagaactatcctatccctgaaccaggcccaaatgaggtcttgctgaggatgcattctgttggaatctgtggctcagatgtccactactgggagtatggtcgaattgggaattttattgtgaaaaagcccatggtgctgggacatgaagcttcgggaacagtcgaaaaagtgggatcatcggtaaagcacctaaaaccaggtgatcgtgttgccatcgaatctggtgctccccgagaaaatgatgaattctgcaagatgggccgatacaatctgtcaccttccatcttcttctgtgccacaccccctgatgatgggaacctctgccagttctataagcacaatgcagccttttgttacaagcttcctgacaatgtcacctttgaggaaggcgccctgattgatccactttctgtggggatccatgcctgcaggagaggcggagttaccctgggacacaaggtccttgtgtgtggagctggggcaatcggggtagtcactttgctcgtggccaaggcaatgggagcagctcaagtagtggtgactgatctgtctgctacccgattgtccaaagccaaggagattggggctgatttagtcctccagatctccaaggagagccctcaggaaatcgccaggaaagtagaaggtctgctggggtgcaagccggaagtcaccatcgagtgcacggggcagaggcctccatccaggcaggcatctacgccactcgctctggtgggaccctcgtgcttgtggggctgggctctgagatgaccaccgtacccctactgcatgcagccatccgggaggtggatatcaagggcgtgtttcgatactgcaacacgtggccagtggcgatttcgatgcttgcgtccaagtctgtgaatgtaaaacccctcgtcacccataggtttcctctggagaaagctctggaggcctttgaaacatttaaaaagggattggggttgaaaatcatgctcaagtgtgaccccagtgaccagaatccctgatgttaatgggctctgccctcatccccagtctcgggatctcagggcacaatggctggacatgggtgggctctgatgcagaactttctcttttgaatgttaagaataactaatacaattcattgtgaacagaagtccttacgcagaggaattggtgtgccttaaagatacaatctgggatagtttgggggaacttgtagccagaatgccctgttcatgctgagcaaagttcagcaagtagagcagagtttggcaggcaggtgccaggaactccccttcttcctggagtgccttcattgaggaaggaaatctggcccttgggtttcctggttccactgctactgacccagaggggaatgagggctgagttatgaaaagataacttcatgaagacttaactggcccagaagctgattttcatgaaaatctgccactcagggtctgggatgaaggcttgtcagcacttccagtttagaacgcaatgtttctagagacatattggctgtttgttttgatgataaaaggagaataagaaaaggcatcactttcctggatccaggataatttttaaaccaatcaaatgaaaaaaacaaacaaacaaaaaaggaaatgtcatgtgaggttaaaccagtttgcattcccctaatgtggaaaaagtaagaggactactcagcactgtttgaagattgcctcttctacagcttctgagaattgtgttatttcacttgccaagtgaaggaccccctccccaacatgccccaccccacccctaagtacggtcccttgtcaccaggcaaccaggaaactgctacttgtggacctcaccagagaccaggagggtttggttagctcacaggacttcccccaccccagaagattagcatgccatactagactcatactcaactcaactaggctcatactcaattgatggttattagacaattccatttctttctggttattataaacagaaaatctttcctcttctcattaccagtaaaggctcttggtatctttctgttggaatgatttctatgaacttgtcttattttaatggtgggttttttttctggtaagatttggacctaaatcgcatcatgccaacttgtgactttgagactattcatcaagaatgaggatatagtagccatgacatagcttgagctatagcctttaattccttactttggctatgggtggagggtgagtttgaagaggttctgattttcttgtaacctgggaaagccatgaccttgtgcccgattctttcagattgctttgggtaataaatattggtggtggtatctg

SEQ ID NO: 4190 - protein, 240 aa, Homo sapiens
MHSVGICGSDVHYWEYGRIGNFIVKKPMVLGHEASGTVEKVGSSVKHLKPGDRVAIESGAPRENDEFCKMGRYNLSPSIFFCATPPDDGNLCQFYKHNAAFCYKLPDNVTFEEGALIDPLSVGIHACRRGGVTLGHKVLVCGAGAIGVVTLLVAKAMGAAQVVVTDLSATRLSKAKEIGADLVLQISKESPQEIARKVEGLLGCKPEVTIECTGQRPPSRQASTPLALVGPSCLWGWALR

SEQ ID NO: 4191 - DNA, 921 bp, Homo sapiens
atgggaaagggctccttcaagtatgcctgggtcttggataaactgaaagctgagcgtgaacatggtatcaccattcatatctccttgtggaaatttgagaccagcaggtactatgtgactatcactgatgtcccaggacacagagacttcatcaaaaatatgattacagggacatctcaggctgactgtgctgtcctgatagttgctgctggtgttgccctgcttctccaggatgtctacaaaattgatggtattggtactgttcctattggccaagtggagactggtgttctcaaacctggtatggtggtcatctttgctccagtcaacattacaactgaagtaaaatctgtcaaaaggcaccatgaagatttgagtgaagctcttcctggggacaatgtgggcttcaatgtcaagaatgtgtctgtcaaggatctttgtcgtggcaactttgctggtgacagcaaaaatgacccaccaatggaagcagctggcttcactgctcagatgattatcctgaaccgtccaggcctaatcagccctggctacgtccctgtactggattgccacatggctcaccttgcatgcaagtttgctgagctgaagaaaagattgatcgccattctgctggaagatggccctaaattcttgaagtctggtgatgctgccatcgttgacatggttcctgtaaagcccatgtgtgttaagagcttctcagactatccacctctggatcgctttgctgttcatgatatgagacagacagttgtcatgggtgtcatcaaagcagtggacaagaaggctgctggagctggcaaggctgtccacaccctctacactttagaggcttccctgaatgggatgcccgtgatgaaaacatccaccaggaagaaagtggcctttgaaaaagacgtacaataa

SEQ ID NO: 4192 - protein, 118 aa, Homo sapiens
MGKGSFKYAWVLDKLKAEREHGITIHISLWKFETSRYYVTITDVPGHRDFIKNMITGTSQADCAVLIVAAGVGEFEAGISRMSTKLMVLVLFLLAKWRLVFSNLVWWSSLLQSTLQLK

SEQ ID NO: 4193 - DNA, 1487 bp, Homo sapiens
ctggtctaacagacccgcgagaacgaaggacgcttgcctttttccggtcggggaagggggaagaaggtaacttccggtgacggggttgcatcacttcctctcaagcttggcgtttgtttggtggggttacacgcgggttcaacatgcgtatcgaaaagtgttatttctgttcggggcccatctatcctggacacggcatgatgttcgtccgcaacgattgcaaggtgttcagattttgcaaatctaaatgtcataaaaactttaaaaagaagcgcaatcctcgcaaagttaggtggaccaaagcattccggaaagcagctggtaaagagcttacagtggataattcatttgaatttgaaaaacgtagaaatgaacctatcaaataccagcgagagctatggaataaaactattgatgcgatgaagagagttgaagaaatcaaacagaagcgccaagctaaatttataatgaacagattgaagaaaaataaagagctacagaaagttcaggatatcaaagaagtcaagcaaaacatccatcttatccgagcccctcttgcaggcaaagggaaacagttggaagagaaaatggtacagcagttacaagaggatgtggacatggaagatgctccttaaaaatctctgtaaccatttcttttatgtacatttgaaaatgccctttggatacttggaactgctaaattattttattttttacataaggtcacttaaatgaaaagcgattaaaagacatctttcctgcattgccatctacataatatcagatattacggatgttagattgcatctcagtgttaaatctttactgatagatgtacttaagtaaatcatgaaaattctacttgtaactatagaagtgaattgtggacgtaaaatggttgtgctatttggataatggcactaggcagcatttgtatagtaactaatggcaaaaattcatggctagtgatgtataaaataaaatattctttgcagtaaaatattccctttgttaatgttatagaaggggggatacaaaaaggaactaacaatttgtatggcagtgtcagatatttttattttagtatttcctgttttggtttatttgcatcttagaagagcataatgacattgtttgatgaagcctaattatgctggactgttttgacctggtttaacccttctgataggtagttgtggatgctggggatgagaactgaataatctttgcctggagtgacactacactctagaatttccactttggagaatactcagttccaacttgtgattcctgatagaacagactttacttttctagcccagcattgatctagaagcagaggaatcccagcgccttttaaaagttgttatgtggttttcttttaaaaagctcctgtttttggaaagtagaatttatgggtacaacgtatgttcattatttgtacataaaataaaaccatttaaaaagtaaaaaaaaaaaaaaaa

SEQ ID NO: 4194 - protein, 163 aa, Homo sapiens
MRIEKCYFCSGPIYPGHGMMFVRNDCKVFRFCKSKCHKNFKKKRNPRKVRWTKAFRKAAGKELTVDNSFEFEKRRNEPIKYQRELWNKTIDAMKRVEEIKQKRQAKFIMNRLKKNKELQKVQDIKEVKQNIHLIRAPLAGKGKQLEEKMVQQLQEDVDMEDAP

SEQ ID NO: 4195 - DNA, 2154 bp, Homo sapiens
acataactccccatgtctgttgataaaaaagagaccctaaggaggattaaactgttctcatcctttcgttagggaactgggaattgaagctggagtgactgcagctacttatacacctggtgcattgcatcctcacttggcccattatcacgcacctcctcgacttcatcacttacaattaggagctcttcctttaatggttcctgatatggcaggctatcctcacatccgttacatttcatcaggattggatggaacatcattcagaggtcctttcaggggcaattttgaggaactgattcatttggaagaaagattaggcaatgtcaatcgtggagcatcccaggggacaattgaaagatgtacatatccacataaatacaaaaagaggaaactgcactgcaaacaagatggggaagaagggactgaggaagacacagaggaaaaatgtactatctgtttgtctattttagaggaaggtgaagatgtgagacgtcttccatgtatgcaccttttccaccaagtgtgtgttgaccaatggttgattaccaataagaagtgccccatatgcagagtggacattgaggcccagctgccaagtgaaagttgacaccatgtttcagaactcttgccctccctctcattcccatccttcctggtactgcagtcaaccaaagatggcatgacttacctgcgcagatttggaagcattgaacttagagtgctggctctgctatatggtacaactaatgctagacctacagtttatgtatacagttgattttgatgtatttataaaagcttttttttctagatttgacatttttctgtatcattttactgtatttttgcatggttccttgtattgcatttctttgcacatattatgggcttgtgaccctaaacttgcaggcaaggttagctgctttagtaagtagaattttgtggtctttttgttttttacatagtaccaagccttgataattatgaattttttatccattactaacctttaatttaatcaatcatgtactttagtttaatgtataaagatcctctagaaaatgataatattgtgtattaagacattccttaattaggacaaaatggctgctgtatatttactatatggagttctgagttaaataccatccttaatactgggaacagaatacaacccatataaatcagatgcaggtggtagtcacatcaccagagtgatcagtataaattttcttggtgtatccttttcctttcaacacagtgcagataagagttgaatattgatatcatacatttagactgctgttctgattgcatttatctttttcctacatcatttagaattttatttccctgattcagtttttgctgctgtgaaacagctctgatgaacactaaatattaatttcaattagctagattgtacatacttgcagatttaacaaaattttagggaaattgaaaaagacatgtagaatttgttgtcttctgctaagcacgaaaagttaagatatctgcttacattgattttgtagacacattaagtcaagatttggaatttaagtcactggcaggtatctgtgcattcatagaacttataaaggtcccaggatcacttttaagggatttttattagtttaaaggtaaataaagtcagctgaatctacatgtctcttgttttatttctctctaaacttgaaaacagtaaatctgcagatactgtgaggcacaaattatactgtcaacctactgttgctatggttatatactcccacttcatacattaccaagagtcgatcactgatttaaaatttttaatttctatagttaagatttactgcataatatagaatataaagttaagttaacatactaacatttctcctttggaggaagttttaatctacttcaggatgcatattattatcaagatactttcatatacaggatagcctaattttatttgtttaaatatgcttaatatgccccagattgcaaatgcatccagtcagtaatatcactgtctgtatgtggaggacatgttcccatggatcatatgtgaagatgtcaataagcttgcattaagccacctgctttgtaagtggattgattaataaataacttatatttctaaaaaaaaaaaaaaaaaaa

SEQ ID NO: 4196 - protein, 137 aa, Homo sapiens
MVPDMAGYPHIRYISSGLDGTSFRGPFRGNFEELIHLEERLGNVNRGASQGTIERCTYPHKYKKRKLHCKQDGEEGTEEDTEEKCTICLSILEEGEDVRRLPCMHLFHQVCVDQWLITNKKCPICRVDIEAQLPSES

SEQ ID NO: 4197 - DNA, 1530 bp, Homo sapiens
aatcctggaacaaggctacagcgtcgaagatccccagcgctgcgggctcggagagcagtcctaacggcgcctcgtacgctagtgtcctcccttttcagtccgcgtccctccctgggccgggctggcactcttgccttccccgtccctcatggcgctgctccgacgcccgacggtgtccagtgatttggagaatattgacacaggagttaattctaaagttaagagtcatgtgactattaggcgaactgttttagaagaaattggaaatagagttacaaccagagcagcacaagtagctaagaaagctcagaacaccaaagttccagttcaacccaccaaaacaacaaatgtcaacaaacaactgaaacctactgcttctgtcaaaccagtacagatggaaaagttggctccaaagggtccttctcccacacctgaggatgtctccatgaaggaagagaatctctgccaagctttttctgatgccttgctctgcaaaatcgaggacattgataacgaagattgggagaaccctcagctctgcagtgactacgttaaggatatctatcagtatctcaggcagctggaggttttgcagtccataaacccacatttcttagatggaagagatataaatggacgcatgcgtgccatcctagtggattggctggtacaagtccactccaagtttaggcttctgcaggagactctgtacatgtgcgttggcattatggatcgatttttacaggttcagccagtttcccggaagaagcttcaattagttgggattactgctctgctcttggcttccaagtatgaggagatgttttctccaaatattgaagactttgtttacatcacagacaatgcttataccagttcccaaatccgagaaatggaaactctaattttgaaagaattgaaatttgagttgggtcgacccttgccactacacttcttaaggcgagcatcaaaagccggggaggttgatgttgaacagcacactttagccaagtatttgatggagctgactctcatcgactatgatatggtgcattatcatccttctaaggtagcagcagctgcttcctgcttgtctcagaaggttctaggacaaggaaaatggaacttaaagcagcagtattacacaggatacacagagaatgaagtattggaagtcatgcagcacatggccaagaatgtggtgaaagtaaatgaaaacttaactaaattcatcgccatcaagaataagtatgcaagcagcaaactcctgaagatcagcatgatccctcagctgaactcaaaagccgtcaaagaccttgcctccccactgataggaaggtcctaggctgccgtgggccctggggatgtgtgcttcattgtgccctttttcttattggtttagaactcttgattttgtacatagtcctctggtctatctcatgaaacctcttctcagaccagttttctaaacatatattgaggaaaaataaagcgattggtttttcttaaggtaaaaaaaaaaaaaaaaaa

SEQ ID NO: 4198 - protein, 398 aa, Homo sapiens
MALLRRPTVSSDLENIDTGVNSKVKSHVTIRRTVLEEIGNRVTTRAAQVAKKAQNTKVPVQPTKTTNVNKQLKPTASVKPVQMEKLAPKGPSPTPEDVSMKEENLCQAFSDALLCKIEDIDNEDWENPQLCSDYVKDIYQYLRQLEVLQSINPHFLDGRDINGRMRAILVDWLVQVHSKFRLLQETLYMCVGIMDRFLQVQPVSRKKLQLVGITALLLASKYEEMFSPNIEDFVYITDNAYTSSQIREMETLILKELKFELGRPLPLHFLRRASKAGEVDVEQHTLAKYLMELTLIDYDMVHYHPSKVAAAASCLSQKVLGQGKWNLKQQYYTGYTENEVLEVMQHMAKNVVKVNENLTKFIAIKNKYASSKLLKISMIPQLNSKAVKDLASPLIGRS

SEQ ID NO: 4199 - DNA, 4668 bp, Homo sapiens
cgagactcagccagaggagtacggattaagtggccgaagaaagaggagtgaggcaggggagcgaggcggacgctccgagcgcatcggactcacctgggccggcggcgaccggcgagtacgagtggactcttgccctccgcagcatgcgccccgcctgctaagtcgccgccgtctcgccctcacctagcaccgccaatcccgcctggatggagtcccctctgggttcccattggctcctgtgagtgcttgggtgtcgggagcctgtttttggcgaggggaaccaacttttgaagttcgcccagaagactgcgttccagccccagttccccggcagcgggacccggcgaagacgcgaccgcggcgcgagtcaccatgggaagcaaaggtgtctaccagtaccactggcaaagccacaatgtcaagcacagtggtgtggacgacatggtgctactgtccaagatcacagagaactccatcgtggagaatctgaagaagagatacatggatgactacatttttacatatataggatctgtattaatctcagtcaaccctttcaagcagatgccatattttggggaaaaggaaattgaaatgtaccaaggagcggcacagtatgaaaacccaccacatatctatgcccttgcagataatatgtacagaaacatgatcattgacagagagaaccagtgcgtcattatcagtggtgaaagtggtgctggaaaaacagtggctgccaaatatatcatgagctacatctccagagtgtctggaggagggaccaaagtccagcacgtgaaggacattatcctgcagtccaacccgctgctggaggccttcgggaacgccaagaccgtccggaacaacaactccagccgatttggaaaatactttgaaatccagttcagtccaggtggggaaccagatggtggaaagatctccaacttccttctggaaaaatctagggtggtgatgaggaacccaggagagcggagttttcacatattttaccagctcatcgagggcgcctctgcagagcagaaacacagccttggcatcaccagcatggactattattactacctgagcctctcgggctcatacaaggttgatgacattgacgacaggcgggagtttcaggaaactctgcacgccatgaatgtgattgggatctttgcagaagagcaaacgctggtgttgcagatagtggcgggtattctccacctgggaaacatcagcttcaaagaagttggcaactacgcggctgtggagagtgaagagtttttagcttttcctgcatatctgctagggataaaccaggaccggttgaaagaaaagctaacaagccggcagatggatagcaagtggggaggcaaatccgaatccatccacgtgaccctcaacgtagagcaggcctgttacacccgggatgcgctcgccaaggccctgcacgcccgggtctttgatttcttggtagattccatcaataaagccatggagaaagaccatgaagaatacaacattggcgtcctagacatctatggctttgaaatattccagaaaaatggctttgaacagttttgtatcaattttgttaatgaaaaactgcagcagatttttattgaactgacattaaaggcagaacaggaagaatatgttcaagagggaataagatggacacccattgagtactttaataataaaatcgtatgtgacctcatagagaacaaagtgaaccctcctggcatcatgagcatcctggatgacgtgtgcgccacgatgcatgcggtgggtgagggggcagatcagacgctgctccagaaacttcagatgcagattgggagtcatgagcacttcaacagttggaaccaaggcttcatcattcatcattatgctgggaaggtatcctatgacatggatggcttttgtgaaaggaaccgggatgtgctttttatggatctcatcgagcttatgcagagcagcgagctgcctttcataaagtctttatttccggaaaatctgcaggctgacaagaaagggcgcccaactactgccggaagcaaaataaagaaacaagccaatgaccttgtgagcaccctgatgaaatgtacgccccactacattcgctgcatcaagccaaacgaaaccaagaagcccagagactgggaggaaagcagggtaaagcatcaagtcgaatatttgggtctgaaagagaacattcgagtgagaagagctggctatgcctatcggcgcatcttccaaaaattcctacagaggtatgccattctgaccaaagccacctggccttcttggcagggagaggagaagcaaggcgtcctgcacctgctgcagtcggtcaacatggacagcgaccagttccagctggggaggagtaaagtgttcatcaaagcccccgagtctctatttcttttagaagagatgagagagagaaagtatgatgggtatgctcgagtgatacagaaatcatggaggaaattcgtggcccggaagaaatacgttcaaatgagagaagaagcctcagacctcttattgaacaagaaggagagaaggagaaacagtattaacaggaactttataggggattatattgggatggaagagcacccagaactccagcagttcgtgggcaagagggagaagattgatttcgcagacacagtcaccaagtatgacaggaggttcaagggtgtaaagcgagacctgctccttaccccaaagtgcttgtacttaatcggacgagaaaaagtcaaacagggcccagacaagggcctggtgaaagaagtcctgaagcggaaaatcgagatagaacggatcttgtctgtgtccctcagtactatgcaggatgacatttttattctccatgagcaagagtatgacagtttgcttgaatctgtcttcaaaactgaattcctaagcctcttagcaaagcgttacgaggagaagacccagaagcaactacctctgaaattcagcaatacgcttgaactgaagttgaaaaaggaaaactggggcccctggagtgcagggggctcccggcaagtgcagttccaccaagggtttggggacctggctgtcctcaagcccagtaacaaagtgctgcaggtcagcatcggacctggactgcccaagaactcccgtcctaccagaaggaacactacccaaaatacaggttattccagtgggactcaaaatgccaactacccagtgagagctgcccctcctcccccaggataccatcagaacggagtcatcagaaaccagtatgtgccatatccccatgctcctggaagccagaggtccaatcagaaaagcctgtacacctccatggcccgcccgcccttgcctcggcagcagtctaccagttcagaccgagtgtcacagacgccagagagcctggatttcctcaaggtcccggaccagggagctgcaggggtcaggagacaaacaaccagtcggcctcccccagcagggggcagacccaagccccagcccaagcccaagcctcaggtgccacagtgcaaggctttgtatgcctatgacgctcaggacacagacgaactcagctttaatgccaatgacattattgatattatcaaagaagatccttctggctggtggacgggtcgactacgaggcaagcagggcctgttccccaacaactatgtgaccaagatctgaggtgcccgtgactctgacacatggggcagaggagctccaggcacagaccaggggaggggatatttaggggctccccttacaatccacaatgagcaattgcttctccaaggcctggagctattctggtaccttccccatggaggacactgaaaaggctgggttggggacagggagtatcactccataagtgatcctaaaaggtagcctcttcataggaacccaggaggacaaaaccaccatgcattaagatttatttattgtatttaaacctggtgagaggacaagtgaggtctgctcagaccttgtaggcttctatcaaaacagcaccctgcttgctcaccaggcctagagaatggctgtaggtggccgctgacaagtgcctttagttgaagagcacatttctttcatctctcttgtccatacctgatagacacattcctctctgccaccttccttcagggaggacccgccctctgcagactgggcttagcgtgagcaggcacttcccatgtacgtgccaagggtaagctggcctgctgagcccagggcgacagaggggcactggtttacactttgccgggaccatcagggccgccaagcaggtcaggggctgggggctgggggctgggctgctggctttgctttctctgggtcttcaattagaatgtggctggcccatattggtttgtgtttaaatgctgtacttactacaagaaggatcttttttcaagctgtacatttataaaaacagatcatatactgtatatataaaaatcttgagatggtagaaacatgtatgaatgtactaagtagtattccactgtactcattcataaggtaggttttcttacaaaactcacaccaggtacttaaagatgtgctctgcttttttccaactacggagtgtcactgctttctaggtcagtccctgcagactcttctcaactctttccctataggaaacttact

SEQ ID NO: 4200 - DNA, 859 bp, Homo sapiens
ttttggctctctcaccagcaccatggctgttggcaagaacaagcgccttacgaaaggcggcaaaaagggagccaagaagaaagtggttgatccattttctaagaaagattggtatgatgtgaaagcacctgctatgttcaatataagaaatattggaaagacgctcgtcaccaggacccaaggaaccaaaattgcgtctgatggtctcaagggtcgtgtgtttgaagtgagtcttgctgatttgcagaatgatgaagttgcatttagaaaattcaagctgattactgaagatgttcagggtaaaaactgcctgactaacttccatggcatggatcttacccgtgacaaaatgtgttccatggtcaaaaaatggcagacaatgattgaagctcacgttgatgtcaagactaccgatggttacttgcttcgtctgttctgtgttggttttactaaaaaacgcaaaaatcagatacggaagacctcttatgctcagcaccaacaggtccgccaaatccggaagaagatgatggaaatcatgatccgagaggtgcagacaaatgacttgaaagaagtggtcaataaattgattccagacagcattggaaaagacatagaaaaggcttgccaatctatttatcctctccatgatgtcttcgttagaaaagtaaaaatgctgaagaagcccaagtttgaattgggaaagctcatggagcttcatggtgaaggcagtagttctggaaaagccactggggacgagacaggtgctaaagttgaacgagctgatggatatgaaccaccagtccaagaatctgtttaaagttcagacttcaaatagtggcaaataaaacgtgctatttgt

SEQ ID NO: 4201 - protein, 264 aa, Homo sapiens
MAVGKNKRLTKGGKKGAKKKVVDPFSKKDWYDVKAPAMFNIRNIGKTLVTRTQGTKIASDGLKGRVFEVSLADLQNDEVAFRKFKLITEDVQGKNCLTNFHGMDLTRDKMCSMVKKWQTMIEAHVDVKTTDGYLLRLFCVGFTKKRKNQIRKTSYAQHQQVRQIRKKMMEIMIREVQTNDLKEVVNKLIPDSIGKDIEKACQSIYPLHDVFVRKVKMLKKPKFELGKLMELHGEGSSSGKATGDETGAKVERADGYEPPVQESV

SEQ ID NO: 4202 - DNA, 1085 bp, Homo sapiens
gtgtggatgaggtcaccattgtcaacattttgaccaaccgcagcaatgcacagagacaggatattgccttcgcctaccagagaaggaccaaaaaggaacttgcatcagcactgaagtcagccttatctggccacctggagacggtgattttgggcctattgaagacacctgctcagtatgacgcttctgagctaaaagcttccatgaaggggctgggaaccgacgaggactctctcattgagatcatctgctccagaaccaaccaggagctgcaggaaattaacagagtctacaaggaaaggtagaagagcagaggatggctctgtcattgattatgaactgattgaccaagatgctcgggatctctatgacgctggagtgaagaggaaaggaactgatgttcccaagtggatcagcatcatgaccgagcggagcgtgccccacctccagaaagtatttgataggtacaagagttacagcccttatgacatgttggaaagcatcaggaaagaggttaaaggagacctggaaaatgctttcctgaacctggttcagtgcattcagaacaagcccctgtattttgctgatcggctgtatgactccatgaagggcaaggggacgcgagataaggtcctgatcagaatcatggtctcccgcagtgaagtggacatgttgaaaattaggtctgaattcaagagaaagtacggcaagtccctgtactattatatccagcaagacactaagggcgactaccagaaagcgctgctgtacctgtgtggtggagatgactgaagcccgacacggcctgagcgtccagaaatggtgctcaccatgcttccagctaacaggtctagaaaaccagcttgcgaataacagtccccgtggccatccctgtgagggtgacgttagcattacccccaacctcattttagttgcctaagcattgcctggccttcctgtctagtctctcctgtaagccaaagaaatgaacattccaaggagttggaagtgaagtctatgatgtgaaacactttgcctcctgtgtactgtgtcataaacagatgaataaactgaatttgtacttt

SEQ ID NO: 4203 - DNA, 2775 bp, Homo sapiens
gtactcgccacggcacccaggctgcgcgcacgcggtcccggtgtgcagctggagagcgagcggccaccgggagcccccggcacagcccgcgcccgccccgcaggagcccgcgaagatgccccggcgcagcctgcacgcggcggccgtgctcctgctggtgatcttaaaggaacagccttccagcccggccccagtgaacggttccaagtggacttattttggtcctgatggggagaatagctggtccaagaagtacccgtcgtgtgggggcctgctgcagtcccccatagacctgcacagtgacatcctccagtatgacgccagcctcacgcccctcgagttccaaggctacaatctgtctgccaacaagcagtttctcctgaccaacaatggccattcagtgaagctgaacctgccctcggacatgcacatccagggcctccagtctcgctacagtgccacgcagctgcacctgcactgggggaacccgaatgacccgcacggctctgagcacaccgtcagcggacagcacttcgccgccgagctgcacattgtccattataactcagacctttatcctgacgccagcactgccagcaacaagtcagaaggcctcgctgtcctggctgttctcattgagatgggctccttcaatccgtcctatgacaagatcttcagtcaccttcaacatgtaaagtacaaaggccaggaagcattcgtcccgggattcaacattgaagagctgcttccggagaggaccgctgaatattaccgctaccgggggtccctgaccacacccccttgcaaccccactgtgctctggacagttttccgaaaccccgtgcaaatttcccaggagcagctgctggctttggagacagccctgtactgcacacacatggacgacccttcccccagagaaatgatcaacaacttccggcaggtccagaagttcgatgagaggctggtatacacctccttctcccaagtgcaagtctgtactgcggcaggactgagtctgggcatcatcctctcactggccctggctggcattcttggcatctgtattgtggtggtggtgtccatttggcttttcagaaggaagagtatcaaaaaaggtgataacaagggagtcatttacaagccagccaccaagatggagactgaggcccacgcttgaggtccccggagctcccgggcacatccaggaaggaccttgctttggaccctacacacttcggctctctggacacttgcgacacctcaaggtgttctctgtagctcaatctgcaaacatgccaggcctcagggatcctctgctgggtgcctccttgccttgggaccatggccaccccagagccatccgatcgatggatgggatgcactctcagaccaagcagcaggaattcaaagctgcttgctgtaactgtgtgagattgtgaagtggtctgaattctggaatcacaaaccaagccatgctggtgggccattaatggttggaaaacactttcatccggggctttgccagagcgtgctttcaagtgtcctggaaagtctgctgcttctccaagctttcagacaagaatgtgcactctctgcttaggttttgcttgggaaactcaacttctttcctctggagacggggcatctccctctgatttccttctgctatgacaaaacctttaatctgcaccttacaactcggggacaaatggggacaggaaggatcaagttgtagagagaaaaaagaaaacaagagatatacattgtgatatattagggacactttcacagtcctgtcctctggatcacagacactgcacagaccttagggaatggcaggttcaagttccacttcttggtggggatgagaagggagagagagctagagggacaaagagaatgagaagacatggatgatctgggagagtctcactttggaatcagaattggaatcacattctgtttatcaagccataatgtaaggacagaataatacaatattaagtccaaatccaacctcctgtcagtggagcagttatgttttatactctacagattttacaaataatgaggctgttccttgaaaatgtgttgttgctgtgtcctggaggagacatgagttccgagatgacccaatctgcctttgaatctggaggaaataggcagaaacaaaatgactgtagaacttattctctgtaggccaaatttcatttcagccacttctgcaggatccctactgccaacctggaatggagacttttatctacttctctctctctgaagatgtcaaatcgtggtttagatcaaatatatttcaagctataaaagcaggaggttatctgtgcagggggctggcatcatgtatttaggggcaagtaataatggaatgctactaagatactccatattcttccccgaatcacacagacagtttctgacaggcgcaactcctccattttcctcccgcaggtgagaaccctgtggagatgagtcagtgccatgactgagaaggaaccgacccctagttgagagcaccttgcagttccccgagaactttctgattcacagtctcattttgacagcatgaaatgtcctcttgaagcatagctttttaaatatctttttccttctactcctccctctgactctaagaattctctcttctggaatcgcttgaacccaggaggcggaggttgcagtaagccaaggtcatgccactgcactctagcctgggtgacagagcgagactccatctcaaaaaaaaaaaaaaaa

SEQ ID NO: 4204 - protein, 354 aa, Homo sapiens
MPRRSLHAAAVLLLVILKEQPSSPAPVNGSKWTYFGPDGENSWSKKYPSCGGLLQSPIDLHSDILQYDASLTPLEFQGYNLSANKQFLLTNNGHSVKLNLPSDMHIQGLQSRYSATQLHLHWGNPNDPHGSEHTVSGQHFAAELHIVHYNSDLYPDASTASNKSEGLAVLAVLIEMGSFNPSYDKIFSHLQHVKYKGQEAFVPGFNIEELLPERTAEYYRYRGSLTTPPCNPTVLWTVFRNPVQISQEQLLALETALYCTHMDDPSPREMINNFRQVQKFDERLVYTSFSQVQVCTAAGLSLGIILSLALAGILGICIVVVVSIWLFRRKSIKKGDNKGVIYKPATKMETEAHA

SEQ ID NO: 4205 - DNA, 523 bp, Homo sapiens
gcagatcgcttgcagcttgctagctgtgtgggctgggaggtctggtagggctgagcttgcaagaggatcaacatgcctttggctagagatttactacatccgtccttggaagaggaaaagaaaaaacataaaaagaaacgcctagtacaaagtccaaattcttactttatggatgtaaaatgtccaggttgctacaagatcaccacggttttcagccatgctcagacagtggttctttgtgtaggttgttcaacagtgttgtgccagcctacaggaggaaaggccagactcacagaagggtgttcatttagaagaaagcaacactaatgattcaaacagcttcctgaattttaattttgtgttgtctcacagaaagccttatcataaattccataattctaattaatttaccaagataatgtaattacatttggttttgtaaggtatacagcagtaatctcctattttggtgtcagtttttcaataaagttttgattatgggcaaaaaaaaaaaaaaaaaaaa

SEQ ID NO: 4206 - protein, 84 aa, Homo sapiens
MPLARDLLHPSLEEEKKKHKKKRLVQSPNSYFMDVKCPGCYKITTVFSHAQTVVLCVGCSTVLCQPTGGKARLTEGCSFRRKQH

SEQ ID NO: 4207 - DNA, 1105 bp, Homo sapiens
ccgcgcgctcgccccgccgctcctgctgcagccccagggcccctcgccgccgccaccatggacgccatcaagaagaagatgcagatgctgaagctcgacaaggagaacgccttggatcgagctgagcaggcggaggccgacaagaaggcggcggaagacaggagcaagcagctggaagatgagctggtgtcactgcaaaagaaactcaagggcaccgaagatgaactggacaaatactctgaggctctcaaagatgcccaggagaagctggagctggcagagaaaaaggccaccgatgctgaagccgacgtagcttctctgaacagacgcatccagctggttgaggaagagttggatcgtgcccaggagcgtctggcaacagctttgcagaagctggaggaagctgagaaggcagcagatgagagtgagagaggcatgaaagtcattgagagtcgagcccaaaaagatgaagaaaaaatggaaattcaggagatccaactgaaagaggccaagcacattgctgaagatgccgaccgcaaatatgaagaggtggcccgtaagctggtcatcattgagagcgacctggaacgtgcagaggagcgggctgagctctcagaaggcaaatgtgccgagcttgaagaagaattgaaaactgtgacgaacaacttgaagtcactggaggctcaggctgagaagtactcgcagaaggaagacagatatgaggaagagatcaaggtcctttccgacaagctgaaggaggctgagactcgggctgagtttgcggagaggtcagtaactaaattggagaaaagcattgatgacttagaagacgagctgtacgctcagaaactgaagtacaaagccatcagcgaggagctggaccacgctctcaacgatatgacttccatataagtttctttgcttcacttctcccaagactccctcgtcgagctggatgtcccacctctctgagctctgcatttgtctattctccagctgaccctggttctctctcttagcatcctgccttagagccaggcacacactgtgctttctattgtacagaagctcttcgtttcagtgtcaaataaacactgtgtaagct

SEQ ID NO: 4208 - DNA, 3443 bp, Homo sapiens
ttgatgctctaaatgcagaattaatggagacttcaatgactgatatgtcaattcttagtttctttgaacatttccatatttctcctgtgaagttgcatttgagtttgtctttgggttccggaggtgaagaatcagacaaagaaaaacaggaaatgtttgcagttcattctgtcaacttgctgttgaagagcataggtgctactctgactgatgtggatgaccttatattcaaacttgcttattatgaaattcgatatcagttctacaagagagatcagcttatatggagtgttgttaggcattacagtgaacagttcttgaaacagatgtatgtccttgtattggggttagatgtacttggaaacccatttggattaattagaggtctgtctgaaggagttgaagctttattctatgaacccttccagggtgctgttcaaggccctgaagaatttgcagaggggttagtgattggagtgagaagcctctttggacacacagtaggtggtgcagcaggagttgtatctcgaatcaccggttctgttgggaaaggtttggcagcaattacaatggacaaggaatatcagcaaaaaagaagagaagagttgagtcgacagcccagagattttggagacagcctggccagaggaggaaagggctttctgcgaggagttgttggtggagtgactggaataataacaaaacctgtggaaggtgccaaaaaggaaggagctgctggattctttaaaggaattggaaaagggcttgtgggtgctgtggcccgtccaactggtggaatcgtagatatggccagtagtaccttccaaggcattcagagggcagcagaatcaactgaggaagtatctagcctccgtccccctcgcctgatccatgaagatggcatcattcgtccttatgacagacaggaatctgagggctctgacttacttgagaatcatatcaaaaagttggaaggagagacttaccgataccactgtgctattcctggaagcaagaagacaatccttatggttacaaataggcgagtgttgtgtataaaggaagttgaaatcctgggccttatgtgtgtagactggcaatgtccatttgaagattttgtatttcctcctagtgtcagtgaaaatgtgctaaaaatttcagttaaggaacagggtctgttccacaaaaaagacagtgccaatcaaggctgtgttcgaaaagtttacctgaaggacaccgccacagcagagagagcatgtaatgccattgaggatgcacagtcaacgagacagcagcaaaaattgatgaagcagtcatcagtgagacttctcagaccccaattgccatcttaatcacagacctcaggggctccaacagggagaaaaaacaatcactggtcttgtctataagtcactctgctttatcttgctaaagacaatttttcaagcaatcctttagttttagttttctggaatagctagtattgggttttctagttttttcaccttttagtttttactctaattttgtaaccatgtatatgctagcagtccacttctacgccaccacccaaatgggtcagacccttgaagaaacgtcacttcaaactcagaatgaaattttcattaatattaaaattgtgaagcaaaggtcaataggcttatatttaattaaagccttactgaagaataagaaatgagcttagaatgactagtgttctttgaaaggtttttttatttttgtttttttggggtttttttttttttttttgagaccgagtcttgctctgtcgcccaggctggaatgcagtggtgcgatcttggctcactgcaatctctgcctctcgggttcaagcggttctactgcctcagcctcctgagtagctaggattacaggtgtgtgccaccacgcctgggtaattttttttttttttgtatttttagtagagatgagtttcaccatgttggtcagtctagtctcgaactcctgaccttgtgatccgcatgcctcagcctcccaaagtgctgggattacaggcatgagccaccacggcccgccaaaaggctttaacccatgaacaaatgttggatcctgacattttgtttaagagtgatttgttcaataattgaactgagttaacattcttggtaaaccaggtaattgaatgaagaaaggtcactaaagggagaaatgacatgttttctattttcttttcatgaaaacactgtttttccccctaataaagcatattttactttggtgcttatttttcctccttgcagtctaataaaaaaatctggacaatcaaaccttaaaatagctacactctgccctctgtaatgtagcattcataaaaatttggaagtatttacatcctctttcaagatgagcttatatgacacaattattatttgctgatacatgaaaatactgcactttaagtttctcaagactctgaaatatgtaaaattcaatatttttatattcccagaaattgtttcttacaggttgaaagtcttttaagggcatcacaaattaacatttactcctaatgcacgcctagaatgtattttaaatacttactaagaagaatgaaaattctttggttgttttatatataaataaggcatatataatgacactgtgttctgtgagggagcaggccctgtgagaatcaattcaggacagtatttttttttgtcctttctccatccttgatcagagataaactattaaaactttaaaaaatactcaaaaatatgtaagttttttggttgaacctttagatttgctcataatgtttaacataacaacatttatttcaaatcactgaattcatggagatgtggacacgcttggtttgctctatttttgtttatgtgtgatagtggttctgtcatcatcattcatgttttttaaggcctggtcataaaactttaaattttactagtgttacttaatgtatattctaaaaagagaatgcagtaactaatgccctaaatgtttgatctctgtttgtcattactttttcaaaattatttttttctgtaaagtataatatataaaacttcttgcttaaattgaatttctatattagtggttaattgcagtttattaaagggatcattatcagtaatttcatagcaactgttctagtgttttgtgtttttaaaacagaattaggaatttgagatatctgattatatttttcatatgaatcacagctgttgacaatgtcccatatatttaagaaattatatcatactgatactatttgtaacattttgatttgatttaatctccagggacagaaataattcattggtaaagtgtaataatgcgttttttaaaaatgctttgagaggtaattacttgcatatgagagaaataaaacatttggcacattgtttacaggtgtgaaaaaaaaaaaaaaaaaaaaaaaa

SEQ ID NO: 4209 - protein, 442 aa, Homo sapiens
METSMTDMSILSFFEHFHISPVKLHLSLSLGSGGEESDKEKQEMFAVHSVNLLLKSIGATLTDVDDLIFKLAYYEIRYQFYKRDQLIWSVVRHYSEQFLKQMYVLVLGLDVLGNPFGLIRGLSEGVEALFYEPFQGAVQGPEEFAEGLVIGVRSLFGHTVGGAAGVVSRITGSVGKGLAAITMDKEYQQKRREELSRQPRDFGDSLARGGKGFLRGVVGGVTGIITKPVEGAKKEGAAGFFKGIGKGLVGAVARPTGGIVDMASSTFQGIQRAAESTEEVSSLRPPRLIHEDGIIRPYDRQESEGSDLLENHIKKLEGETYRYHCAIPGSKKTILMVTNRRVLCIKEVEILGLMCVDWQCPFEDFVFPPSVSENVLKISVKEQGLFHKKDSANQGCVRKVYLKDTATAERACNAIEDAQSTRQQQKLMKQSSVRLLRPQLPS

SEQ ID NO: 4210 - DNA, 1906 bp, Homo sapiens
gcggcggcggcggcggcggcggtgacggccgggaagggtcagttggaggcaggcgctcgctgaggcaaaaggaggcgctcggcccgcggcctgacagggacttagcccgcagagatcgaccccgcgcgcgtgaccccacacccacccactcatccatctatccactccctgcgccgcctcctcccaccctgagcagagccgccgaggatgataaacacccaggacagtagtattttgcctttgagtaactgtccccagctccagtgctgcaggcacattgttccagggcctctgtggtgctcctgatgcccctcacccactgtcgaagatccccggtgggcgagggggcggcagggatccttctctctcagctctaatatataaggacgagaagctcactgtgacccaggacctccctgtgaatgatggaaaacctcacatcgtccacttccagtatgaggtcaccgaggtgaaggtctcttcttgggatgcagtcctgtccagccagagcctgtttgtagaaatcccagatggattattagctgatgggagcaaagaaggattgttagcactgctagagtttgctgaagagaagatgaaagtgaactatgtcttcatctgcttcaggaagggccgagaagacagagctccactcctgaagaccttcagcttcttgggctttgagattgtacgtccaggccatccctgtgtcccctctcggccagatgtgatgttcatggtttatcccctggaccagaacttgtccgatgaggactaatagtcatagaggatgctttacccaagagccacagtgggggaagaggggaagttaggcagccctgggacagacgagagggctcctcgctgtctagggaaggacactgaggggctcagggtgagggttgcctattgtgttctcggagttgactcgttgaaattgttttccataaagaacagtataaacatattattcacatgtaatcaccaatagtaaatgaagatgtttatgaactggcattagaagctttctaaactgcgctgtgtgatgtgttctatctagcctaggggaggacattgcctagagggggagggactgtctgggttcaggggcatggcctggagggctggtgggcagcactgtcaggctcaggtttccctgctgttggctttctgttttggttattaagacttgtgtattttctttctttgcttcctgtcaccccaggggctcctgagtataggcttttcagtccctgggcagtgtccttgagttgttttttgacactcttacctgggcttctctgtgtgcatttgcgtctggcctggagtaagcaggtccgacccctcgttctttacagcttagtgttattctggcatttggttaagctggcttaatcttgtttaatgttatcagtacattttaaataggggcattgaaatttactcccaccaccagggcttttttgggggatgcctgggcctttaaaacactagccaaactctaattaattctcaaatcactgccaggagttcttgctcctggctgcaggcccaggccccaaggtctccttcttggggtcacaaacagcagtaaggaagaggaatatatagcaactcagggcctgggaattgtggggcaatccgttcttagggactggatacttctggctggctgagtatagtactagctgcctccccaccaggttccgagtagtgtctgagactctgctctgcagggcctagggtagcgctgggagtgtagaagtggcctgcccttaactgttttcactaaacagctttttctaaggggagagcaagggggagagatctagattgggtgagggggacggggatgtcagggaggcaagtgtgttgtgttactgtgtcaataaactgatttaaagtt

SEQ ID NO: 4211 - DNA, 1268 bp, Homo sapiens
agacagagtctcactctgccgcccaggctggagtgcagtggtgtgatctgggctcactgcaacctctgcctcctgggttcaagcgattctcctgcttcagcctcctgagtagctgggattacagtgcgtcaccatgcccggctaatttttgtatttttagtggagatggtgtttctccatgttgaccaggctagtctcaaactcctgacttcaggtgattcacccgcctcagcttcccaaagtgctgggattacaggcacgagccatcatgccccgccatcagttcaattaaatctagatatcacattcttcctatccttttttattatacatgtcatgatatgggatgttggtggtaaatgtaacgtggaggaacaagacatatgtaggtacactccttgactgcacacgacatgattgggcacccccaaggttctgtgactccccgaccagtgacctggaaatgcgcaatggccggggtagaggcaaacgcatgcgtcccaacagtaatacacctgtcaatgagacagccacagcctctgacagcaaagggaccagtaacagcagcaaaacccgggcaggagccaatagcaaaggccgtcggggcagccagaattcttcagagcaccgcccacctgccagcagcacttctgaggatgtcaaggccagcccttcctcagctaataagcggaaaaacaaacccctttcagacatggagctgaattctagctcagaggactccaaagggagcaagcgtgtccgtactaattccatgggctcagccactggcccccttcctgggacaaaggtagaacccactgttctggacagaaactgcccctcccccgtcctaattgactgtccccacccaaactgcaacaagaagtacaagcacatcaatggacttaagtaccaccaagctcatgcccatacagatgatgacagcaagccggaagcggatggggacagtgagtacggagaggaacctattctccatgcagatcttgggagctgcaacggtgcatctgtctcacaaaaaggttccttgtcccctgcccgctcagctacccccaaagttcgacttgtagagccccatagcccttctccttcaagcaaattcagcacaaaaggcctctgtaagaaaaagttgagtggggaaggggacacagaccttggggccttatccaatgatggctctgatgatggaccctcagtgatggatgaaacaagcaatgatgcctttgattctttagaaaggaagtgtatgg

SEQ ID NO: 4212 - protein, 102 aa, Homo sapiens
MIGHPQGSVTPRPVTWKCAMAGVEANACVPTVIHLSMRQPQPLTAKGPVTAAKPGQEPIAKAVGAARILQSTAHLPAALLRMSRPALPQLISGKTNPFQTWS

SEQ ID NO: 4213 - DNA, 439 bp, Homo sapiens
ctctctccggtccgtgcctccaagatgacaaagaaaagaaggaacaatggtcgtgccaaaaagggccgcggccacatgcagcctattcgctgcactaactgtgcccgatgcgtgcccaaagacaaggccattaagaaattcgtcattcgaaacatagtggagtccgcagcagtcagggacatttctgaagcgagcgtcttcgatgcctatgtgcttcccaagctgtatgtgaagctgcattactgtgtgagttgtgcaattcacagcaaagtagtcaggaatcgatctcgtgaagcccgcaaggaccgaacacccccaccccgatttagacctgcgggtgctgccccacgtcccccaccaaagcccatgtaaggaggtgagttcttaaagactgaagacaggctattctctggagaaaaataaaatggaaattgtactt

SEQ ID NO: 4214 - DNA, 836 bp, Homo sapiens
gtgaaacaccctcggctgggaagtcagttcgttctctcctctcctctcttcttgtttgaacatggtgcggactaaagcagacagtgttccaggcacttacagaaaagtggtggctgctcgagcccccagaaaggtgcttggttcttccacctctgccactaattcgacatcagtttcatcgaggaaagctgaaaataaatatgcaggagggaaccccgtttgcgtgcgcccaactcccaagtggcaaaaaggaattggagaattctttaggttgtcccctaaagattctgaaaaagagaatcagattcctgaagaggcaggaagcagtggcttaggaaaagcaaagagaaaagcatgtcctttgcaacctgatcacacaaatgatgaaaaagaatagaactttctcattcatctttgaataacgtctccttgtttaccctggtattctagaatgtaaatttacataaatgtgtttgttccaattagctttgttgaacaggcatttaattaaaaaatttaggtttaaatttagatgttcaaaagtagttgtgaaatttgagaatttgtaagactaattatggtaacttagcttagtattcaatataatgcattgtttggtttcttttaccaaattaagtgtctagttcttgctaaaatcaagtcattgcattgtgttctaattacaagtatgttgtatttgagatttgcttagattgttgtactgctgccatttttattggtgtttgattattggaatggtgccatattgtcactccttctacttgctttaaaaagcagagttagatttttgcacattaaaaaattcagtattaatt

SEQ ID NO: 4215 - protein, 111 aa, Homo sapiens
MVRTKADSVPGTYRKVVAARAPRKVLGSSTSATNSTSVSSRKAENKYAGGNPVCVRPTPKWQKGIGEFFRLSPKDSEKENQIPEEAGSSGLGKAKRKACPLQPDHTNDEKE

SEQ ID NO: 4216 - DNA, 1950 bp, Homo sapiens
aatatggtgctaaaagaactccttacctttctctgactacaatttatttggacatacttttgtattgaagagaggtatacatactgaagctacttgctgtactataggagactctgtcctgtaggatcatggaccatcctagtagggaaaaggatgaaagacaacggacaactaaacccatggcacaaaggagtgcacactgctctcgaccatctggctcctcatcgtcctctggggttcttatggtgggacccaacttcagggttggcaagaagataggatgtgggaacttcggagagctcagattaggtaaaaatctctacaccaatgaatatgtagcaatcaaactggaaccaataaaatcacgtgctccacagcttcatttagagtacagattttataaacagcttggcagtgcaggtgaaggtctcccacaggtgtattactttggaccatgtgggaaatataatgccatggtgctggagctccttggccctagcttggaggacttgtttgacctctgtgaccgaacatttactttgaagacggtgttaatgatagccatccagctgctttctcgaatggaatacgtgcactcaaagaacctcatttaccgagatgtcaagccagagaacttcctgattggtcgacaaggcaataagaaagagcatgttatacacattatagactttggactggccaaggaatacattgaccccgaaaccaaaaaacacataccttatagggaacacaaaagtttaactggaactgcaagatatatgtctatcaacacgcatcttggcaaagagcaaagccggagagatgatttggaagccctaggccatatgttcatgtatttccttcgaggcagcctcccctggcaaggactcaaggctgacacattaaaagagagatatcaaaaaattggtgacaccaaaaggaatactcccattgaagctctctgtgagaactttccagaggagatggcaacctaccttcgatatgtcaggcgactggacttctttgaaaaacctgattatgagtatttacggaccctcttcacagacctctttgaaaagaaaggctacacctttgactatgcctatgattgggttgggagacctattcctactccagtagggtcagttcacgtagattctggtgcatctgcaataactcgagaaagccacacacatagggatcggccatcacaacagcagcctcttcgaaatcagagccttaggactgttacagctgagcattatgatgttaacaactcagccatctggcacaggggaagaggcacctaaacagattcttctggacaaaagtcacatatgagcaagatcagaatagtagcagatgtaaaaagcagaatgtatcatcagagcgccgaggagagtgggaaattcagcccagccggcagaccaatacctcatacctaacgtctcacttggctgcagaccgccatgggggatcagtgcaggtggttagctcaaccaatggagagctgaatgttgatgatcccacgggagcccactccaatgcaccaatcacagctcatgccgaggtggaggtagtggaggaagctaagtgctgctgtttctttaagaggaaaaggaagaagactgctcagcgccacaagtgaccagtgcctcccaggagtcctcaggccctggggactctgactcaattgtacctgcagctcctgccatttctcattggaagggactcctctttgggggagggtggatatccaaactaaaaagaagaaaacagatgcccccagaaggggccagtgcgggcagccagggcctagtgggtcattggccatctccgcctgcctaaggctctgagcaggtcccagagctgctgttcctccactgcttgcccatagggctgcctggttgactctccttcccattgtttacagtgaaggtgtcattcaca

SEQ ID NO: 4217 - protein, 393 aa, Homo sapiens
MDHPSREKDERQRTTKPMAQRSAHCSRPSGSSSSSGVLMVGPNFRVGKKIGCGNFGELRLGKNLYTNEYVAIKLEPIKSRAPQLHLEYRFYKQLGSAGEGLPQVYYFGPCGKYNAMVLELLGPSLEDLFDLCDRTFTLKTVLMIAIQLLSRMEYVHSKNLIYRDVKPENFLIGRQGNKKEHVIHIIDFGLAKEYIDPETKKHIPYREHKSLTGTARYMSINTHLGKEQSRRDDLEALGHMFMYFLRGSLPWQGLKADTLKERYQKIGDTKRNTPIEALCENFPEEMATYLRYVRRLDFFEKPDYEYLRTLFTDLFEKKGYTFDYAYDWVGRPIPTPVGSVHVDSGASAITRESHTHRDRPSQQQPLRNQSLRTVTAEHYDVNNSAIWHRGRGT

SEQ ID NO: 4218 - DNA, 1028 bp, Homo sapiens
ggcacgaggacggcgcccgccgcccgcccggagcccgcgagcaaccccagtcccccccacccgcgcgtggcggcgccggctccctagccaccgcggccccaccctcttccggcctcagctgtccgggctgctttcgcctccgcctgtggatgctgcgcctctccgaacgcaacatgaaggtgctccttgccgccgccctcatcgcggggtccgtcttcttcctgctgctgccgggaccttctgcggccgatgagaagaagaaggggcccaaagtcaccgtcaaggtgtattttgacctacgaattggagatgaagatgtaggccgggtgatctttggtctcttcggaaagactgttccaaaaacagtggataattttgtggccttagctacaggagagaaaggatttggctacaaaaacagcaaattccatcgtgtaatcaaggacttcatgatccagggcggagacttcaccaggggagatggcacaggaggaaagagcatctacggtgagcgcttccccgatgagaacttcaaactgaagcactacgggcctggctgggtgagcatggccaacgcaggcaaagacaccaacggctcccagttcttcatcacgacagtcaagacagcctggctagatggcaagcatgtggtgtttggcaaagttctagagggcatggaggtggtgcggaaggtggagagcaccaagacagacagccgggataaacccctgaaggatgtgatcatcgcagactgcggcaagatcgaggtggagaagccctttgccatcgccaaggagtagggcacagggacatctttctttgagtgaccgtctgtgcaggccctgtagtccgccacagggctttgagctgcactggccccggtgctggcatctggtggagcggacccactcccctcacattccacaggcccatggactcacttttgtaacaaactcctaccaaccctgaccaataaaaaaaaatgtgggtttttttttttttttaataaaaaaaaaaaaaaaaaaaaa

SEQ ID NO: 4219 - protein, 216 aa, Homo sapiens
MLRLSERNMKVLLAAALIAGSVFFLLLPGPSAADEKKKGPKVTVKVYFDLRIGDEDVGRVIFGLFGKTVPKTVDNFVALATGEKGFGYKNSKFHRVIKDFMIQGGDFTRGDGTGGKSIYGERFPDENFKLKHYGPGWVSMANAGKDTNGSQFFITTVKTAWLDGKHVVFGKVLEGMEVVRKVESTKTDSRDKPLKDVIIADCGKIEVEKPFAIAKE

SEQ ID NO: 4220 - DNA, 2521 bp, Homo sapiens
  unsure 1380: unknown base
tgcctttcgctgcttgttggggttacaggtgaaggggttatggggtgaagaacaacccagggccagcgcttggccttcccgccaccgtggcggccgccccgcgctgtctgtgaggcgccagttccggggcgctgctcccggcctcccctcgctctgaggctcggggtccccagctccgcgtaaactgcacgatttcgccctctgctcagctcccctctgccccctctttccaagagagacttccagatcccacattttcttgactgatttttaagcatttcttcgtttatagctgtctgtttgcattctgattgggaacactgggatcattttcatcatgccgacagtggtggtaatggatgtatccctttccatgacccgacctgtgtctattgaggggtccgaggaataccagcgtaagcacctagcagcccatggtttaacgatgctgtttgagcacatggccacaaattacaagcttgaatttacagcacttgtggttttttcatcactttgggagttgatggtccccttcacgagagattataataccctacaggaagcactaagtaatatggatgattatgacaaaacctgcttggagtctgcattagttggtgtttgcaatatcgttcagcaagaatggggtggtgcaattccttgccaggttgtcctggtgacagacggctgtcttggcattggtagagggtcactgcgacattccctagccactcaaaatcaacgaagtgagagcaacaggtttccactaccttttcctttcccatctaagttatatatcatgtgcatggcgaatttggaggagctccagagcaccgattccttggaatgccttgaacgtctcatagatttaaacaatggtgaagggcagatttttactattgatggccccctgtgcttgaagaatgtacagtctatgtttggaaaactgatagatttggcatatacgcctttccatgctgttctcaagtgtggccacctaactgctgatgtacaagtcttccccaggccagaaccttttgttgtagatgaagaaattgatcctatccctaaagtcattaacacagatttggaaatagtgggatttattgatatagctgatatttcaagtcccccagttctgtccagacatctggtcttacctatagcacttaacaaagaaggtgatgaggtgggtactggcatcactgatgacaatgaagatgaaaattcagccaatcagattgcaggcaaaatacccaacttttgtgtcctgctccatggtagcctaaaagtggaaggaatggtagcgattgttcaattaggtcctgaatggcatggaatgctctactcccaagctgacagcaagaagaaatcaaaccntcatgatgtctctctttgagcctggcccagaacctctcccatggctagggaaaatggcacagttgggtcctatttcagatgctaaagaaaacccttatggcgaggatgacaataagagtccattccccctgcagcccaaaaacaaacgcagttatgcccagaatgtgactgtctggatcaaacccagcggcctgcagacagatgtacagaagattttaagaaatgcaaggaaactacctgaaaaaacacagacattctataaggagctgaaccgtttgcgaaaggccgctctagcctttggtttcctggacctgctgaaaggggtggctgacatgctggaaagggaatgcacactgctgcctgagacagcccaccctgatgctgcattccagctgacccatgctgcccagcagctcaagctggccagtaccggcacctctgagtatgccgcttatgaccagaacatcacacctttgcacacggacttctctgggagcagcactgaaagaatttgaaactgacttttggagctttccttcttttttcatttcaactgaaaatgctttaggtaaaaacctttccagtatgttcacctctagaatagccacccaaagaccttcctgaggctgcctcagaagcaccacttgctgttttgaatgactctactagtatgagaaggatgtgaaggtggttggctggttgggctttaacttcctgggattcataatttttaagcttggaagatagctgctgttcccatgatgggcacatttcctgagaagcttgaatgactgatgagcatagagcacccctgccttcctcaggaaacctgaccggcaggggctctctggcttcctgaaagcttcacctcttccctcgtttatatctcaactgtaagggcattttcaagcttctgttcatggaatgagcaactcagactgtctggagcttgctgagtacaaacacaccaccactaagtttcagaactttccttagaacttgggcaaaatgtggtggtaactcttaagtgcttttggtatctcttgagattctaacttttaaagagcaaccattaatgtgtaaaatgattcctattattcaaggtttttttttaatgaaaataaaatatttgattttctag

SEQ ID NO: 4221 - DNA, 1670 bp, Homo sapiens
gagcgtggggtatctcgaggtgccgggttgcaggcgctcaggagcgctagggtttgaggcctgctttctgctcgcgccagcagagcactacctgaggcagcgaggcgcagcgagcctagcctccccgcgccctgggcagtgtggccatggagaatcaggtgttgacgccgcatgtctactgggctcagcgacaccgcgagctatatctgcgcgtggagctgagtgacgtacagaaccctgccatcagcatcactgaaaacgtgctgcatttcaaagctcaaggacatggtgccaaaggagacaatgtctatgaatttcacctggagttcttagaccttgtgaaaccagagcctgtttacaaactgacccagaggcaggtaaacattacagtacagaagaaagtgagtcagtggtgggagagactcacaaagcaggaaaagcgaccactgtttttggctcctgactttgatcgttggctggatgaatctgatgcggaaatggagctcagagctaaggaagaagagcgcctaaataaactccgactggaaagcgaaggctctcctgaaactcttacaaacttaaggaaaggatacctgtttatgtataatcttgtgcaattcttgggattctcctggatctttgtcaacctgactgtgcgattctgtatcttgggaaaagagtccttttatgacacattccatactgtggctgacatgatgtatttctgccagatgctggcagttgtggaaactatcaatgcagcaattggagtcactacgtcaccggtgctgccttctctgatccagcttcttggaagaaattttattttgtttatcatctttggcaccatggaagaaatgcagaacaaagctgtggttttctttgtgttttatttgtggagtgcaattgaaattttcaggtactctttctacatgctgacgtgcattgacatggattggaaggtgctcacatggcttcgttacactctgtggattcccttatatccactgggatgtttggcggaagctgtctcagtgattcagtccattccaatattcaatgagaccggacgattcagtttcacattgccatatccagtgaaaatcaaagttagattttccttttttcttcagatttatcttataatgatatttttaggtttatacataaattttcgtcacctttataaacagcgcagacggcgctatggacaaaaaaagaaaaagatccactaaaaagaaagatttagatggcttcttgccagtttgagcctaatctgattcttacagttttaccttcttgaaccaatgtaaaagtttttttaatgttaaatgattaaattctcagtgaggctatcttccttttccccagtaacattcctgaatttactgttatcttattgtagtacttgcatgacatggattcctgatatctgatgagaggttcattcttgtgtattcagttaatgacaccaaaaggctcagcccaccccaaccctatctcatgttcagtctgtctaatacatgccagagatttttttttcaaaaagtgctttatccctacaatgtactgacagttcttacagttgagatttgttcttttcagctattgcttgtgaaaaaaagcaagactatgtcactctatagaaggctgttaaagtgactcaggca

SEQ ID NO: 4222 - DNA, 3694 bp, Homo sapiens
ggcacgaggtcacctgccgtccaggtatcatcctagtcttccctccgtctctgggatgggaaactcttgtctagtgatgtgactcattacgtgatcccagactggaaagttgttcaagattatcttgagatccttgagtttcctgagttgaagggaattattttcatgcagacagcttgtcaagctgtgcagcatcaaagaggcaggagacagtataacaaactgcgaaacctgctgaaggatgcgcgtcatgattgcattctctttgctaatgaattccagcaatgctgctatctgccacgggaaagaggagagtccatggagaagtggcagaccaggagcatatacaacgcagctgtttggtactatcatcactgccaggacaggatgccaattgttatggtgacagaagatgaagaggcaattcagcagtatggaagtgaaacagaaggagtattcgtgattactttcaagaattacctggacaatttctggcctgatttaaaagctgcccacgagctttgtgattctatccttcagtctcgacgggagagagagaatgagagtcaggagagccatgggaaggagtacccagaacatcttcccctggaagtgttagaagctgggattaaatctggacgctatatccagggaattctgaatgtcaacaaacacagagcccaaatagaagcttttgttcgacttcaaggagccagcagtaaagattcagatttagtcagtgacatcctaatccacgggatgaaggctcgaaaccgctcaattcatggagatgtggtagttgtggagctgcttcctaaaaatgaatggaaaggaagaaccgtagccctgtgtgagaatgactgtgacgacaaggcttcgggcgagtccccaagtgagcccatgcctacaggtcgagtggtgggcatacttcagaagaactggcgggattatgtggtgacatttccgtccaaagaagaggtccaatctcagggcaaaaatgctcagaaaatcctggttacaccttgggattacagaattcccaaaattcgaattagcactcagcaagcagaaaccctccaggacttcagggtggtcgtgcgcatcgattcctgggagtcaacatctgtgtatccaaacggacattttgtgcgtgttttaggaagaatcggagatctggaaggggaaattgcaaccatcctggtggaaaacagtatttcagttattcctttctcagaagctcagatgtgtgagatgccagtaaacacaccagaaagtccctggaaggtgagtcctgaagaggaacaaaaacgtaaagacttgaggaaaagccatctcgtattcagcattgaccccaaaggttgtgaagatgtggatgacacactctcagtcagaaccttaaataatggcaacctggaacttggggtccacatcgcagatgtaacacactttgtggcaccaaattcttacattgatattgaagctagaacaagggccaccacttattatctagcagatcgtcgctatgacatgctgccttccgtcctcagtgcagatttgtgttcccttctgggaggcgttgataggtatgctgtaagcatcatgtgggaactggataaagcctcttatgaaattaagaaagtgtggtatggcagaaccattattcgatcagcatacaaactgttctatgaagcagcccaagaactactggatggaaacttaagcgttgttgatgatattccagaattcaaagacttggatgagaagagcagacaagccaagctggaggagttggtgtgggcaattggaaagctgaccgacatagctcgccatgtcagagctaaacgagacggatgtggtgccctggaactggaaggggtagaggtttgcgtacagctagatgacaaaaagaacattcacgacctcatccccaagcagcccctggaagtccacgagacagtggctgaatgcatgatcctggccaaccactgggtcgccaaaaagatctgggagagcttccctcatcaggccttgctgcgccagcaccctcctccacaccaggagttcttttcagaactccgggaatgtgctaaagccaaaggcttcttcatagatacacggtccaataaaacactggctgattctctggataatgcgaacgacccccacgatcccattgtgaacaggctactgcgctccatggccacgcaggccatgtcgaatgctctgtacttctccaccggatcctgtgcggaggaggagttccatcattacggtcttgcattagataaatatacccactttacttctccaataagaagatattcagatattgtagtacaccgcttgttaatggcagccatttcaaaagataagaaaatggaaattaagggaaatctgttcagcaacaaagatcttgaggaattatgcagacatatcaacaacagaaaccaagcagcacagcattctcagaagcagtctactgagctcttccagtgcatgtacttcaaagacaaagaccctgccaccgaggagcgttgcatatctgacggagttatttattcaattagaacaaatggtgtgcttctatttataccaaggtttgggattaaaggtgctgcttatctaaaaaataaagatggtttagtcatctcatgtggcccagatagctgttctgaatggaaaccaggatcccttcaacgatttcaaaacaaaattacctctactacaacagatggggaatctgttacgttccatttgtttgaccatgtaaccgtaagaatatccatacaggcctcacgttgccattctgatacaatcagacttgaaataattagtaacaaaccatacaagataccaaatacagaacttattcatcagagttcccccttgctgaagagtgagttagtgaaagaagtaactaaatctgtggaagaagctcagcttgcccaagaagtcaaagtaaacatcattcaggaggaatatcaagaatatcgccaaacaaagggaaggagcctatacacacttctagaggagatacgggacctagctctcctggatgtttcaaacaattatggaatatgagaggctcttacttcactaagagctgtcatatgtgaatgttttacagtcttttcaaacttaacatttaatgtgtgtcactcagtgctctagtcgatcaggactgggtagctatttcgcatatatgtaaaatgttctcagccgggcacggtggctcacgcctgtaaccccagcactttgggaggctgaggcgggcggatcacgaggtcaggagattgagaccatcctggctaacacggtgaaacccagtctctactaaaaatacaaaaattagcccggcgtggtggcatgcgcctgtagtcccagctacttgggaggctgaagcaggagaattgcctgaacccaggaagaggaggttgcagtgagccgagatcgcaccactgcattccagcctgggcaacagagcgagactccatctcaaaaaaaaaaaaaaaaaaaaaaaaagttctctcattcattaaagttgcattaaataaagtataattaggtcactatggaaacagttttcagtaatgagtggacagtaagtggtggctctgcagatggcccctttctaataagtttaataaacccgaaattactggttaaaaaaaaaaaaaaaaaaaaaaaaaaaaaa

SEQ ID NO: 4223 - protein, 971 aa, Homo sapiens
MQTACQAVQHQRGRRQYNKLRNLLKDARHDCILFANEFQQCCYLPRERGESMEKWQTRSIYNAAVWYYHHCQDRMPIVMVTEDEEAIQQYGSETEGVFVITFKNYLDNFWPDLKAAHELCDSILQSRRERENESQESHGKEYPEHLPLEVLEAGIKSGRYIQGILNVNKHRAQIEAFVRLQGASSKDSDLVSDILIHGMKARNRSIHGDVVVVELLPKNEWKGRTVALCENDCDDKASGESPSEPMPTGRVVGILQKNWRDYVVTFPSKEEVQSQGKNAQKILVTPWDYRIPKIRISTQQAETLQDFRVVVRIDSWESTSVYPNGHFVRVLGRIGDLEGEIATILVENSISVIPFSEAQMCEMPVNTPESPWKVSPEEEQKRKDLRKSHLVFSIDPKGCEDVDDTLSVRTLNNGNLELGVHIADVTHFVAPNSYIDIEARTRATTYYLADRRYDMLPSVLSADLCSLLGGVDRYAVSIMWELDKASYEIKKVWYGRTIIRSAYKLFYEAAQELLDGNLSVVDDIPEFKDLDEKSRQAKLEELVWAIGKLTDIARHVRAKRDGCGALELEGVEVCVQLDDKKNIHDLIPKQPLEVHETVAECMILANHWVAKKIWESFPHQALLRQHPPPHQEFFSELRECAKAKGFFIDTRSNKTLADSLDNANDPHDPIVNRLLRSMATQAMSNALYFSTGSCAEEEFHHYGLALDKYTHFTSPIRRYSDIVVHRLLMAAISKDKKMEIKGNLFSNKDLEELCRHINNRNQAAQHSQKQSTELFQCMYFKDKDPATEERCISDGVIYSIRTNGVLLFIPRFGIKGAAYLKNKDGLVISCGPDSCSEWKPGSLQRFQNKITSTTTDGESVTFHLFDHVTVRISIQASRCHSDTIRLEIISNKPYKIPNTELIHQSSPLLKSELVKEVTKSVEEAQLAQEVKVNIIQEEYQEYRQTKGRSLYTLLEEIRDLALLDVSNNYGI

SEQ ID NO: 4224 - DNA, 2227 bp, Homo sapiens
gaaccgccccgcgctgggaatttgcggcggcctccgccggggcagccgagctgaaccggtctcttcctcggaaaggcagggccgaggggcctgcggggcagccatggaggcgacgcggaggcggcagcacctgggagcgacgggcggcccaggcgcgcagctgggcgcctccttcctgcaggccaggcatggctctgtgagcgctgatgaggctgcccgcacggctcccttccacctcgacctctggttctacttcacactgcagaactgggttctggactttgggcgtcccattgccatgctggtattccctctcgagtggtttccactcaacaagcccagtgttggggactacttccacatggcctacaacgtcatcacgccctttctcttgctcaagctcatcgagcggtccccccgcaccctgccacgctccatcacgtacgtgagcatcatcatcttcatcatgggtgccagcatccacctggtgggtgactctgtcaaccaccgcctgctcttcagtggctaccagcaccacctgtctgtccgtgagaaccccatcatcaagaatctcaagccggagacgctgatcgactcctttgagctgctctactattatgatgagtacctgggtcactgcatgtggtacatccccttcttcctcatcctcttcatgtacttcagcggctgctttactgcctctaaagctgagagcttgattccagggcctgccctgctcctggtggcacccagtggcctgtactactggtacctggtcaccgagggccagatcttcatcctcttcatcttcaccttcttcgccatgctggccctcgtcctgcaccagaagcgcaagcgcctcttcctggacagcaacggcctcttcctcttctcctccttcgcactgaccctcttgcttgtggcgctctgggtcgcctggctgtggaatgaccctgttctcaggaagaagtacccgggtgtcatctacgtccctgagccctgggctttctacacccttcacgtcagcagtcggcactgagtccctggcaccaggctctggcgctctgctgggtgggagggtgggccatggagggcatctgaatacaggagtagggggggtgtgggtgtgtaaccagagaccgagagcatgagtggggtgtgcctcgtgtgcgtggattcgtgtgtgtgtgtgtgtcttgtatatgtgtgcgcagagtgcatcattttcagactctactatttccgtcaagtttctgtttgatttggatcatctcaggatcggattctgttttagagtgtttctgggccaggatccgggcccctgccctcctctgcacctgaccacactccctactcagggctagtctgttcttcccggacatcttctggtagccgtgcaggagagggctgggtggggcagaggccaggaggggacctggtgtgtcacctgcccaccacctggctcatccctcaggcccaccctgaccctacattacataggttacgtcagcctactgtggctgttgagcaaagcatttctcctttctgggcctcatttgcactagatgggcctgtggtcccaaagtaggtcagtaggttggggttgctgacaccccttgggtgcagctttgggacagatgagtggctctgtcctgtcactgccctctccctgcctgggggctatgtgcactccagacccctgcccaggctcaggcccatgaggtatggagacaccctggcccccaggagctggaggcaccgcccactcccctggcattccagctttgcaggtgaccctcctctacccaaagctctgtccccctgctcccactccagaagaactgcggcacgtgcttcgggcagcctagccacaggctttgagcgcctgcattcctgggggctggagggtggggtgccaaaggccctgagcaaaagccagagctcctctcatcaaagcctttacaaggtactgggcccagaggctttgccttgacagagtggcccagggtttcaagggaggaggaacctccccctacctaggacccttcctgtggggggtctacagagtcagggacagaagggaagggacccacaggaagtcacagtggtgcccagggatgtgtcagcccccagccacggggacgcgggattcaagaatgaagtaaatacagtcacagccccaaaaaaaaaaaaaaaaaaaaaaaaaaaaaaaaaaaaaaaaaaaaaa

SEQ ID NO: 4225 - protein, 311 aa, Homo sapiens
MEATRRRQHLGATGGPGAQLGASFLQARHGSVSADEAARTAPFHLDLWFYFTLQNWVLDFGRPIAMLVFPLEWFPLNKPSVGDYFHMAYNVITPFLLLKLIERSPRTLPRSITYVSIIIFIMGASIHLVGDSVNHRLLFSGYQHHLSVRENPIIKNLKPETLIDSFELLYYYDEYLGHCMWYIPFFLILFMYFSGCFTASKAESLIPGPALLLVAPSGLYYWYLVTEGQIFILFIFTFFAMLALVLHQKRKRLFLDSNGLFLFSSFALTLLLVALWVAWLWNDPVLRKKYPGVIYVPEPWAFYTLHVSSRH

SEQ ID NO: 4226 - DNA, 2592 bp, Homo sapiens
ggcacgaggcgctcttgcgggagcgttccgcatcgccccgggggcccctacgcgaggatctccggggccgttggcagcgcctggcacttctgagctcggcggacgagagcctgcaggtttcctccagtcagggacggcgaagggcggaaagcgcaggaggaggcagtgttaggccttaggccgggtgggccgggtcaggagagacgcgcccatctttcgccatccggggtgcgcgaggtcctctcgggacccggccggcgacccgtagctcgggcacgcgcctgtcgcatcccgcaggaaggaggggtccggcctgaggcccggggcggcgtccgccatggagatcccctcggtccagggccggcgcctgggacctggcgggcggccctgaccgccttcctccctgcgcgggctgggtcgcggacgtgcccttcgcggcactcggcctcctctgcgtctccgccttccctgggccgcactgctgcctgggcgcggcggcggcgacggcgccctgttgaatgggctgtgagggcccaggtttaaagcgctggcgaacgcggcctccgggggcgcacggcagctgcagcggtggcgaccaaacgggtgttggagttggcggcggccatggagggcctggctggctatgtatacaaggcggccagcgagggcaaggtgctgactctggccgccttgcttctcaaccggtctgaaagcgacatccgctatctgcttggctatgtcagccagcagggagggcagcgctccacgcccctcatcatcgcagcccgcaatggacacgcaaaggtggtacgcttgctcttagaacattaccgggtgcagactcagcagactggcaccgtccgcttcgacgggtatgtcattgatggtgccactgctctttggtgtgcagctggagcaggacattttgaagttgttaaacttctagtcagccatggagccaacgtgaaccataccacagtaactaattcaacccccctgcgggcagcatgctttgatggcagactggacattgtgaaatacttggttgaaaataatgccaacatcagcattgccaacaaatatgacaacacctgcctaatgattgcggcatataagggacacactgatgtggtcagataccttttagaacaacgtgctgatcccaatgccaaagcacattgtggagccacagcattgcactttgcagctgaagctgggcacatagatattgtgaaagagctgataaaatggcgtgctgctatagtagtgaatggccatgggatgacgccattgaaagtagctgccgaaagctgtaaagctgatgtcgtagaactgttactctctcatgctgattgcgaccgaagaagtcggattgaagctttggaactcttgggtgcctcctttgcaaatgaccgtgagaactatgacatcataaagacataccactatctatatttagccatgttagagaggttccaagatggtgataacattctcgaaaaagaggttcttccaccaatccatgcttatgggaatagaactgaatgtagaaatcctcaggaactggagtccattcggcaagacagagatgctcttcatatggaaggccttatagttcgggaacggattttaggtgctgacaatattgatgtttctcatcccatcatttacagaggagctgtttatgcggataatatggaatttgagcagtgtatcaagttgtggcttcatgccctgcacctcagacaaaaaggtaacaggaacacccacaaggatcttcttcgatttgctcaagttttctcacaaatgatacatttgaatgaaactgtgaaggccccagacatagaatgtgttttgagatgcagtgttttggaaatagaacaaagtatgaacagagtgaaaaatatttcagatgctgatgtccacaatgctatggacaattatgaatgtaatctctatacctttctgtatttagtgtgcatctctaccaaaacacagtgcagcgaagaagatcagtgcaaaattaacaagcagatctacaacctgattcaccttgatcccagaactcgtgaaggtttcaccttgctgcatctggctgtcaactccaatactccagttgatgatttccacaccaatgacgtctgcagctttccaaatgcacttgtcacaaagctcctgctggactgtggtgctgaggtgaatgccgtggacaatgagggaaacagtgcccttcatattatcgttcagtacaacaggcccatcagtgattttttgaccttgcactccatcatcattagcctagttgaagccggagctcacactgacatgacgaataaacagaataagactccgctagacaaaagtacaactggggtatctgaaatactgcttaaaactcaaatgaagatgagtctcaagtgcctggctgcccgagcagttcgggctaatgacattaactaccaagaccagatccccagaactcttgaagagtttgttggatttcattaagtgactggatatgtaaagtcgtttaatgtggtgctaaaaagtaaaggacttttaatcacaaaaaaaaaaaaaaaaaaaaaaaaa

SEQ ID NO: 4227 - protein, 627 aa, Homo sapiens
MEGLAGYVYKAASEGKVLTLAALLLNRSESDIRYLLGYVSQQGGQRSTPLIIAARNGHAKVVRLLLEHYRVQTQQTGTVRFDGYVIDGATALWCAAGAGHFEVVKLLVSHGANVNHTTVTNSTPLRAACFDGRLDIVKYLVENNANISIANKYDNTCLMIAAYKGHTDVVRYLLEQRADPNAKAHCGATALHFAAEAGHIDIVKELIKWRAAIVVNGHGMTPLKVAAESCKADVVELLLSHADCDRRSRIEALELLGASFANDRENYDIIKTYHYLYLAMLERFQDGDNILEKEVLPPIHAYGNRTECRNPQELESIRQDRDALHMEGLIVRERILGADNIDVSHPIIYRGAVYADNMEFEQCIKLWLHALHLRQKGNRNTHKDLLRFAQVFSQMIHLNETVKAPDIECVLRCSVLEIEQSMNRVKNISDADVHNAMDNYECNLYTFLYLVCISTKTQCSEEDQCKINKQIYNLIHLDPRTREGFTLLHLAVNSNTPVDDFHTNDVCSFPNALVTKLLLDCGAEVNAVDNEGNSALHIIVQYNRPISDFLTLHSIIISLVEAGAHTDMTNKQNKTPLDKSTTGVSEILLKTQMKMSLKCLAARAVRANDINYQDQIPRTLEEFVGFH

SEQ ID NO: 4228 - DNA, 512 bp, Homo sapiens
cctttcctcagctgccgccaaggtgctcggtccttccgaggaagctaaggctgcgttggggtgaggccctcacttcatccggcgactagcaccgcgtccggcagcgccagccctacactcgcccgcgccatggcctctgtctccgagctcgcctgcatctactcggccctcattctgcacgacgatgaggtgacagtcacggaggataagatcaatgccctcattaaagcagccggtgtaaatgttgagcctttttggcctggcttgtttgcaaaggccctggccaacgtcaacattgggagcctcatctgcaatgtaggggccggtggacctgctccagcagctggtgctgcaccagcaggaggtcctgccccctccactgctgctgctccagctgaggagaagaaagtggaagcaaagaaagaagaatccgaggagtctgatgatgacatgggctttggtctttttgactaaacctcttttataacatgttcaataaaaagctgaacttt

SEQ ID NO: 4229 - protein, 114 aa, Homo sapiens
MASVSELACIYSALILHDDEVTVTEDKINALIKAAGVNVEPFWPGLFAKALANVNIGSLICNVGAGGPAPAAGAAPAGGPAPSTAAAPAEEKKVEAKKEESEESDDDMGFGLFD

SEQ ID NO: 4230 - DNA, 4501 bp, Homo sapiens
cgcaggtggcaggcaggtggggctggtacagcccgcgccgcctctgctgcagccgctgccgtctactccttgcgcgctggcactccgcagcctttaaggttcgcgcgggggccaggcaagagttagccatgaagagcctcaagtcccgcctgaggaggcaggacgtgcccggccccgcgtcgtctggcgccgccgccgccagcgcgcatgcagcagattggaataaatatgatgaccgattgatgaaagcagcagaaaggggggatgtagaaaaagtgacctcaatccttgctaaaaagggggtcaatccaggcaaactagatgtggaaggcagatctgtcttccatgttgtgacctcaaaggggaatcttgagtgtttgaatgccatccttatacatggagttgatattacaaccagtgacactgcagggagaaatgctcttcacctggctgctaagtatggacatgcattgtgcctacaaaaacttctacagtacaattgtcccactgagcatgcagacctgcagggaagaactgcacttcacgatgccgcaatggcagattgtccttctagcatacagctgctttgtgaccatggggcctctgtgaatgccaaagatgtagacgggcggacaccacttgttctggctactcagatgagtaggccaacaatatgtcaactgctgatagatagaggagcggatgttaattccagagacaaacaaaacagaactgccctcatgctaggttgcgaatatggttgcagagatgcagtagaagtcttaattaaaaatggtgctgatataagcttgctggatgcgcttggccatgatagttcttactatgcaagaattggtgacaatctggacattctaaccttgttgaagactgcatcggaaaataccaacaaagggagagaactttggaagaaagggccatctttgcaacagcgaaatttgacacacatgcaagatgaagtaaatgtgaagtcacatcagagggagcatcaaaatattcaggatttggagattgaaaatgaagatttgaaagagaggttgagaaaaattcagcaagaacaaagaatacttttggataaagtcaatggtttacagttacagctgaatgaggaagttatggttgctgatgatctggaaagcgagagagaaaagctgaagtcccttttggcagctaaagaaaagcaacatgaagaaagcttaaggactattgaggctctgaaaaatagatttaaatattttgagagtgatcatttaggatcaggaagtcatttcagtaaccgaaaagaagatatgcttcttaaacaaggtcagatgtatatggcagactcacagtgtacttccccaggtataccagcccatatgcaaagcagatctatgttaagacctctggaactatctttacccagtcaaacgtcatactctgaaaatgaaattttaaagaaagagttagaagcaatgcgaactttctgtgagtcagcaaaacaagaccgactgaagctccaaaatgaactggcacacaaagtggcagaatgcaaagctttagcattagaatgtgaaagggtcaaggaggattcagatgaacagataaagcaattagaagatgcattaaaagatgtgcagaagaggatgtatgagtcagaaggtaaagttaaacaaatgcagacccattttcttgcccttaaagaacacttaacaagtgaagcagcctcagggaatcacagactaaccgaggaactgaaggatcagttgaaagacttgaaagtaaaatatgaaggtgcttcagcagaagtggggaaattaagaaaccaaatcaaacaaaatgagatgatagtagaagagtttaagagggatgaaggcaagctgatagaagaaaataagcgattacagaaggaacttagtatgtgtgaaatggagcgagagaagaaaggaagaaaggtcacagagatggaaggccaggcaaaagaattgtcagcgaagttggccctttccattccagctgaaaaatttgaaaacatgaagagctcattatcaaatgaagtgaatgagaaagcaaaaaaattagtagaaatggaaagagaacatgaaaaatcacttagtgaaattagacagttaaagagagaacttgagaatgttaaggccaagcttgctcagcacgtcaaaccagaggaacatgaacaggttaagagcagattagaacagaaatcaggagaacttgggaagaagatcactgagttaacattgaaaaatcagacactacaaaaggaaattgaaaaagtttatttggataataagctcctcaaggagcaagcacataacttaacaattgaaatgaaaaatcattatgttcctttaaaagtaagtgaagacatgaaaaagtcacatgatgcaattattgatgatcttaatagaaagcttttagatgtaacacaaaaatatacagaaaagaagttggaaatggagaaattgctactggaaaatgacagcttaagtaaggatgtaagccgcctagaaactgtgtttgtacctcctgagaaacatgaaaaagagataatagctctgaaatccaatattgttgaacttaagaaacagctgtctgaacttaagaaaaaatgtggtgaagaccaggagaaaatacacgctctcacatctgaaaacactaacttgaagaagatgatgagtaatcagtatgtgccagttaaaacccatgaagaggttaaaatgacactgaatgacacgttagccaaaactaacagagaattattagatgtgaagaaaaaatttgaagatataaatcaggaatttgtaaaaataaaagataagaatgaaatattaaaaagaaacctggaaaacactcagaaccaaataaaagctgagtacatcagcctggcagagcacgaggcaaagatgagctcgctaagtcagagcatgagaaaggtgcaggatagtaatgctgaaatcttggccaactacagaaaaggccaagaagagattgtgacactgcatgccgaaattaaagcccagaagaaggagctcgacacaatacaagaatgcattaaggtaaaatacgccccaattgtcagctttgaggagtgcgagagaaaatttaaagcaacagagaaagaactaaaagaccagttatcagagcagacacaaaagtatagtgtcagtgaagaagaagtcaagaaaaacaagcaagagaatgacaagttaaagaaggagatttttacccttcagaaagatttgagagataagacagttctcattgagaagtctcatgaaatggaaagagcattaagcagaaaaacagacgagctaaacaaacagttaaaagacttgtcacagaaatacacggaagtaaagaatgtgaaagagaagctagtagaagaaaatgccaaacagacttctgagatacttgcagtgcaaaatcttttgcaaaaacaacatgttccattggaacaggttgaggctctgaaaaaatctcttaatggcacaattgaaaatctaaaggaagaactgaagagtatgcaaaggtgttacgagaaagagcagcagacagtgaccaaactgcatcaattgttggagaatcaaaagaactcttctgtacccctggcagagcatttgcagattaaagaagcatttgagaaagaagttggaatcataaaagccagcttgagagaaaaggaagaagaaagccaaaacaaaatggaagaagtctccaaacttcagtcggaggttcagaatactaaacaagcattaaaaaaattagagactagagaggtagttgacttgtctaaatataaagcaacaaaaagtgatttggagacacagatttctagcttaaatgaaaaattggccaatctgaatagaaagtatgaggaagtatgtgaggaagttttgcatgccaaaaagaaggaaatatctgcaaaagatgagaaggaattactgcatttcagcattgagcaagaaattaaggatcagaaggaacgatgtgataagtccttaacaacaatcacagagttacaaagaagaatacaagaatctgctaaacaaatagaagcaaaagataataagataactgaactgcttaatgatgtggaaagattaaaacaggcactcaatggcctttcccaactcacctacacaagtgggaaccccaccaagaggcagagccagctgattgacactctgcagcaccaagtgaaatctctggagcaacagctggccgatgctgacagacagcaccaagaagtaattgcaatttatcggacacaccttcttagtgctgcacagggtcacatggatgaagatgttcaggaggctctgctccagatcatacaaatgcggcaggggcttgtgtgctagccgttagcactgactgccagtatctgttttatcttgctggtgctgaacattctttgtgcaactccatggtctttctgggccttactgtgctggtataattaaaataaaatatattttgttct

SEQ ID NO: 4231 - protein, 1416 aa, Homo sapiens
MKSLKSRLRRQDVPGPASSGAAAASAHAADWNKYDDRLMKAAERGDVEKVTSILAKKGVNPGKLDVEGRSVFHVVTSKGNLECLNAILIHGVDITTSDTAGRNALHLAAKYGHALCLQKLLQYNCPTEHADLQGRTALFLKAMADCPSSIQLLCDHGASVNAKDVDGRTPLVLATQMSRPTICQLLIDRGADVNSRDKQNRTALMLGCEYGCRDAVEVLIKNGADISLLDALGHDSSYYARIGDNLDILTLLKTASENTNKGRELWKKGPSLQQRNLTHMQDEVNVKSHQREHQNIQDLEIENEDLKERLRKIQQEQRILLDKVNGLQLQLNEEVMVADDLESEREKLKSLLAAKEKQHEESLRTIEALKNRFKYFESDHLGSGSHFSNRKEDMLLKQGQMYMADSQCTSPGIPAHMQSRSMLRPLELSLPSQTSYSENEILKKELEAMRTFCESAKQDRLKLQNELAHKVAECKALALECERVKEDSDEQIKQLEDALKDVQKRMYESEGKVKQMQTHFLALKEHLTSEAASGNHRLTEELKDQLKDLKVKYEGASAEVGKLRNQIKQNEMIVEEFKRDEGKLIEENKRLQKELSMCEMEREKKGRKVTEMEGQAKELSAKLALSIPAEKFENMKSSLSNEVNEKAKKLVEMEREHEKSLSEIRQLKRELENVKAKLAQHVKPEEHEQVKSRLEQKSGELGKKITELTLKNQTLQKEIEKVYLDNKLLKEQAHNLTIEMKNHYVPLKVSEDMKKSHDAIIDDLNRKLLDVTQKYTEKKLEMEKLLLENDSLSKDVSRLETVFVPPEKHEKEIIALKSNIVELKKQLSELKKKCGEDQEKIHALTSENTNLKKMMSNQYVPVKTHEEVKMTLNDTLAKTNRELLDVKKKFEDINQEFVKIKDKNEILKRNLENTQNQIKAEYISLAEHEAKMSSLSQSMRKVQDSNAEILANYRKGQEEIVTLHAEIKAQKKELDTIQECIKVKYAPIVSFEECERKFKATEKELKDQLSEQTQKYSVSEEEVKKNKQENDKLKKEIFTLQKDLRDKTVLIEKSHEMERALSRKTDELNKQLKDLSQKYTEVKNVKEKLVEENAKQTSEILAVQNLLQKQHVPLEQVEALKKSLNGTIENLKEELKSMQRCYEKEQQTVTKLHQLLENQKNSSVPLAEHLQIKEAFEKEVGIIKASLREKEEESQNKMEEVSKLQSEVQNTKQALKKLETREVVDLSKYKATKSDLETQISSLNEKLANLNRKYEEVCEEVLHAKKKEISAKDEKELLHFSIEQEIKDQKERCDKSLTTITELQRRIQESAKQIEAKDNKITELLNDVERLKQALNGLSQLTYTSGNPTKRQSQLIDTLQHQVKSLEQQLADADRQHQEVIAIYRTHLLSAAQGHMDEDVQEALLQIIQMRQGLVC

SEQ ID NO: 4232 - DNA, 2061 bp, Homo sapiens
gcagtcactgccgaccggctggctgggccttgcggcgtgaggaccccggcggcgccgcagtcccgcgagccatggcccagtccggcggggaggctcggcccgggcccaagacggcggtgcagatccgcgtcgccatccaggaggccgaggacgtggacgagttggaggacgaggaggagggggcggagactcggggcgccggggacccggcccggtacctcagccccggctggggcagcgcgagcgaggaggagccgagccgcgggcacagtggcaccactgcaagtggaggtgagaatgagcgtgaggacctggagcaggagtggaagcccccggatgaggagttgatcaagaaactggtggatcagatcgaattctgcttttctgatgaaaacctggagaaggacgcctttttgctaaaacacgtgaggaggaacaagctgggatatgtgagcgttaagctactcacatccttcaaaaaggtgaaacatcttacacgggactggagaaccacagcacatgctttgaagtattcagtggtccttgagttgaatgaggaccaccggaaggtgaggaggaccacccccgtcccactgttccccaacgagaacctccccagcaagatgctcctggtctatgatctctacttgtctcctaagctgtgggctctggccaccccccagaagaatggaagggtgcaagagaaggtgatggaacacctgctcaagctttttgggacttttggagtcatctcatcagtgcggatcctcaaacctgggagagagctgccccctgacatccggaggatcagcagccgctacagccaagtggggacccaggagtgcgccatcgtggagttcgaggaggtggaagcagccatcaaagcccatgagttcatgatcacagaatctcagggcaaagagaacatgaaagctgtcctgattggtatgaagccacccaaaaagaaacctgccaaagacaaaaatcatgacgaggagcccactgcgagcatccacctgaacaagtccctgaacaagagagtcgaggagcttcagtacatgggtgatgagtcttctgccaacagctcctctgaccccgagagcaaccccacatcccctatggcgggccgacggcacgcggccaccaacaagctcagcccgtctggccaccagaatctctttctgagtccaaatgcctccccgtgcacaagtccttggagcagccccttggcccaacgcaaaggcgtttccagaaagtccccactggcggaggaaggtagactgaactgcagcaccagccctgagatcttccgcaagtgtatggattattcctctgacagcagcgtcactccctctggcagcccctgggtccggaggcgtcgccaagccgagatggggacccaggagaaaagccccggtacgagtcccctgctctcccggaagatgcagactgcagatgggctacccgtaggggtgctgaggttgcccaggggtcctgacaacaccagaggatttcatggccatgagaggagcagggcctgtgtataaataccttctatttttaatacaagctccactgaaaaccaccttcgttttcaaggttctgacaaacacctggcatgacagaatggaattcgttcccctttgagagattttttattcatgtagacctcttaatttatctatctgtaatatacataaatcggtacgccatggtttgaagaccaccttctagttcaggactcctgttcttcccagcatggccactattttgatgatggctgatgtgtgtgagtgtgatggccctgaagggctgtaggacggaggttccctgggggaagtctgttctttggtatggaatttttctctcttctttggtatggaatttttcccttcagtgactgagctgtcctcgataggccatgcaagggcttcctgagagttcaggaaagttctcttgtgcaacagcaagtagctaagcctatagcatggtgtcttgtaggaccaaatcgatgttacctgtcaagtaaataaataataaaacacccaactgggagtgctg

SEQ ID NO: 4233 - protein, 491 aa, Homo sapiens
MAQSGGEARPGPKTAVQIRVAIQEAEDVDELEDEEEGAETRGAGDPARYLSPGWGSASEEEPSRGHSGTTASGGENEREDLEQEWKPPDEELIKKLVDQIEFCFSDENLEKDAFLLKHVRRNKLGYVSVKLLTSFKKVKHLTRDWRTTAHALKYSVVLELNEDHRKVRRTTPVPLFPNENLPSKMLLVYDLYLSPKLWALATPQKNGRVQEKVMEHLLKLFGTFGVISSVRILKPGRELPPDIRRISSRYSQVGTQECAIVEFEEVEAAIKAHEFMITESQGKENMKAVLIGMKPPKKKPAKDKNHDEEPTASIHLNKSLNKRVEELQYMGDESSANSSSDPESNPTSPMAGRRHAATNKLSPSGHQNLFLSPNASPCTSPWSSPLAQRKGVSRKSPLAEEGRLNCSTSPEIFRKCMDYSSDSSVTPSGSPWVRRRRQAEMGTQEKSPGTSPLLSRKMQTADGLPVGVLRLPRGPDNTRGFHGHERSRACV

SEQ ID NO: 4234 - DNA, 1212 bp, Homo sapiens
atgtccatcagggtgacccagaagtcctacaagatgtccacctctggcccccgggccttcagcagctgctcctacacaagctctacacacccaaagaaggagcagatcaaggccctcaacaacaagtttgcctccttcatagacaaggtatggttcctggagcagcagaacaagatgctggagaccaagtggagcctcctgcagcagcagaagatggctcggaacaacaagaacaacatgttccagagctatatcaacaaccttaggtggcagctggagactctgagccaggagaagctgaagctggaggtggagcttggcaacatgcaggggctggtggaggacttcaagaacaaatatgaggatgagatcaataagcgtacagaggtggagaatgaatttgtcctcatcaagaaggatgtggatgaagcttacatgaacaagatagagctggagtcttgcctggaagggctgactgacgagatggacttcctcaggcagctgtttgaagaggagatctgggagctgcagtcccacatctcggacatatctgtggtgctgtccatggacaacagctacttcctggacacggtcagcatcattgctgaggtcaaggaggagattgccaaccgcagccaggcggaggctgagagcatgcaccagatcaagtatgaggagctgcagacgctggctgggaagcttgggcatgacctgcagcctataaagactgagatctccgagatgaactggaacatcagccggctccaggctgagattaagggcctcaaaggccagatggcttccctggaggccaccatcgcagatgtggagcagcgtggggagctggccgttaaggatgccaacgccaagctgtccgagctggaggcctctctgcaatgggccaggcaggatatggtgtggcagctgcgtgagtaccaggagctgatgaatgtcaagctggccttgggcatcaaaactgccacctacaggaagctgctggagggtgaggagagccggctggagtctgggatgcagaacatgacaatccatacgaagaccaccagcggctatgcaggtggtctgagctccacctatggggacctcacaagccccggcctcagctacagcctgggctccagctttggctctggcgcaggctccagctccttcagccgcaccggctccaccagggctgtggttgaagaagattga

SEQ ID NO: 4235 - protein, 403 aa, Homo sapiens
MSIRVTQKSYKMSTSGPRAFSSCSYTSSTHPKKEQIKALNNKFASFIDKVWFLEQQNKMLETKWSLLQQQKMARNNKNNMFQSYINNLRWQLETLSQEKLKLEVELGNMQGLVEDFKNKYEDEINKRTEVENEFVLIKKDVDEAYMNKIELESCLEGLTDEMDFLRQLFEEEIWELQSHISDISVVLSMDNSYFLDTVSIIAEVKEEIANRSQAEAESMHQIKYEELQTLAGKLGHDLQPIKTEISEMNWNISRLQAEIKGLKGQMASLEATIADVEQRGELAVKDANAKLSELEASLQWARQDMVWQLREYQELMNVKLALGIKTATYRKLLEGEESRLESGMQNMTIHTKTTSGYAGGLSSTYGDLTSPGLSYSLGSSFGSGAGSSSFSRTGSTRAVVEED

SEQ ID NO: 4236 - DNA, 2177 bp, Homo sapiens
gcagtacattgagctccacagagacagcgccagggcaagtgagagccggacgggcactgggcgactctgtgcctcgctgaggaaaaataactaaacatgggcaaaggagatcctaagaagctgagaggcaaaatgtcatcatatgcattttttgtgcaaacgtcgggaggagcataagaagaagcacccagatgcttcagtcaacttctcaagagttttctaagaagtgcccattatgaaagagaaatgaaaacctacatccctcccaaaggggagacaaaaaagaagttcaaggatcccaatgcacccaagaggcctccttcggccttcttcctcttctgctctgagtatcgcccaaaaatcaaaggagaacatcctggcctgtccattggtgatgttgcgaagaaactgggagagatgtggaataacactgctgcagatgacaagcagccttatgaaaagaaggctgcgaagctgaaggaaaaatacgaaaaggatattgctgcatatcgagctaaaggaaagcctgatgcagcaaaaaagggagttgtcaaggctgaaaaaagcaagaaaaagaaggaagaggaggaagatgaggaagatgaagaggatgaggaggaggaggaagatgaagaagatgaagatgaagaagaagatgatgatgatgaataagttggttctagcgcagtttttttttcttgtctataaagcatttaacccccctgtacacaactcactccttttaaagaaaaaaactgaaatgtaaggctgtgtaagatttgtttttaaactgtacagtgtctttttttgtatagttaacacactaccgaatgtgtctttagatagccctgtcctggtggtattttcaatagccactaaccttgcttggtacagtatgggggttgtaaattggcatggaaatttaaagcaggttcttgttggtgcacagcacaaattagttatatatggggatggtagttttttcatcttcagttgtctctgatgcagcttatacgaaataattgttgttctgttaactgaataccactctgtaattgcaaaaaaaaaaaaaaaagttgcagctgttttgttgacattctgaatgcttctaagtaaatacaatttttttattagtattgttgtccttttcataggtctgaaatttttcttcttgaggggaagctagtcttttgcttttgcccattttgaatcacatgaattattacagtgtttatcctttcatatagttagctaataaaaagcttttgtctacccaccctgcatatcataatgagggtaaagttaagttgagatagttttcatccataactgaacatccaaaatcttgatcagttaagaaatttcacatagcccacttacatttacaaactgaagagtaatcaatctactcaaagcatgggattactagaatcaaacattttgaaagtctgtccttgaaggactaatagaaaagtatgttctaacctttacatgaggactctattctttaactcccattaccatgtaatggcagttatattttgcagttcccacattaaagaagacctgagaatgtatccccaaaagcgtgagcttaaaatacaagactgccatattaaattttttgttgacattagtctcagtgaagactatgaaaatgctggctatagatgtcttttcccatttatctaaatatggactgctcaggaaacgagactttccattacaagtatttttaattaattgggccagcttttcaaacaaagatgccacattcaaaatagggtatattttcctatattacggtttgcccctttataaatccaagtagataggaggaaagaagacacttaaactttgcatctcagtatgaattattcaatttatttgaatgatttttctttacaaaacaaactcatcattagtcatgtttatctgcttagcagtttagggaacaatttggcaattttgtggttttcgagattatcgttttcttaaagtgccagtattttaaaatagcgttcttataattttacacgcttttgtgatggagtgctgttttgttatataattttgacttggattctttccatttgcatttgtttatgtaatttcaggaggaatactgaacatctgagtcctggatgatactaataaactaataattgcagaggttt

SEQ ID NO: 4237 - DNA, 1266 bp, Homo sapiens
ttacaggaaaaaggctcttgctatgaaagttaatccataaaattacaaaaatgactgttttggcagtacattgagctccacagagacagcgccagggcaagtgagagccggacgggcactgggcgactctgtgcctcgctgaggaaaaataactaaacatgggcaaaggagatcctaagaagctgagaggcaaaatgtcatcatatgcattttttgtgcaaacgtcgggaggagcataagaagaagcacccagatgcttcagtcaacttctcaagagttttctaagaagtgctcagagaggtggaagaccatttctgctaaagacaaaggaaaatttcaagatatggcaaaggtggacaaggcccattatgaaagagaaatgaaaacctacatccctcccaaaggggagacaaaaaagaagttcaaggatcccaatgcacccaagaggcctccttcggccttcttcctcttctgctctgagtatcgcccaaaaatcaaaggagaacatcctggcctgtccattggtgatgttgcgaagaaactgggagagatgtggaataacactgctgcagatgacaagcagccttatgaaaagaaggctgcgaagctgaaggaaaaatacgaaaaggatattgctgcatatcgagctaaaggaaagcctgatgcagcaaaaaagggagttgtcaaggctgaaaaaagcaagaaaaagaaggaagaggaggaagatgaggaagatgaagaggatgaggaggaggaggaagatgaagaagatgaagatgaagaagaagatgatgatgatgaataagttggttctagcgcagtttttttttcttgtctataaagcatttaacccccctgtacacaactcactccttttaaagaaaaaaactgaaatgtaaggctgtgtaagatttgtttttaaactgtacagtgtctttttttgtatagttaacacactaccgaatgtgtctttagatagccctgtcctggtggtattttcaatagccactaaccttgcttggtacagtatgggggttgtaaattggcatggaaatttaaagcaggttcttgttggtgcacagcacaaattagttatatatggggatggtagttttttcatcttcagttgtctctgatgcagcttatacgaaataattgttgttctgttaactgaataccactctgtaattgcaaaaaaaaaaaaaaaagttgcagctgttttgttgacattctgaatgcttctaagtaaatacaatttttttatta

SEQ ID NO: 4238 - protein, 168 aa, Homo sapiens
MLQSTSQEFSKKCSERWKTISAKDKGKFQDMAKVDKAHYEREMKTYIPPKGETKKKFKDPNAPKRPPSAFFLFCSEYRPKIKGEHPGLSIGDVAKKLGEMWNNTAADDKQPYEKKAAKLKEKYEKDIAAYRAKGKPDAAKKGVVKAEKSKKKKEEEEDEEDEEDESWF

SEQ ID NO: 4239 - DNA, 601 bp, Homo sapiens
aggtaatctgtgaaaatggttcgctattcacttgacccggagaaccccacgaaatcaggcaaatcaagaggttccaatcttcgtgttcactttaagaacactcgtgaaactgctcaggccatcaagggtatgcatatacgaaaagccacgaagtatctgaaagatgtcactttacagaaacagtgtgtaccattccgacattacaacggtggagttggcaggtgtgcgcaggccaagcagtggggctggacacaaggtcggtggcccaaaaagagtgctgaattcttgctgcacatgcttaaaaacgcagagagtaatgctgaacttaagggtttagatgtagattctctggtcattgagcatatccaagtgaacaaagcacctaagatgcaccgccggacctacagagctcatggtcggattaacccatacatgagctctccctgccacattgagatgatccttacggaaaaggaacagattgttcctaaaccagaagaggaggttgcccagaagaaaaagatatcccagaagaaactgaagaaacaaaaacttatggcacgggagtaaattcagcattaaaataaatgtaattaaaagg

SEQ ID NO: 4240 - protein, 184 aa, Homo sapiens
MVRYSLDPENPTKSGKSRGSNLRVHFKNTRETAQAIKGMHIRKATKYLKDVTLQKQCVPFRHYNGGVGRCAQAKQWGWTQGRWPKKSAEFLLHMLKNAESNAELKGLDVDSLVIEHIQVNKAPKMHRRTYRAHGRINPYMSSPCHIEMILTEKEQIVPKPEEEVAQKKKISQKKLKKQKLMARE

SEQ ID NO: 4241 - DNA, 1242 bp, Homo sapiens
gaatcaaagttcctcttggggaaatggcaagtctttaggacaggcgagaccctgtatgaatagtaccaaagcattactgcatggtagagaacacactcaattaaaaatgttaagctatctgaaaaataaaatgtgcaagtcttcaggatggcacaaaacaaaggttaatgcttcttggggcacatttcttagagggcttgctgagtgtgtaaatataatcgacttttgtttgtgttacatgacttctgtgacttcactgaaaatctgcacaattcagtttcagctctggattacttcagttgacctttgtgaaggtttttatctgtgtagaatgggtgtttgacttgttttagcctattacgtttttattttctttcactctgtattaaaagtaaaacttactaaaagaaaagaggtttgtgttcacattaaatggttttggattggctttttttagtgaggctttctgaacattgagatatcctgaacttagagctcttcaatcctaagattttcatgaaaagcctctcacttgaacccaaaccagagtactcttactgcctcttttctaaatgttcaggaaaagcatcgtcagttcagtcttttcagaatgagggagaaacatttgcctgccttgtaataacaagactcagcgcttatttttttaaactgcattttaaaaattggatagtataataacaataaggagtaagccaccttttataggcaccctgtagttttatagttcttaatccaaacattttatatttccttcttttggaaaaaacctacatgctacaagccaccatatgcacagactatacagtgagttgagttgcctctcccacagtctttgaggcgaattacaaaagtccagccattatcatcttcctgagttattattttgaaatgatttttttgtacattttggctgcagtattggtggtagaatatactataatatggatcatctctacttctgtatttatttatttattactagacctcaaccacagtcttctttttccccttccactgtcttctttttccccttccacctctctttgcctgtaagatgtactgtatgtagtcatgcactttgtattaatatattagaaatctacagatctgttttgtactttttatactgttggatacttataatcaaaacttttactagggtattgaataaatctagtcttattagaaaataaaaaataaaaataaaaaataaataaaaaa

SEQ ID NO: 4242 - DNA, 2287 bp, Homo sapiens
ggctgaggcagtggctccttgcacagcagctgcacgcgccgtggctccggatcttcttcgtctttgcagcgtagcccgagtcggtcagcgccagaggacctcagcagccatgtcgaagccccatagtgaagccgggactgccttcattcagacccagcagctgcacgcagccatggctgacacattcctggagcacatgtgccgcctggacattgattcaccacccatcacagcccggaacactggcatcatctgtaccattggcccagcttcccgatcagtggagacgttgaaggagatgattaagtctggaatgaatgtggctcgtctgaacttctctcatggaactcatgagtaccatgcggagaccatcaagaatgtgcgcacagccacggaaagctttgcttctgaccccatcctctaccggcccgttgctgtggctctagacactaaaggacctgagatccgaactgggctcatcaagggcagcggcactgcagaggtggagctgaagaagggagccactctcaaaatcacgctggataacgcctacatggaaaagtgtgacgagaacatcctgtggctggactacaagaacatctgcaaggtggtggaagtgggcagcaagatctacgtggatgatgggcttatttctctccaggtgaagcagaaaggtgccgacttcctggtgacggaggtggaaaatggtggctccttgggcagcaagaagggtgtgaaccttcctggggctgctgtggacttgcctgctgtgtcggagaaggacatccaggatctgaagtttggggtcgagcaggatgttgatatggtgtttgcgtcattcatccgcaaggcatctgatgtccatgaagttaggaaggtcctgggagagaagggaaagaacatcaagattatcagcaaaatcgagaatcatgagggggttcggaggtttgatgaaatcctggaggccagtgatgggatcatggtggctcgtggtgatctaggcattgagattcctgcagagaaggtcttccttgctcagaagatgatgattggacggtgcaaccgagctgggaagcctgtcatctgtgctactcagatgctggagagcatgatcaagaagccccgccccactcgggctgaaggcagtgatgtggccaatgcagtcctggatggagccgactgcatcatgctgtctggagaaacagccaaaggggactatcctctggaggctgtgcgcatgcagaacctgattgcccgtgaggcagaggctgccatctaccacttgcaattatttgaggaactccgccgcctggcgcccattaccagcgaccccacagaagccaccgccgtgggtgccgtggaggcctccttcaagtgctgcagtggggccataatcgtcctcaccaagtctggcaggtctgctcaccaggtggccagataccgcccacgtgcccccatcattgctgtgacccggaatccccagacagctcgtcaggcccacctgtaccgtggcatcttccctgtgctgtgcaaggacccagtccaggaggcctgggctgaggacgtggacctccgggtgaactttgccatgaatgttggcaaggcccgaggcttcttcaagaagggagatgtggtcattgtgctgaccggatggcgccctggctccggcttcaccaacaccatgcgtgttgttcctgtgccgtgatggaccccagagcccctcctccagcccctgtcccacccccttcccccagcccatccattaggccagcaacgcttgtagaactcactctgggctgtaacgtggcactggtaggttgggacaccagggaagaagatcaacgcctcactgaaacatggctgtgtttgcagcctgctctagtgggacagcccagagcctggctgccccatcatgtggccccacccaatcaagggaagaaggaggaatgctggactggaggcccctggagccagatggcaagagggtgacagcttcctttcctgtgtgtactctgtccagttcctttagaaaaaatggatgcccagaggactcccaaccctggcttggggtcaagaaacagccagcaagagttaggggccttagggcactgggctgttgttccattgaagccgactctggccctggcccttacttgcttctctagctctctaggcctctccagtttgcacctgtccccaccctccactcagctgtcctgcagcaaacactccaccctccaccttccattttcccccactactgcagcacctccaggcctgttgccgc

SEQ ID NO: 4243 - protein, 531 aa, Homo sapiens
MSKPHSEAGTAFIQTQQLHAAMADTFLEHMCRLDIDSPPITARNTGIICTIGPASRSVETLKEMIKSGMNVARLNFSHGTHEYHAETIKNVRTATESFASDPILYRPVAVALDTKGPEIRTGLIKGSGTAEVELKKGATLKITLDNAYMEKCDENILWLDYKNICKVVEVGSKIYVDDGLISLQVKQKGADFLVTEVENGGSLGSKKGVNLPGAAVDLPAVSEKDIQDLKFGVEQDVDMVFASFIRKASDVHEVRKVLGEKGKNIKIISKIENHEGVRRFDEILEASDGIMVARGDLGIEIPAEKVFLAQKMMIGRCNRAGKPVICATQMLESMIKKPRPTRAEGSDVANAVLDGADCIMLSGETAKGDYPLEAVRMQNLIAREAEAAIYHLQLFEELRRLAPITSDPTEATAVGAVEASFKCCSGAIIVLTKSGRSAHQVARYRPRAPIIAVTRNPQTARQAHLYRGIFPVLCKDPVQEAWAEDVDLRVNFAMNVGKARGFFKKGDVVIVLTGWRPGSGFTNTMRVVPVP

SEQ ID NO: 4244 - DNA, 2255 bp, Homo sapiens
cctccgagaggggagaccagcgggccatgacaagctccaggctttggttttcgctgctgctggcggcagcgttcgcaggacgggcgacggccctctggccctggcctcagaacttccaaacctccgaccagcgctacgtcctttacccgaacaactttcaattccagtacgatgtcagctcggccgcgcagcccggctgctcagtcctcgacgaggccttccagcgctatcgtgacctgcttttcggttccgggtcttggccccgtccttacctcacagggaaacggcatacactggagaagaatgtgttggttgtctctgtagtcacacctggatgtaaccagcttcctactttggagtcagtggagaattataccctgaccataaatgatgaccagtgtttactcctctctgagactgtctggggagctctccgaggtctggagacttttagccagcttgtttggaaatctgctgagggcacattctttatcaacaagactgagattgaggactttccccgctttcctcaccggggcttgctgttggatacatctcgccattacctgccactctctagcatcctggacactctggatgtcatggcgtacaataaattgaacgtgttccactggcatctggtagatgatccttccttcccatatgagagcttcacttttccagagctcatgagaaaggggtcctacaaccctgtcacccacatctacacagcacaggatgtgaaggaggtcattgaatacgcacggctccggggtatccgtgtgcttgcagagtttgacactcctggccacactttgtcctggggaccaggtatccctggattactgactccttgctactctgggtctgagccctctggcacctttggaccagtgaatcccagtctcaataatacctatgagttcatgagcacattcttcttagaagtcagctctgtcttcccagatttttatcttcatcttggaggagatgaggttgatttcacctgctggaagtccaacccagagatccaggactttatgaggaagaaaggcttcggtgaggacttcaagcagctggagtccttctacatccagacgctgctggacatcgtctcttcttatggcaagggctatgtggtgtggcaggaggtgtttgataataaagtaaagattcagccagacacaatcatacaggtgtggcgagaggatattccagtgaactatatgaaggagctggaactggtcaccaaggccggcttccgggcccttctctctgccccctggtacctgaaccgtatatcctatggccctgactggaaggatttctacatagtggaacccctggcatttgaaggtacccctgagcagaaggctctggtgattggtggagaggcttgtatgtggggagaatatgtggacaacacaaacctggtccccaggctctggcccagagcaggggctgttgccgaaaggctgtggagcaacaagttgacatctgacctgacatttgcctatgaacgtttgtcacacttccgctgtgaattgctgaggcgaggtgtccaggcccaacccctcaatgtaggcttctgtgagcaggagtttgaacagacctgagccccaggcaccgaggagggtgctggctgtaggtgaatggtagtggagccaggcttccactgcatcctggccaggggacggagccccttgccttcgtgccccttgcctgcgtgcccctgtgcttggagagaaaggggccggtgctggcgctcgcattcaataaagagtaatgtggcatttttctataataaacatggattacctgtgtttaaaaaaaaaagtgtgaatggcgttagggtaagggcacagccaggctggagtcagtgtctgcccctgaggtcttttaagttgagggctgggaatgaaacctatagcctttgtgctgttctgccttgcctgtgagctatgtcactcccctcccactcctgaccatattccagacacctgccctaatcctcagcctgctcacttcacttctgcattatatctccaaggcgttggtatatggaaaaagatgtaggggcttggaggtgttctggacagtggggagggctccagacccaacctggtcacagaagagcctctcccccatgcatactcatccacctccctcccctagagctattctcctttgggtttcttgctgcttcaattttatacaaccattatttaaatattattaaacacatattgttctct

SEQ ID NO: 4245 - DNA, 1092 bp, Homo sapiens
ccctgagcagaaggctctggtgattggtggagaggcttgtatgtggggagaatatgtggacaacacaaacctggtccccaggctctggtaagggttttcgggggggaggtggagggttgggcctgagagcaggagttctcccttagagacccaatcccatctagccacctctggactagtacccttctttcaggcctgagagagagcaggccgtgcaacgagccttctgaagatttgtgtgcaatattcactctccacatgacttccgtctatatccctccagctgccctttggtatgtgggatagggattgttaaccttacttcccagagagataatgaggcctggagaacataggtgagttgctcaagacccagcacaagcatccatgattcctgtaataaggcttccctctgctgttttcactgcagccttaccaagtatggttgggtgtgcaaagtttacattttaaggacctctgctgctgccactgtcattgtggttaatgatggctttaaggtttattcttattcccatatctttgagagaggaagagagtgggattgctacccacattttaatgaaggtggagctgagccgtagaactctctgggagccatccaacctggctgtggctcataacaaggtattgatcacttcctttggcctgagtgagtccagggtgcctagacaagaggtagcagcctgtggatgtccagcacctttgcagggaatacagggcccaatctggcacatgccccttttcctccaggcccagagcaggggctgttgccgaaaggctgtggagcaacaagttgacatctgacctgacatttgcctatgaacgtttgtcacacttccgctgtgaattgctgaggtaagcaagctgtggggccttcgcaaggcggagcaggccagatccagggctggggaaccccttagagagaggaagacaataattaacaatagctaacacttacagaggcttatagtcagccctcatccacggattcaaccaactgcgataaaaagtattcaggaaaaaaaaaatacaacaaaaaatggtacaaataaaaaatactgtataacaact

SEQ ID NO: 4246 - DNA, 2820 bp, Homo sapiens
ccagaaaggggcaggctgaggctgggggaggggctcaagggagcccagctgggagggcccaggcaggcagtgcggagctggccgtgggctgcctaccctttcatctctgcaactccttcctccctgggcctcccttctggagaagggccagagaatgtcgtcccagccagcagggaaccagacctcccccggggccacagaggactactcctatggcagctggtacatcgatgagccccaggggggcgaggagctccagccagagggggaagtgccctcctgccacaccagcataccacccggcctgtaccacgcctgcctggcctcgctgtcaatccttgtgctgctgctcctggccatgctggtgaggcgccgccagctctggcctgactgtgtgcgtggcaggcccggcctgcccagccctgtggatttcttggctggggacaggccccgggcagtgcctgctgctgttttcatggtcctcctgagctccctgtgtttgctgctccccgacgaggacgcattgcccttcctgactctcgcctcagcacccagccaagatgggaaaactgaggctccaagaggggcctggaagatactgggactgttctattatgctgccctctactaccctctggctgcctgtgccacggctggccacacagctgcacacctgctcggcagcacgctgtcctgggcccaccttggggtccaggtctggcagagggcagagtgtccccaggtgcccaagatctacaagtactactccctgctggcctccctgcctctcctgctgggcctcggattcctgagcctttggtaccctgtgcagctggtgagaagcttcagccgtaggacaggagcaggctccaaggggctgcagagcagctactctgaggaatatctgaggaacctcctttgcaggaagaagctgggaagcagctaccacacctccaagcatggcttcctgtcctgggcccgcgtctgcttgagacactgcatctacactccacagccaggattccatctcccgctgaagctggtgctttcagctacactgacagggacggccatttaccaggtggccctgctgctgctggtgggcgtggtacccactatccagaaggtgagggcaggggtcaccacggatgtctcctacctgctggccagctttggaatcgtgctctccgaggacaagcaggaggtggtggagctggtgaagcaccatctgtgggctctggaagtgtgctacatctcagccttggtcttgtcctgcttactcaccttcctggtcctgatgcgctcactggtgacacacaggaccaaccttcgagctctgcaccgaggagctgccctggacttgagtcccttgcatcggagtccccatccctcccgccaagccatattctgttggatgagcttcagtgcctaccagacagcctttatctgccttgggctcctggtgcagcagatcatcttcttcctgggaaccacggccctggccttcctggtgctcatgcctgtgctccatggcaggaacctcctgctcttccgttccctggagtcctcgtggcccttctggctgactttggccctggctgtgatcctgcagaacatggcagcccattgggtcttcctggagactcatgatggacacccacagctgaccaaccggcgagtgctctatgcagccacctttcttctcttccccctcaatgtgctggtgggtgccatggtggccacctggcgagtgctcctctctgccctctacaacgccatccaccttggccagatggacctcagcctgctgccaccgagagccgccactctcgaccccggctactacacgtaccgaaacttcttgaagattgaagtcagccagtcgcatccagccatgacagccttctgctccctgctcctgcaagcgcagagcctcctacccaggaccatggcagccccccaggacagcctcagaccaggggaggaagacgaagggatgcagctgctacagacaaaggactccatggccaagggagctaggcccggggccagccgcggcagggctcgctggggtctggcctacacgctgctgcacaacccaaccctgcaggtcttccgcaagacggccctgttgggtgccaatggtgcccagccctgagggcagggaaggtcaacccacctgcccatctgtgctgaggcatgttcctgcctaccatcctcctccctccccggctctcctcccagcatcacaccagccatgcagccagcaggtcctccggatcactgtggttgggtggaggtctgtctgcactgggagcctcaggagggctctgctccacccacttggctatgggagagccagcaggggttctggagaaaaaaactggtgggttagggccttggtccaggagccagttgagccagggcagccacatccaggcgtctccctaccctggctctgccatcagccttgaagggcctcgatgaagccttctctggaaccactccagcccagctccacctcagccttggccttcacgctgtggaagcagccaaggcacttcctcaccccctcagcgccacggacctctctggggagtggccggaaagctcccgggcctctggcctgcagggcagcccaagtcatgactcagaccaggtcccacactgagctgcccacactcgagagccagatatttttgtagtttttatgcctttggctattatgaaagaggttagtgtgttccctgcaataaacttgttcctgagaaaaaaaaaaaaaaaaaaaaaaaaaaaaaaaaaaaaaaaaaaaaaaaaaaa

SEQ ID NO: 4247 - protein, 667 aa, Homo sapiens
MSSQPAGNQTSPGATEDYSYGSWYIDEPQGGEELQPEGEVPSCHTSIPPGLYHACLASLSILVLLLLAMLVRRRQLWPDCVRGRPGLPSPVDFLAGDRPRAVPAAVFMVLLSSLCLLLPDEDALPFLTLASAPSQDGKTEAPRGAWKILGLFYYAALYYPLAACATAGHTAAHLLGSTLSWAHLGVQVWQRAECPQVPKIYKYYSLLASLPLLLGLGFLSLWYPVQLVRSFSRRTGAGSKGLQSSYSEEYLRNLLCRKKLGSSYHTSKHGFLSWARVCLRHCIYTPQPGFHLPLKLVLSATLTGTAIYQVALLLLVGVVPTIQKVRAGVTTDVSYLLASFGIVLSEDKQEVVELVKHHLWALEVCYISALVLSCLLTFLVLMRSLVTHRTNLRALHRGAALDLSPLHRSPHPSRQAIFCWMSFSAYQTAFICLGLLVQQIIFFLGTTALAFLVLMPVLHGRNLLLFRSLESSWPFWLTLALAVILQNMAAHWVFLETHDGHPQLTNRRVLYAATFLLFPLNVLVGAMVATWRVLLSALYNAIHLGQMDLSLLPPRAATLDPGYYTYRNFLKIEVSQSHPAMTAFCSLLLQAQSLLPRTMAAPQDSLRPGEEDEGMQLLQTKDSMAKGARPGASRGRARWGLAYTLLHNPTLQVFRKTALLGANGAQP

SEQ ID NO: 4248 - DNA, 1772 bp, Homo sapiens
ggcacgaggggcgctggggccctgggcagcgcgggctcgatgtgtgtcagccaagtagctggtcccactggagcggtgaggtcgccaccggatagtgttcctgccccattactagcgatctgtgaccttgggccagtgattttactgagtcttgcttccctcatctttaaaatgtggctaatgcctgccttagggaaccgttgtgaggattaagtgagacatggtatataaaacgacctccttctggcataaacttgaggtggaagataccttgaggatgcttgaaggtctgctaggcagcttcacagccttttctttcctcttctctatcagaggtctctttggaagcaataatgatgactataacaagaacttatcttgctttgcaagattcttccgccgtcagagtttctgatttattttctggggttccatgtatgccagggagaaagagagagcgcgaaagagagaggatgtctctctcagactggcacctggcggtgaagctggctgaccagccacttactccaaagtctattcttcggttgccagagacagaactgggagaatactcgctagggggctatagtatttcatttctgaagcagcttattgctggcaaactccaggagtctgttccagaccctgagctgattgatctgatctactgtggtcggaagctaaaagatgaccagacacttgacttctatggcattcaacctgggtccactgtccatgttctgcgaaagtcctggcctgaacctgatcagaaaccggaacctgtggacaaagtggctgccatgagagagttccgggtgttgcacactgccctgcacagcagctcctcttacagggaggcggtctttaagatgctcagcaataaggagtctctggatcagatcattgtggccaccccaggcctcagcagtgaccctattgctcttggggttctccaggacaaggacctcttctctgtcttcgctgatcccaatatgcttgatacgttggtgcctgctcacccagccctcgtcaatgccattgtcctggttctgcactccgtagcaggcagtgccccaatgcctgggactgactcctcttcccggagcatgccctccagctcataccgggatatgccaggtggcttcctgtttgaagggctctcagatgatgaggatgactttcacccaaacaccaggtccacaccctctagcagtactcccagctcccgcccagcctccctggggtacagtggagctgctgggccccggcccatcacccagagtgagctggccaccgccttggccctggccagcactccggagagcagctctcacacaccgactcctggcacccagggtcattcctcagggacctcaccaatgtcctctggtgtccagtcagggacgcccatcaccaatgatctcttcagccaagccctacagcatgcccttcaggcctctgggcagcccagccttcagagccagtggcagccccagctgcagcagctacgtgacatgggcatccaggacgatgagctgagcctgcgggccctgcaggccaccggtggggacatccaagcagccctggagctcatctttgctggaggagccccatgaactccctgcttcccctgaacccccagcaagttgcagaggctactgcccttgggaggcactcatgaaggtgcctccatctctcccttccccaatatacctgatggtcaactctcaaaaaaaaaaaaaaaaaaaaaaaaaaaaaaaaaaaaaaaaaaa

SEQ ID NO: 4249 - protein, 380 aa, Homo sapiens
MSLSDWHLAVKLADQPLTPKSILRLPETELGEYSLGGYSISFLKQLIAGKLQESVPDPELIDLIYCGRKLKDDQTLDFYGIQPGSTVHVLRKSWPEPDQKPEPVDKVAAMREFRVLHTALHSSSSYREAVFKMLSNKESLDQIIVATPGLSSDPIALGVLQDKDLFSVFADPNMLDTLVPAHPALVNAIVLVLHSVAGSAPMPGTDSSSRSMPSSSYRDMPGGFLFEGLSDDEDDFHPNTRSTPSSSTPSSRPASLGYSGAAGPRPITQSELATALALASTPESSSHTPTPGTQGHSSGTSPMSSGVQSGTPITNDLFSQALQHALQASGQPSLQSQWQPQLQQLRDMGIQDDELSLRALQATGGDIQAALELIFAGGAP

SEQ ID NO: 4250 - DNA, 1333 bp, Homo sapiens
ggcgggacgcgcacgctcacagtgaggtctcaaaagatccccacctcagttttctcatctggaaagtggggcctcgtaatcctgtccgacccggcgcgggacagtaggtgtcagggattttggtgaccccacgctcgaggcctctgcaaaagggggctgtccagtggcccagagacgcagccggcggggcttttgtctagcgggggagtcttaactgagaggccacgcaggccggcaggaagccgctccacaggagggggctcaaggagaggggatctcctccctccagactccggccccgccagagtagctctagggtatcttcccagaaactgccccgcacgcactggcgagctgggagcgccaccacggctttcaaaaaacccgcacacaccaagataataatgtgtcgttcgctcgtttcgcgcaagcggagtcgcgtccgccttcccgagctccggcacacagacctcaggccgctctcgcgctctccggggccccgagaacaatgcccgtcctctccgcgcgcaggagggagttggcggaccacgcggggtcggggcgacggagcgggcccagccccacggccaggtcggggccccacctctcggctctgagagcccagccggcccgggccgcgcacctgtcaggtcgggggacctacgtgcgccgcgacacggcgggaggcgggccgggccaggctcgtcccctcggccctcccggaactagtctcctaggccgcggcgcccgccggagcggagagggctggtgccccggagccttcgagtcgggggctagagcggccaggcctccgagccgggtcgagccgaggctggcgacggctgcgtcacgcgagggggcggggctgccacgggcggaggtcgcagccggaagcggaagaggcgctcggagcggggagtggggcctagctgcagccggagcctgggagacgccatgaccgcctgccctaccagaggaggtaccgggagcgccgtgacagcgatacataccggtgtgaagagcggagcccatcctttggagaggactactatggaccttcacgttctcgtcatcgtcggcgatcgcgggagagggggccataccggacccgcaagcatgcccaccactgccacaaacgccgcaccaggtcttgtagcagcgcctcctcgagaagccaacagagcagtaagcgcagcagccggagtgtggaagatgacaaggagggtcacctggtgtgccggatcggcgattggctccaagagcgatatgagattgtggggaacctgggtgaaggcacctttggcaaggtggtggagtgcttggaccatgccag

SEQ ID NO: 4251 - DNA, 360 bp, Homo sapiens
atgtataatatatctaactgtgggtcacagccccctcccacgaccgtccacaaaccagtagcctcccttcgctcccacctccgcgccgacgggcctggagctcctccgcacaccacaccaagccgaccactcaacaccagaggacccacagaagaattctctccacgcccacccccacagcatcggccttcaccaccgccgccgctgccggaagcgcccccacgtctccacgccaccaccgtgagtgctcagtgtgggcccccttcctgttattgtgaactgttagccaagatacggcttggtgatgagaagtgcaacatctcttgtaaccccagtgcaccagtccaggggtgtggagag

SEQ ID NO: 4252 - DNA, 3235 bp, Homo sapiens
atggcggctgcgccggccttgaagcactggcgcaccacgctggagcgggtggagaagttcgtgtcgccgctctactttaccgactgtaacctccgcggcaggctttttggggccagctgccctgtggctgtgctctccagcttcctgacgccggagagacttccctaccaggaggcagtccagcgggacttccgccccgcgcaggtcggcgacagcttcggacccacatggtggacctgctggttccgggtggagctgaccatcccagaggcatgggtgggccaggaagttcacctttgctgggaaagtgatggagaaggtctggtgtggcgtgatggagaacctgtccagggtttaaccaaagagggtgagaagaccagctatgtcctgactgacaggctgggggaaagagacccccgaagcctcactctctatgtggaagtagcctgcaatgggctcctgggggccgggaagggaagcatgattgcagcccctgaccctgagaagatgttccagctgagccgggctgagctagctgtgttccaccgggatgtccacatgctcctggtggatctggagctgctgctgggcatagccaagggcctcgggaaggacaaccagcgcagcttccaggccctgtacacagccaatcagatggtgaacgtgtgtgaccctgcccagcccgagaccttcccagtggcccaggccctggcctccaggttctttggccaacatgggggtgaaagccaacacaccattcatgccacagggcactgccacattgatacagcctggctttggcccttcaaagagactgtgaggaaatgtgcccggagctgggtgaccgccctgcagctcatggagcggaaccctgagttcatctttgcctgctcccaggcgcagcagctggaatgggtgaagagccgctaccctggcctgtactcccgcatccaggagtttgcgtgccgtgggcagtttgtgcctgtggggggcacctgggtggagatggatgggaacctgcccagtggagaggccatggtgaggcagtttttgcagggccagaacttctttctgcaggagtttgggaagatgtgctctgagttctggctgccggacacctttggctactcagcacagctcccccagatcatgcacggctgtggcatcaggcgctttctcacccagaaattgagctggaatttggtgaactccttcccacaccatacatttttctgggagggcctggatggctcccgtgtactggtccacttcccacctggcgactcctatgggatgcagggcagcgtggaggaggtgctgaagaccgtggccaacaaccgggacaaggggcgggccaaccacagtgccttcctctttggctttggggatgggggtggtggccccacccagaccatgctggaccgcctgaagcgcctgagcaatacggatgggctgcccagggtgcagctatcttctccaagacagctcttctcagcactggagagtgactcagagcagctgtgcacgtgggttggggagctcttcttggagctgcacaatggcacatacaccacccatgcccagatcaagaaggggaaccgggaatgtgagcggatcctgcacgacgtggagctgctcagtagcctggccctggcccgcagtgcccagttcctatacccagcagcccagctgcagcacctctggaggctccttcttctgaaccagttccatgatgtggtgactggaagctgcatccagatggtggcagaggaagccatgtgccattatgaagacatccgttcccatggcaatacactgctcagcgctgcagccgcagccctgtgtgctggggagccaggtcctgagggcctcctcatcgtcaacacactgccctggaagcggatcgaagtgatggccctgcccaaaccgggcggggcccacagcctagccctggtgacagtgcccagcatgggctatgctcctgttcctccccccacctcactgcagcccctgctgccccagcagcctgtgttcgtagtgcaagagactgatggctccgtgactctggacaatggcatcatccgagtgaagctggacccaactggtcgcctgacgtccttggtcctggtggcctctggcagggaggccattgctgagggcgccgtggggaaccagtttgtgctatttgatgatgtccccttgtactgggatgcatgggacgtcatggactaccacctggagacacggaagcctgtgctgggccaggcagggaccctggcagtgggcaccgagggcggcctgcggggcagcgcctggttcttgctacagatcagccccaacagtcggcttagccaggaggttgtgctggatgttggctgcccctatgtccgcttccacaccgaggtacactggcatgaggcccacaagttcctgaaggtggagttccctgctcgcgtgcggagttcccaggccacctatgagatccagtttgggcacctgcagcgacctacccactacaatacctcttgggactgggctcgatttgaggtgtgggcccatcgctggatggatctgtcagaacacggctttgggctggccctgctcaacgactgcaagtatggcgcgtcagtgcgaggcagcatcctcagcctctcgctcttgcgggcgcctaaagccccggacgctactgctgacacggggcgccacgagttcacctatgcactgatgccgcacaagggctctttccaggatgctggcgttatccaagctgcctacagcctaaacttccccctgttggctctgccagcccccagcccagcgcccgccacctcctggagtgcgttttccgtgtcttcacccgcggtcgtattggagaccgtcaagcaggcggagagcagcccccagcgccgctcgctggtcctgaggctgtatgaggcccacggcagccacgtggactgctggctgcacttgtcgctgccggttcaggaggccatcctctgcgatctcttggagcgaccagaccctgctggccacttgacccttcgggacaaccgcctgaagctcaccttttctcccttccaagtgctgtccctgttgctcgtgcttcagcctccgccacactgagtccctggggctggggttttgtttgtagaaggctctggggactcctaatttctgcttccccagcctaaagcagggatcagtcttttcttgtggaataaatccttggatcggg

SEQ ID NO: 4253 - protein, 578 aa, Homo sapiens
MGVVAPPRPMLDRLKRLSNTDGLPRVQLSSPRQLFSALESDSEQLCTWVGELFLELHNGTYTTHAQIKKGNRECERILHDVELLSSLALARSAQFLYPAAQLQHLWRLLLLNQFHDVVTGSCIQMVAEEAMCHYEDIRSHGNTLLSAAAAALCAGEPGPEGLLIVNTLPWKRIEVMALPKPGGAHSLALVTVPSMGYAPVPPPTSLQPLLPQQPVFVVQETDGSVTLDNGIIRVKLDPTGRLTSLVLVASGREAIAEGAVGNQFVLFDDVPLYWDAWDVMDYHLETRKPVLGQAGTLAVGTEGGLRGSAWFLLQISPNSRLSQEVVLDVGCPYVRFHTEVHWHEAHKFLKVEFPARVRSSQATYEIQFGHLQRPTHYNTSWDWARFEVWAHRWMDLSEHGFGLALLNDCKYGASVRGSILSLSLLRAPKAPDATADTGRHEFTYALMPHKGSFQDAGVIQAAYSLNFPLLALPAPSPAPATSWSAFSVSSPAVVLETVKQAESSPQRRSLVLRLYEAHGSHVDCWLHLSLPVQEAILCDLLERPDPAGHLTLRDNRLKLTFSPFQVLSLLLVLQPPPH

SEQ ID NO: 4254 - DNA, 1149 bp, Homo sapiens
gtaacttggctccgggggctccgctcgcctgcccccacgccgcccgccacccaggaccgcgccgccggcctctgccgcgaacaaacccttctgacggccctcgctgtgcaggccaggatgcctctcccccatccgcccccgctgcggaaagttaagtttgaagaggggggaagaggggaacatggacatgaagaggaggatccacctggagctgaggaactggaccccgtcagctgttcgagaacttgtcttggacaattgcaaatcaaatgatggaaaaattgagggcttaacagctgaatttgtgaacttagagttccttagtttaataaatgtaggcttgatctcagtttcaaatcttcccaagctgcctaaattgaaaaagcttgaactcagtgaaaatagaatctttggaggtctggacatgttagctgaaaagcttccaaatctcacacgtctaaacttaagtggaaataaactgaaagatatcagcaccttggaacctttgaaaaagttagaatgtctgaaaagcctggacctctttaactgtgaggttactaacatgaatgactactgagagtgtcttcaagctcctgccccagcttacctacatggatggctatgaccaagaggaccaggaggaacctgactcagatgctgaggtggatggtgtggatgaagagtaggagggcgaagaagaagacgaagaagacgaggaggatgaagatggtgaagaagaggagtttgatgaagaagatgattaagaccccagatgacctgcagaaacagaactgtttagtatcggttggactgctcatggatttggtagctgttaaaaaaaaaaaaaaaaaggtagctgatacaaaccccaggacacccacccacccaaagagccaaagaatagttcctgtgacattccgtcttcctccatgtagtccctcttggtaatctaccaatctaccatcgagcttagggacttcaccccaacaaaattgtaagtgttgttaggtttttgtgtgagactcttgctgtagcgtagatagctgtgattggtgagtcaaccatctgtggctaccagttacactgggactgtaacagcatttttactttctgtacaacaaaaatctttgtaaataaaatcttaacatt

SEQ ID NO: 4255 - protein, 131 aa, Homo sapiens [sequence omitted]

SEQ ID NO: 4256 - DNA, 1456 bp, Homo sapiens
gagcggcgcccgctcgagagaagtggggccgagatcgcgccgtcccagcccgcccgccggcgtctgcgctgctccggcgcccttacccctgctggcccttgcaaggcgcgaccggcggccatgcagccccggggctgaggccgccccatggcaaagccggcggtcccggcgacgacggcgcatggagaacttccgtaaggtgcgctccgaagaggcgccagcggggtgcggggccgagggaggcggcccgggctccggccccttcgcagacctggcgccgggcgcggtgcacatgcgggtcaaggaaggcagcaagatccggaacctgatggccttcgccaccgccagcatggcgcagccagccacgcgcgccatcgtcttcagcggctgcggccgggccaccaccaaaaccgtcacgtgcgccgagatcctcaagcgccgcctggcgggcctgcaccaggtcacgcggctgcgctaccggagcgtacgcgaggtgtggcagagcctcccgcctgggcccacgcagggtcagacgcctggcgagccggccgctagtctcagcgtacttaagaacgtgcccggcctcgccatcctactttccaaggacgcgctggatccgcgacagcccggctaccagcccccgaatccccatcctggtccctcgtccccgccagccgcgccagcgtccaagaggagcctaggggaacccgcagctggagaaggctccgcgaagcgatcgcaacccgagccaggggttgcggacgaggatcagacggcctgaaactccggactgtgggccacctagtccggcaggatcttccgccagcgcctccaccttcagatgtacctccagcctttcactcctcggtcctccggagcccacaacctggacacagctcctcaagacaggtagcatggaccttaaggcgacaagagaggggccccaggagtggcaggagaggatccccgaccaccctagggaaacttcgtgcgataattgctgcttatgcccgtgttgcgtgaagacacggaacttcaccttttctgggaccttctttgggggagaatggtggacagtgggattctggaaacttgtttgggacccccaagggttaaagccacccagcattcacgaagagcacctgaagtatggaagctgagaagagttattggaatcacccccaccgttgacagaggaaggcagggggtgagaattaactgcttgagggtaggagagtctgagatgtgggggccctattccgctccccgccctgggacagttttcctttctagttttctttcccctgcttcagaggagcatctctgagggttctagctcttttaacaccccttttccccctgctggcccagagggagacccaggactgaactctccaggcctcctcccctgagccctgcagctggctggagtcttgcttccaataaaacaagcaca

SEQ ID NO: 4257 - DNA, 3750 bp, Homo sapiens
ggcagctaggagggttgctccgggcttggtgctcactgcgacttcccgcgcagggcccggtcggactaggacccgcggcctgagagacgctggaggatgcggacgcggaggccgcctggggtagcggcggcgggagtcctggcgctctgcaggtcagaagttgagtagcaggggcctaggagggctcgaagccttcacagcgatggcagagaagcgacccctgagaaccctggggcctgtgatgtatggcaagctgccccgcttagagacagactccgggctcgagcacagcctgccccactctgttggtaaccaggatccctgcacctacaaggggtcctacttctcctgccccatggcaggtactcctaaggccgagtctgagcagttggcgtcctggaccccatacccacccttgtactctaccggtatggcaggacccccacttcaggcagacaacctgctgaccaactgcctgttctaccgctcgccagcagaaggccctgagaagatgcaggactccagccctgttgagctcctgcccttcagtccccaggctcactcctacccaggcccaccactggcagcacccaaacctgtctaccgcaaccctctgtgctatgggctctcaacttgtctgggggaaggagcagtgaagaggccactggatgttgactggactctggcgactgggcccctgttgccctcagctgacccaccctgctctctggccccagctcctagcaagggccagactctggatggcaccttcttgcggggggtgccagctgaggggtccagtaaagactcctcagggagcttctccccatgccagcccttcctggagaaatatcagaccatccacagcacgggcttcctggcctccaggtacacaggtccttaccctaggaactccaagcaagcaatgtctgaggggccctcaagtccttggacccagctggcccagcccctggggccaccctgtcaggacaccgggcccacccactacccaccaccccaccacccaccaccccacccttcacaggccctgccttgccctccagcctgtcgccacccagagaagcagggcagctacagcccagcactcccactgcagcctctggggggccacaaggggaccgggtaccaggctggtgggctgggcagcccctacctgaggcagcaggcagcccaggcaccttacattcccccactggggctggacgcttacccctacccctctgcccctctcccagcaccctctccaggcctcaagctggagccgcctctcactccacggtgcccattggactttgccccccagacactgagttttccttatgcccgggatgacctctctctctatggagcatcccctgggcttggagggacaccaccttcccagaacaatgtgcgggctgtgccacagcctggtgccttccagagggcatgccagcctttgccagcgagccagccctgctcagagcctgtgaggcctgcacaggaagccgaagagaagacctggctgcccagctgcaggaaagagaagctccagccccggctcagtgagcactctgggccgcccatcgtcatccgagacagtccagttccctgtacccccccagcactgcccccctgtgcccgggagtgccagtctcttccacagaaggagggcgcaaggccacccagctctccaccaatgcctgtcattgacaatgtcttcagcctggccccctaccgtgactatctggatgtgccggcacccgaggccacaactgagcctgactctgccacagctgagcctgactcagccccagccaccagtgaaggtcaggacaaaggctgcagggggaccctgcctgcccaggagggcccctcagggagtaaacccctaaggggctcacttaaggaggaggtagccctggatttgagtgtgaggaagcccacagcagaggcctcccctgtcaaggcttcccgttctgtggagcatgccaagcctactgcagccatggatgtgccagatgtgggcaacatggtgtcagatctgccaggcctgaaaaagatagacacagaagcaccaggcttgcctggggtgccagtgaccacagatgccatgccaaggaccaacttccacagctctgtggccttcatgttccgaaagttcaagatcctccgtccggcacctttgcctgcagccgtggtcccgtccacgcccacctcagctcctgctcccacacagcctgcacccacccccacatctgggcccattggactgcggattctcgctcaacagcccttgtctgtgacctgcttcagcctggcactgcccagccctccagccgtagctgtggcctcccctgcccctgctccagctccatcccctgctccggctcgagctcaggctccagcttcagcccgggatccagctccagctccagctccagttgcaggccctgctccagcatctacttcagccccaggggactccctggagcagcattttacaggactacatgcgtccctgtgtgatgctatttctggctccgtcgcccactctcctccagagaagcttcgcgagtggctagagacggctgggccctggggccaggctgcgtggcaggactgccagggtgtgcaggggctgctggccaagctgctgtctcagctgcagcgcttcgatcgcacccaccggtgccccttcccccatgtggtgcgagctggcgccatcttcgtgcccattcacctggtgaaggagcggctcttccctcggctgccacccgcttctgtggaccatgtgctgcaggagcatcgtgtggagctgcggcccaccacgctgtcggaggagcgggcactgcgggagctcgccctgccaggctgcacctcacgcatgctgaagttactggcgctgcgccagctgccggacatttaccccgaccttctcggcctgcagtggcgcgactgtgtacgccgccagctgggtgactttgacactgaggctggagctgtgtcctcctcagagcccactgtggccagaggtgagccagagagcctagccctggctcagaagtcaccggcccccaaggtcaggaagccaggcaggaagccaccaacccctggcccggagaaagcagaggcagctgctggggaagagtcctgtggtgcctcccctacccctgctaccagtgccagcccacctggccccacactgaaggcccgcttccgcagtctgctggagaccgcctggctcaatggcctggctctgcccacctggggccacaagtcctcaagaccagaccagccctcaccctgcccacagctgctggacagccagagccatcacctgtagcactggttgccagtgctgtgtgtatagcagtcactctccacccttcccttctgcctgcccagctgccccggggccacgagtggatgctggggctgtggctgctcccctggaggggttccatctctgaccctgtggcccattcagggtgggctgaagagcccctgagcttttaacgtgagggtctttattggataggactactccctatttcttgcctagagaacacacatgggctttggagcccgacagacctgggcttgaatcccggctcgtgttcttgctgcaggacctgggcaagaaacttcacctctgctgagccctcattccccatgtgtaaaatgggacaacgcaacctacctcacagggttgttgtggggatgctgcctgatacataccctgtcacc

SEQ ID NO: 4258 - protein, 445 aa, Homo sapiens
MDVPDVGNMVSDLPGLKKIDTEAPGLPGVPVTTDAMPRTNFHSSVAFMFRKFKILRPAPLPAAVVPSTPTSAPAPTQPAPTPTSGPIGLRILAQQPLSVTCFSLALPSPPAVAVASPAPAPAPSPAPARAQAPASARDPAPAPAPVAGPAPASTSAPGDSLEQHFTGLHASLCDAISGSVAHSPPEKLREWLETAGPWGQAAWQDCQGVQGLLAKLLSQLQRFDRTHRCPFPHVVRAGAIFVPIHLVKERLFPRLPPASVDHVLQEHRVELRPTTLSEERALRELALPGCTSRMLKLLALRQLPDIYPDLLGLQWRDCVRRQLGDFDTEAGAVSSSEPTVARGEPESLALAQKSPAPKVRKPGRKPPTPGPEKAEAAAGEESCGASPTPATSASPPGPTLKARFRSLLETAWLNGLALPTWGHKSSRPDQPSPCPQLLDSQSHHL

SEQ ID NO: 4259 - DNA, 3020 bp, Homo sapiens
gtcctcccgcgggtccgagggcgctggaaacccagcggcggcgaagcggagaggagccccgcgcgtctccgcccgcacggctccaggtctggggtctgcgctggagccgcgcggggagaggccgtctctgcgaccgccgcgcccgctcccgaccgtccgggtccgcggccagcccggccaccagccatgggctctggcccgctctcgctgcccctggcgctgtcgccgccgcggctgctgctgctgctgctgctgtctctgctgccagtggccagggcctcagaggctgagcaccgtctatttgagcggctgtttgaagattacaatgagatcatccggcctgtagccaacgtgtctgacccagtcatcatccatttcgaggtgtccatgtctcagctggtgaaggtggatgaagtaaaccagatcatggagaccaacctgtggctcaagcaaatctggaatgactacaagctgaagtggaacccctctgactatggtggggcagagttcatgcgtgtccctgcacagaagatctggaagccagacattgtgctgtataacaatgctgttggggatttccaggtggacgacaagaccaaagccttactcaagtacactggggaggtgacttggatacctccggccatctttaagagctcctgtaaaatcgacgtgacctacttcccgtttgattaccaaaactgtaccatgaagttcggttcctggtcctacgataaggcgaaaatcgatctggtcctgatcggctcttccatgaacctcaaggactattgggagagcggcgagtgggccatcatcaaagccccaggctacaaacacgacatcaagtacaactgctgcgaggagatctaccccgacatcacatactcgctgtacatccggcgcctgcccttgttctacaccatcaacctcatcatcccctgcctgctcatctccttcctcactgtgctcgtcttctacctgccctccgactgcggtgagaaggtgaccctgtgcatttctgtcctcctctccctgacggtgtttctcctggtgatcactgagaccatcccttccacctcgctggtcatccccctgattggagagtacctcctgttcaccatgatttttgtaaccttgtccatcgtcatcaccgtcttcgtgctcaacgtgcactacagaaccccgacgacacacacaatgccctcatgggtgaagactgtattcttgaacctgctccccagggtcatgttcatgaccaggccaacaagcaacgagggcaacgctcagaagccgaggcccctctacggtgccgagctctcaaatctgaattgcttcagccgcgcagagtccaaaggctgcaaggagggctacccctgccaggacgggatgtgtggttactgccaccaccgcaggataaaaatctccaatttcagtgctaacctcacgagaagctctagttctgaatctgttgatgctgtgctgtccctctctgctttgtcaccagaaatcaaagaagccatccaaagtgtcaagtatattgctgaaaatatgaaagcacaaaatgaagccaaagagattcaagatgattggaagtatgttgccatggtgattgatcgtatttttctgtgggttttcaccctggtgtgcattctagggacagcaggattgtttctgcaacccctgatggccagggaagatgcataagcactaagctgtgtgcctgcctgggagacttccttgtgtcagggcaggaggaggctgcttcctagtaagaacgtactttctgttatcaagctaccagctttgtttttggcatttcgaggtttacttattttccacttatcttggaatcatgcaaaaaaaaaaatgtcaagagtatttattaccgataaatgaacatttaactagcctttttggtatggtaaagagatgtcaaaatgtgattctatgtgattagtatgctatgctatggaatatacatgtaaaaatgtttccttttagttgttgaaacaaaactggatagaaaaatgctgttcagaaatatgaaaagtcattcagttatcactacagatctcccagtaatttttcttatttagcccataatctctttgaaggtttatactaattcagcaatcccccatcgttacccatttcttaccatgcatttctcgttctttactgggtctaaagggctatgcctccatttcagagagcttcaactacttctcttgcatacttctaaattatactatgagaaatcatgcctagttattcattgttaatataactgtcttagtacaccataaactgggtggattataaacaacagaaacttctcagttttggaggttgggaggtccaaggtcaaggcaccagcaaatttggtgtctggtgagggtcctcttcctcaaagggtgccttctagctgtgtcctcacatgactgaagggactagctatctctgtggggtctattttataagggcactaaccccattcatgagagcagagcccccatggcctaatcacctttccaaggccccaccttctatctaagacaatcacgctgggaataggtttcaacatatgaattgggggaggacacatttggaccacagcatgaacctttagaacagggtttctcagccttagcactacggacattttgggctggataaatatgtgttggtacagaatgggggtatcctgtgcattgtaggatctttagcagtaccctagcctcaactcactagatgccaatgacataccttgcttcttcaccagttatgataaccaagaatgtctccattgttaaatgtccccttaggagcaaaattgcccctggttgagaaacattgctttagacaaattgttaagagtatcatgtactacacttctgaaacttaacgtgatcatcaccactgacagatgattcacagagagagactgtttgaatcttgtctcactagtttttcctgtgcaaaaataaaatggacagaattgcaaaaaaaaaaaaaaaaaa

SEQ ID NO: 4260 - protein, 505 aa, Homo sapiens
MGSGPLSLPLALSPPRLLLLLLLSLLPVARASEAEHRLFERLFEDYNEIIRPVANVSDPVIIHFEVSMSQLVKVDEVNQIMETNLWLKQIWNDYKLKWNPSDYGGAEFMRVPAQKIWKPDIVLYNNAVGDFQVDDKTKALLKYTGEVTWIPPAIFKSSCKIDVTYFPFDYQNCTMKFGSWSYDKAKIDLVLIGSSMNLKDYWESGEWAIIKAPGYKHDIKYNCCEEIYPDITYSLYIRRLPLFYTINLIIPCLLISFLTVLVFYLPSDCGEKVTLCISVLLSLTVFLLVITETIPSTSLVIPLIGEYLLFTMIFVTLSIVITVFVLNVHYRTPTTHTMPSWVKTVFLNLLPRVMFMTRPTSNEGNAQKPRPLYGAELSNLNCFSRAESKGCKEGYPCQDGMCGYCHHRRIKISNFSANLTRSSSSESVDAVLSLSALSPEIKEAIQSVKYIAENMKAQNEAKEIQDDWKYVAMVIDRIFLWVFTLVCILGTAGLFLQPLMAREDA

SEQ ID NO: 4261 - DNA, 1189 bp, Homo sapiens
gcgcatgcgcgggggccatattagcagcggttattcggtgagcggtggtggtttattcttccgcggagttaagggctccgtggacatctcaggtcttcagggtcttccatctggaactatataaagttcagaaaacatgtctcgaagatatgactccaggaccactatattttctccagaaggtcgcttataccaagttgaatatgccatggaagctattggacatgcaggcacctgtttgggaattttagcaaatgatggtgttttgcttgcagcagagagacgcaacatccacaagcttcttgatgaagtctttttttctgaaaaaatttataaactcaatgaggacatggcttgcagtgtggcaggcataacttctgatgctaatgttctgactaatgaactaaggctcattgctcaaaggtatttattacagtatcaggagccaataccttgtgagcagttggttacagcgctgtgtgatatcaaacaagcttatacacaatttggaggaaaacgtccctttggtgtttcattgctgtacattggctgggataagcactatggctttcagctctatcagagtgaccctagtggaaattacgggggatggaaggccacatgcattggaaataatagcgctgcagctgtgtcaatgttgaaacaagactataaagaaggagaaatgaccttgaagtcagcacttgctttagctatcaaagtactaaataagaccatggatgttagtaaactctctgctgaaaaagtggaaattgcaacactaacaagagagaatggaaagacagtaatcagagttctcaaacaaaaagaagtggagcagttgatcaaaaaacacgaggaagaagaagccaaagctgagcgtgagaagaaagaaaaagaacagaaagaaaaggataaatagaatcagagattttattactcatttggggcaccatttcagtgtaaaagcagtcctactcttccacactaggaaggctttactttttttaactggtgcagtgggaaaataggacattacatactgaattgggtccttgtcatttctgtccaattgaatactttattgtaacgatgatggttacccttcatggacgtcttaatcttccacacacatcccctttttttggaataaaatttgaaaaaaaaaaaaaaaaaaaaaaaaaaaaaa

SEQ ID NO: 4262 - protein, 261 aa, Homo sapiens
MSRRYDSRTTIFSPEGRLYQVEYAMEAIGHAGTCLGILANDGVLLAAERRNIHKLLDEVFFSEKIYKLNEDMACSVAGITSDANVLTNELRLIAQRYLLQYQEPIPCEQLVTALCDIKQAYTQFGGKRPFGVSLLYIGWDKHYGFQLYQSDPSGNYGGWKATCIGNNSAAAVSMLKQDYKEGEMTLKSALALAIKVLNKTMDVSKLSAEKVEIATLTRENGKTVIRVLKQKEVEQLIKKHEEEEAKAEREKKEKEQKEKDK

SEQ ID NO: 4263 - DNA, 387 bp, Homo sapiens
atggttaaccccactgtgttttttgacatcgccgtcgatggcgagcccttgggccacgtctccttcgagctgcttgcagacaagtttccaaagacagcagaaaactttcatgctctgagcactggagagaaaggatttgaattatcagagtttatgtgtcagggtggtgacttcacatgccataatggcactggtggcaagtccatctatggggagaaatttgatgatgagaacttcatcctaaagcatacagtggtggatggcaagcatgtggtctttggcaaggtgaaagaaggcatgaatattgtggaggccacggagcgctttgagtccaggaatggcaagaccaggaagaagatcaccattgctgactgtggacaactctaa

SEQ ID NO: 4264 - protein, 128 aa, Homo sapiens
MVNPTVFFDIAVDGEPLGHVSFELLADKFPKTAENFHALSTGEKGFELSEFMCQGGDFTCHNGTGGKSIYGEKFDDENFILKHTVVDGKHVVFGKVKEGMNIVEATERFESRNGKTRKKITIADCGQL

SEQ ID NO: 4265 - DNA, 1486 bp, Homo sapiens
agtgcgcgccggccgggcaaccctatgctggcgtaatcgggttcctccgagccgccgtaggactggttccggcgggctggtgaggaatggagccggtaggctgctgcggcgagtgccgcggctcctccgtagacccgcggagcaccttcgtgttgagtaacctggcggaggtggtggagcgtgtgctcaccttcctgcccgccaaggcgttgctgcgggtggcctgcgtgtgccgcttatggagggagtgtgtgcgcagagtattgcggacccatcggagcgtaacctggatctccgcaggcctggcggaggccggccacctggaggggcattgcttggttcgcgtggtagcagaggagcttgagaatgttcgcatcttaccacatacagttctttacatggctgattcagaaactttcattagtctggaagagtgtcgtggccataagagagcaaggaaaagaactagtatggaaacagcacttgcccttgagaagctattccccaaacaatgccaagtccttgggattgtgaccccaggaattgtagtgactccaatgggatcaggtagcaatcgacctcaggaaatagaaattggagaatctggttttgctttattattccctcaaattgaaggaataaaaatacaaccctttcattttattaaggatccaaagaatttaacattagaaagacatcaactcactgaagtaggtcttttagataaccctgaacttcgtgtggtccttgtctttggttataattgctgtaaggtgggagccagtaattatctgcagcaagtagtcagcactttcagtgatatgaatatcatcttggctggaggccaggtggacaacctgtcatcactgacttctgaaaagtatgtcttgtgtgcttctgatttcgtctgtgaatgaagggaaatggtctcaggttttgtcactttggggttaacaatttaaaaaacgtgtttaaagaattattaagataatagttcattccattttgtagtagacattggctaaggggcttactgaacataattctgcttacggttgaataattacatttttatatatattgtccttcaagaacttccttgagtcacattctccttaaaatttgacattgcctgttgatctttcctttgacagatgtggtactctgtgtgacctcaatgtgtcacctcctttctagtttcctcctttaaaggaaacacatggttagagtgtatctttatggcaaaacttctcagagcttctaatatgcccggtgctgtggaaatctggaaggagaatagcattacctgtgacagttcccaaatctgtttggtcacaaaacttttttccacagaatgtcttgcaagtcgtactggtttttggaaattctgtattagatcttttgaaaggctttttcaagcttaaaaattgtggatcttttttgttactaaggcttttgctttcaaagataaaaatatttgctcttc

SEQ ID NO: 4266 - protein, 276 aa, Homo sapiens
MEPVGCCGECRGSSVDPRSTFVLSNLAEVVERVLTFLPAKALLRVACVCRLWRECVRRVLRTHRSVTWISAGLAEAGHLEGHCLVRVVAEELENVRILPHTVLYMADSETFISLEECRGHKRARKRTSMETALALEKLFPKQCQVLGIVTPGIVVTPMGSGSNRPQEIEIGESGFALLFPQIEGIKIQPFHFIKDPKNLTLERHQLTEVGLLDNPELRVVLVFGYNCCKVGASNYLQQVVSTFSDMNIILAGGQVDNLSSLTSEKYVLCASDFVCE

SEQ ID NO: 4267 - DNA, 1266 bp, Homo sapiens
atgttccgagcggcggctccggggcagctccggcgggcggcctcattgctacgatttcagagtaccctggtaatagctgagcatgcaaatgattccctagcacccattactttaaataccattactgcagccacacgccttggaggtgaagtgtcctgcttagtagctggaaccaaatgtgacaaggtggcacaagatctctgtaaagtagcaggcatagcaaaagttctggtggctcagcatgatgtgtacaaaggcctacttccagaggaactgacaccattgattttggcaactcagaagcagttcaattacacacacatctgtgctggagcatctgccttcggaaagaaccttttgcccagagtagcagccaaacttgaggttgccccgatttctgacatcattgcaatcaagtcacctgacacatttgtgagaactatttatgcaggaaatgctctatgtacagtgaagtgtgatgagaaagtgaaagtgttttctgtccgtggaacatcctttgatgctgcagcaacaagtggcggtagtgccagttcagaaaaggcatcaagtacttcaccagtggaaatatcagagtggcttgaccagaaattaacaaaaagtgatcgaccagagctaacaggtgccaaagtggtggtatctggtggtcgaggcttgaagagtggagagaactttaagttgttatatgacttggcagatcaactacatgctgcagttggtgcttcccgtgctgctgttgatgctggctttgttcccaatgacatgcaagttggacagacgggaaaaatagtagcaccagaactttatattgctgttggaatatctggagccatccaacatttagctgggatgaaagacagcaagacaattgtggcaattaataaagacccagaagctccaattttccaagtggcagattatggaatagttgcagatttatttaaggtagttcctgaaatgactgagatattgaagaaaaaatgaatcaggatcatgccttaaaaagaaaacttttgttaaagtattccactgaaatcacagatatttgtgggtattataacaatcattggaaagcatggagagctacatttcataatttgagggaaaatttctaacagatgccagaatgcttgtttatgggattgctgtgtttccttttaattatttgtggttccaaacaattattgtttgaacttttttaattctgtactaaaatctataataaagcttttccacagctttaaaact

SEQ ID NO: 4268 - protein, 333 aa, Homo sapiens
MFRAAAPGQLRRAASLLRFQSTLVIAEHANDSLAPITLNTITAATRLGGEVSCLVAGTKCDKVAQDLCKVAGIAKVLVAQHDVYKGLLPEELTPLILATQKQFNYTHICAGASAFGKNLLPRVAAKLEVAPISDIIAIKSPDTFVRTIYAGNALCTVKCDEKVKVFSVRGTSFDAAATSGGSASSEKASSTSPVEISEWLDQKLTKSDRPELTGAKVVVSGGRGLKSGENFKLLYDLADQLHAAVGASRAAVDAGFVPNDMQVGQTGKIVAPELYIAVGISGAIQHLAGMKDSKTIVAINKDPEAPIFQVADYGIVADLFKVVPEMTEILKKK

SEQ ID NO: 4269 - DNA, 1704 bp, Homo sapiens
  unsure 297: unknown base
gcagccggcccgggcccccgccagcctccctcctcgcgtccctcggtgtcctccgcgggccggcgcgatgcggctgggcccgaggaccgcggcgttggggctgctgctgctgtgcgccgccgcggccggcgccggcaaggccgaggagctgcactacccgctgggcgagcgccgcagcgactacgaccgcgaggcgctgctgggcgtccaggaagatgtggatgaatatgttaaactcggccacgaagagcagcaaaaaagactgcaggcgatcataaagaaaatcgacttggactncagatggctttctcactgaaagtgaactcagttcatggattcagatgtcttttaagcattatgctatgcaagaagcaaaacaacagtttgttgaatatgataaaaacagtgatgatactgtgacttgggatgaatataacattcagatgtatgatcgtgtgattgactttgatgagaacactgctctggatgatgcagaagaggagtcctttaggaagcttcacttaaaggacaagaagcgatttgaaaaagctaaccaggattcaggtcccggtttgagtcttgaagaatttattgcttttgagcatcctgaagaagttgattatatgacggaatttgtcattcaagaagctttagaagaacatgacaaaaatggtgatggatttgttagtttggaagaatttcttggtgattacaggtgggatccaactgcaaatgaagatccagaatggatacttgttgagaaagacagattcgtgaatgattatgacaaagataacgatggcaggcttgatccccaagagctgttaccttgggtagtacctaataatcagggcattgcacaagaggaggcgcttcatctaattgatgaaatggatttgaatggtgacaaaaagctctctgaagaagagattctggaaaacccggacttgtttctcaccagtgaagccacagattatggcagacagctccatgatgactatttctatcatgatgagctttaatctctgagcctgtctcagtagagtactggctccttttataatttgttaccagctttacttttgtgataaaatattgatgttgtattttacactcttaagtcttaaccacagtcagaattatcttaatgtagattataattttggtcttttaggaaaaaaaaacaaaaatctgatatttatttcaaaatgtattgaagcaacaaaatattaatattgtgccatatgacaacaaagtctttcctaaatactccatctgtttagtactgtattgtggaatatttgagttctatttccatacttgaaaacatggaggattttagagatgcctgaacaatattatttaagtagtatgtgaccgagctataaatttttgtttttgttctaagtagatttaatttgggaactgacaggacaatgtttttaggtttagcattttgtttaaaaacctttaaagaaacctttagaaggacttagacctcacatattaatgttgagaagttctgcttaattttaaaatggtttctataaagggttttattgtatgaaatagaactttatatttttgcatatgtatagatagtaattatatttaatgtataactatagcattatggtgagtggaatttgacattgtccaaacctttttcatttttgagtgattaaaaatgaaatgtcctttgta

SEQ ID NO: 4270 - DNA, 1205 bp, Homo sapiens
gagcccgtcttccgacgtgcagcctggcagtgcagtgagctgtctggccttttgtccttgatccttggttaaggaaatgaccaaccagtacggtattctcttcaaacaagagcaagcccatgatgatgccatttggtcagttgcttgggggacgaacaagaaggaaaactctgagacagtggtcacaggctccctagatgacctggtgaaggtctggaaatggcgtgatgagaggctggacctacagtggagtctggagggacatcagctgggagtggtgtctgtggacatcagccacaccctgcccattgctgcatccagctctcttgatgctcatattcgtctttgggacttggaaaatggcaaacagataaagtccatagatgcaggacctgtggatgcctggactttggccttttctcctgattcccagtatctggccacaggaactcatgtcgggaaagtgaacatttttggtgtggaaagtgggaaaaaggaatattctttggacacgagaggaaaattcattcttagtattgcatatagtcctgatgggaaatacctagccagtggagccatagatggaatcatcaatatttttgatattgcaactggaaaacttctgcataccctggaaggccatgccatgcccattcgctccttgaccttttccccggactcccagctccttgtcactgcttcagatgatggctacatcaagatctatgatgtacaacatgccaatttggctggcacgctgagcggccatgcctcctgggtgctgaacgttgcattctgtcctgatgacactcactttgtttccagttcgtctgacaaaagtgtaaaagtttgggatgttggaacgaggacttgtgttcacaccttctttgatcaccaggatcaggtctggggagtaaaatacaatggaaatggttcaaaaattgtgtctgttggagatgaccaggaaattcacatctatgattgtccaatttaaacatcaaagtctccaggcttatgctgcaaagagaatgtacggattgatcatgacattccttaccttcttaggcttgtttaaaagaaatatagcatttattgtagcaaagacttaaattttgtagatacaatatgaatcttttcatgttttattggaaatgctgttcatactttaacataaagctttcttaatgcaaaaaaaaaaaaaaaaa

SEQ ID NO: 4271 - protein, 305 aa, Homo sapiens
MTNQYGILFKQEQAHDDAIWSVAWGTNKKENSETVVTGSLDDLVKVWKWRDERLDLQWSLEGHQLGVVSVDISHTLPIAASSSLDAHIRLWDLENGKQIKSIDAGPVDAWTLAFSPDSQYLATGTHVGKVNIFGVESGKKEYSLDTRGKFILSIAYSPDGKYLASGAIDGIINIFDIATGKLLHTLEGHAMPIRSLTFSPDSQLLVTASDDGYIKIYDVQHANLAGTLSGHASWVLNVAFCPDDTHFVSSSSDKSVKVWDVGTRTCVHTFFDHQDQVWGVKYNGNGSKIVSVGDDQEIHIYDCPI

SEQ ID NO: 4272 - DNA, 1369 bp, Homo sapiens
gtgcagggacttcacagcccacacgggctacgaggtgctgctgcagcggcttctggatggcaggaagatgtgcaaagacatggaggagctactgaggcagagggcccaggcggaggagcggtacgggaaggagctggtgcagatcgcacggaaggcaggtggccagacggagatcaactccctgagggcctcctttgactccttgaagcagcaaatggagaatgtgggcagctcacacatccagctggccctgaccctgcgtgaggagctgcggagtctcgaggagtttcgtgagaggcagaaggagcagaggaagaagtatgaggccgtcatggaccgggtccagaagagcaagctgtcgctctacaagaaggccatggagtccaagaagacatacgagcagaagtgccgggacgcggacgacgcggagcaggccttcgagcgcattagcgccaacggccaccagaagcaggtggagaagagtcagaacaaagccaggcagtgcaaggactcggccaccgaggcagagcgggtatacaggcagagcattgcgcagctggagaaggtccgggctgagtgggagcaggagcaccggaccacctgtgaggcctttcagctgcaagagtttgaccggctgaccattctccgcaacgccctgtgggtgcacagcaaccagctctccatgcagtgtgtcaaggatgatgagctctacgaggaagtgcggctgacgctggaaggctgcagcatagacgccgacatcgacagtttcatccaggccaagagcacgggcacagagccccccgctccggtgccctaccagaactattacgatcgggaggtcaccccgctgaccagcagccctggcatacagccgtcctgcggcatgataaagaggttctctggactgctgcacggaagtcccaagaccacttcgttggcagcttctgctgcgtccacagagaccctgacccccacccccgagcggaatgagggtgtctacacagccatcgcagtgcaggagatacagggaaacccggcctcaccagcccaggagtaccgggcgctctacgattatacagcgcagaacccagatgagctggacctgtccgcgggagacatcctggaggtgatcctggaaggggaggatggctggtggactgtggagaggaacgggcagcgtggcttcgtccctggttcctacctggagaagctttgaggaagggccaggagccccttcggacctgccctgccagtggagccagcagtgcccccagcactgtccccaccttgctagggcccagaaccaagcgtcccccagccccgagagggagcctgtcgtctcccagggaataaaggagtgcgttctgtt

SEQ ID NO: 4273 - DNA, 1842 bp, Homo sapiens
gttgccagggagcggcgcgggagccctgaggggactgcggcggctgcgcggaggagcgaggcgcttgctggggtcggggctgcgcgacggcgcaggggctgcggggagcgccgcgcaggccgtgcagttcctagcgaggaggcgccgccgccattgccgctctctcggtgagcgcagccccgctctccgggccgggccttcgcgggccaccggcgccatgggccagtgcggcatcacctcctccaagaccgtgctggtctttctcaacctcatcttctggggggcagctggcattttatgctatgtgggagcctatgtcttcatcacttatgatgactatgaccacttctttgaagatgtgtacacgctcatccctgctgtagtgatcatagctgtaggagccctgcttttcatcattgggctaattggctgctgtgccacaatccgggaaagtcgctgtggacttgccacgtttgtcatcatcctgctcttggtttttgtcacagaagttgttgtagtggttttgggatatgtttacagagcaaaggtggaaaatgaggttgatcgcagcattcagaaagtgtataagacctacaatggaaccaaccctgatgctgctagccgggctattgattatgtacagagacagctgcattgttgtggaattcacaactactcagactgggaaaatacagattggttcaaagaaaccaaaaaccagagtgtccctcttagctgctgcagagagactgccagcaattgtaatggcagcctggcccacccttccgacctctatgctgaggggtgtgaggctctagttgtgaagaagctacaagaaatcatgatgcatgtgatctgggccgcactggcatttgcagctattcagctgctgggcatgctgtgtgcttgcatcgtgttgtgcagaaggagtagagatcctgcttacgagctcctcatcactggcggaacctatgcatagttgacaactcaagcctgagctttttggtcttgttctgatttggaaggtgaattgagcaggtctgctgctgttggcctctggagttcatttagttaaagcacatgtacactggtgttggacagagcagcttggcttttcatgtgcccacctacttacctactacctgcgactttctttttccttgttctagctgactcttcatgcccctaagattttaagtacgatggtgaacgttctaatttcagaaccaattgcgagtcatgtagtgtggtagaattaaaggaggacacgagcctgcttctgttacctccaagtggtaacaggactgatgccgaaatgtcaccaggtcctttcagtcttcacagtggagaactcttggccaaaggtttttggggggaggaggaggaaaccagctttctggttaaggttaacaccagatggtgcccctcattggtgtccttttaaaaaatatttactgtagtccaataagatagcagctgtacaaaatgactaaaatagattgtaggatcatatggcgtatatcttggttcatcttcaaaatcagagactgagctttgaaactagtggtttttaatcaaagttggctttataggaggagtataatgtatgcactactgttttaaaagaattagtgtgagtgtgtttttgtatgaatgagcccattcatggtaagtcttaagcttgttggaaataatgtacccatgtagactagcaaaatagtatgtagatgtgatctcagttgtaaatagaaaaatctaattcaataaactctgtatcagcccccaacatattatttttcattatttgggggatatttcagttccaaaaaaaaaaaaaaaaaa

SEQ ID NO: 4274 - protein, 253 aa, Homo sapiens
MGQCGITSSKTVLVFLNLIFWGAAGILCYVGAYVFITYDDYDHFFEDVYTLIPAVVIIAVGALLFIIGLIGCCATIRESRCGLATFVIILLLVFVTEVVVVVLGYVYRAKVENEVDRSIQKVYKTYNGTNPDAASRAIDYVQRQLHCCGIHNYSDWENTDWFKETKNQSVPLSCCRETASNCNGSLAHPSDLYAEGCEALVVKKLQEIMMHVIWAALAFAAIQLLGMLCACIVLCRRSRDPAYELLITGGTYA

SEQ ID NO: 4275 - DNA, 704 bp, Homo sapiens
ctttctttgctgcgtctactgcgagaatgaagactattctcagcaatcagactgtcgacattccagaaaatgtcgacattactctgaagggacgcacagttatcgtgaagggccccagaggaaccctgcggagggacttcaatcacatcaatgtagaactcagccttcttggaaagaaaaaaaagaggctccgggttgacaaatggtggggtaacagaaaggaactggctaccgttcggactatttgtagtcatgtacagaacatgatcaagggtgttacactgggcttccgttacaagatgaggtctgtgtatgctcacttccccatcaacgttgttatccaggagaatgggtctcttgttgaaatccgaaatttcttgggtgaaaaatacatccgcagggttcggatgagaccaggtgttgcttgttcagtatctcaagcccagaaagatgaattaatccttgaaggaaatgacattgagcttgtttcaaattcagcggctttgattcagcaagccacaacagttaaaaacaaggatatcaggaaatttttggatggtatctatgtctctgaaaaaggaactgttcagcaggctgatgaataagatctaagagttacctggctacagaaagaagatgccagatgacacttaagacctacttgtgatatttaaatgatgcaataaaagacctattgatttgga

SEQ ID NO: 4276 - protein, 192 aa, Homo sapiens [sequence omitted]

SEQ ID NO: 4277 - DNA, 1432 bp, Homo sapiens
cccttacatcctcctaggacccggtcggtagtcgtcgccccagcccgccgggggcgcagcgcccgagccgcggccctcgagacgggaccgagagcatcatgggcagcactgtcccgcgctccgcctccgtgctgcttctgctgctgctcctgcgccgggccgagcagccctgcggggccgagctcaccttcgagctgccggacaacgccaagcagtgcttccacgaggaggtggagcagggcgtgaagttctccctggattaccaggtcatcactggaggccactacgatgttgactgctatgtagaggacccccaggggaacaccatctacagagaaacgaagaagcagtacgacagcttcacgtaccgggctgaagtcaagggcgtttatcagttttgcttcagtaatgagttttccaccttctctcacaagaccgtctactttgactttcaagtgggcgatgagcctcccattctcccagacatggggaacagggtcacagctctcacccagatggagtccgcctgcgtgaccatccatgaggctctgaaaacggtgattgactcccagacgcattaccggctgcgggaggcccaggaccgggcccgagcggaagaccttaatagccgagtctcttactggtctgttggcgagacgattgccctgttcgtggtcagcttcagtcaggtgctactgttgaaaagcttcttcacagaaaaacgacccatcagcagggcagtccactcctagccccggcatcctgctctagggcccctcatgccccaggctggagcagctctcctaggtcacagcctgctgggctgggtcgcgtagcccagggtggaggcagaacgatgctgctgtggtagccctttgcctttcatgcccatgcttgattcttgcacctcagcagctgaaggtctcagagaccagtaatcagaaggcatccgactgcattaagtgtgcagcgctgaaaagacatttacaactaggccagggattagccactgtgggagggtggacaggcaatggttcagtggcctggctgttggcaggaactccaagtgcccaggcctcttgggcagcttagggccctgcctctgtttcatgatgcatgggtcatttgtcttgggtgtcctatcccatatggagaagaaaggggctctaagttctggctcttctttctttggggttctctgtacctgaggaaaccaggccctgggtgactttgcagatctgctcaccctcggtgagcaacagtgtcagccatgcaagcaggacagaatggtgactgggtgcccttggtgagctgtgtatttcctaggaggtagaaaactgtgggaaactgtggctaataaaaactaagtgtgagcgtcaaaaaaaaaaaaaaaaaaaaaaaaaaaaaaaaaaaaaaaaaaaaaaaaaaaaaa

SEQ ID NO: 4278 - DNA, 1392 bp, Homo sapiens
gcgcaagagccaagccgccagcgctgcgatgtgggccacgctgccgctgctctgcgccggggcctggctcctgggagtccccgtctgcggtgccgccgaactgtgcgtgaactccttagagaagtttcacttcaagtcatggatgtctaagcaccgtaagacctacagtacggaggagtaccaccacaggctgcagacgtttgccagcaactggaggaagataaacgcccacaacaatgggaaccacacatttaaaatggcactgaaccaattttcagacatgagctttgctgaaataaaacacaagtatctctggtcagagcctcagaattgctcagccaccaaaagtaactaccttcgaggtactggtccctacccaccttccgtggactggcggaaaaaaggaaattttgtctcacctgtgaaaaatcagggtgcctgcggcagttgctggactttctccaccactggggccctggagtctgcgatcgccatcgcaaccggaaagatgctgtccttggcggaacagcagctggtggactgcgcccaggacttcaataatcacggctgccaagggggtctccccagccaggctttcgagtatatcctgtacaacaaggggatcatgggtgaagacacctacccctaccagggcaaggatggttattgcaagttccaacctggaaaggccatcggctttgtcaaggatgtagccaacatcacaatctatgacgaggaagcgatggtggaggctgtggccctctacaaccctgtgagctttgcctttgaggtgactcaggacttcatgatgtatagaaccggcatctactccagtacttcctgccataaaactccagataaagtaaaccatgcagtactggctgttgggtatggagaaaaaaatgggatcccttactggatcgtgaaaaactcttggggtccccagtggggaatgaacgggtacttcctcatcgagcgcggaaagaacatgtgtggcctggctgcctgcgcctcctaccccatccctctggtgtgagccgtggcagccgcagcgcagactggcggagaaggagaggaacgggcagcctgggcctgggtggaaatcctgccctggaggaagttgtggggagatccactgggacccccaacattctgccctcacctctgtgcccagcctggaaacctacagacaaggaggagttccaccatgagctcacccgtgtctatgacgcaaagatcaccagccatgtgccttagtgtccttcttaacagactcaaaccacatggaccacgaatattctttctgtccagaagggctactttccacatatagagctccagggactgtcttttctgtattcgctgttcaataaacattgagtgagcacctcc

SEQ ID NO: 4279 - DNA, 1766 bp, Homo sapiens
ggcaaatccggcccaggatgtagagctggcagtgcctgacggcgcgtctgacgcggagttgggtggggtagagagtagggggcggtagtcgggggtggtgggagaaggaggaggcggcgaatcacttataaatggcgccgaagcaggacccgaagcctaaattccaggagggtgagcgagtgctgtgctttcatgggcctcttctttatgaagcaaagtgtgtaaaggttgccataaaggacaaacaagtgaaatacttcatacattacagtggttggaataaaaattgggatgaatgggttccggagagcagagtactcaaatacgtggacaccaatttgcagaaacagcgagaacttcaaaaagccaatcaggagcagtatgcagaggggaagatgagaggggctgccccaggaaagaagacatctggtctgcaacagaaaaatgttgaagtgaaaacgaaaaagaacaaacagaaaacacctggaaatggagatggtggcagtaccagtgagacccctcagcctcctcggaagaaaagggcccgggtagatcctactgttgaaaatgaggaaacattcatgaacagagttgaagttaaagtaaagattcctgaagagctaaaaccgtggcttgttgatgactgggacttaattaccaggcaaaaacagctcttttatcttcctgccaagaagaatgtggattccattcttgaggattatgcaaattacaagaaatctcgtggaaacacagataataaggagtatgcggttaatgaagttgtggcagggataaaagaatacttcaacgtaatgttgggtacccagctactctataaatttgagagaccacagtatgctgaaattcttgcagatcatcccgatgcacccatgtcccaggtgtatggagcgccacatctcctgagattatttgtacgaattggagcaatgttggcttatacacctctggatgagaagagccttgctttattactcaattatcttcacgatttcctaaagtacctggcaaagaattctgcaactttgttcagtgccagcgattatgaagtggctcctcctgagtaccatcggaaagctgtgtgagaggcactctcactcacttatgtttggatctccgtaaacacatttttgttcttagtctatctcttgtacaaacgatgtgctttgaagatgttagtgtataacaattgatgtttgttttctgtttgattttaaacagagaaaaaataaaagggggtaatagctccttttttcttctttctttttttttttcatttcaaaattgctgccagtgttttcaatgatggacaacagagggatatgctgtagagtgttttattgcctagttgacaaagctgcttttgaatgctggtggttctattcctttgacactacgcacttttataatacatgttaatgctatatgacaaaatgctctgattcctagtgccaaaggttcaattcagtgtatataactgaacacactcatccatttgtgcttttgtttttttttatggtgcttaaagtaaagagcccatcctttgcaagtcatccatgttgttacttaggcattttatcttggctcaaattgttgaagaatggtggcttgtttcatggtttttgtatttgtgtctaatgcacgttttaacatgatagacgcaatgcattgtgtagctagttttctggaaaagtcaatcttttaggaattgtttttcagatcttcaataaattttttctttaaatttc

SEQ ID NO: 4280 - protein, 323 aa, Homo sapiens
MAPKQDPKPKFQEGERVLCFHGPLLYEAKCVKVAIKDKQVKYFIHYSGWNKNWDEWVPESRVLKYVDTNLQKQRELQKANQEQYAEGKMRGAAPGKKTSGLQQKNVEVKTKKNKQKTPGNGDGGSTSETPQPPRKKRARVDPTVENEETFMNRVEVKVKIPEELKPWLVDDWDLITRQKQLFYLPAKKNVDSILEDYANYKKSRGNTDNKEYAVNEVVAGIKEYFNVMLGTQLLYKFERPQYAEILADHPDAPMSQVYGAPHLLRLFVRIGAMLAYTPLDEKSLALLLNYLHDFLKYLAKNSATLFSASDYEVAPPEYHRKAV

SEQ ID NO: 4281 - DNA, 549 bp, Homo sapiens
gaaccgccatcttccagtaattcgccaaaatgacgaacacaaagggaaagaggagaggcacccaatatatgttctctaggccttttagaaaacatggagttgttgctttggccacgtatatgcaaatctataagaaaggtgatattgtagacatcaagggaatgggtactgttcaaaaaggaatgccccacaagtgttaccatggcaaaactggaagagtctataatgtcccccagcatgctgttggcattgttgtaaacacacaagttaagggcaagattcttgccaagagaattaatgtgcgtattgagcacattaagcactctaaaagctgagatagtttcctgaaacacatgaaggaaaatgatcagaaaaagaaggaagccaaatagaaaggtacctgggttcaacagaagcaccagcctgctccacccagagaagcacactttgtgagaaccaatgcgaaggagcctgagctgctggaacctattccctatgaattcatggcataacaggtgttaataaataaataaaagacctctgggctgt

SEQ ID NO: 4282 - DNA, 597 bp, Homo sapiens
ctttctttgctgcgtctactgcgagaatgaagactattctcagcaatcagactgtcgacattccagaaaatgtcgacattactctgaagggacgcacagttatcgtgaagggccccagaggaaccctgcggagggacttcaatcacatcaatgtagaactcagccttcttggaaagaaaaaaaagaggctccgggttgacaaatggtggggtaacagaaaggaactggctaccgttcggactatttgtagtcatgtacagaacatgatcaagggtgttacactgggcttccgttacaagatgaggtctgtgtatgctcacttccccatcaacgttgttatccaggagaatgggtctcttgttgaaatccgaaatttcttgggtgaaaaatacatccgcagggttcggatgagaccaggtgttgcttgttcagtatctcaagcccagaaagatgaattaatccttgaaggaaatgacattgagcttgtttcaaattcagcggctttgattcagcaagccacaacagttaaaaacaaggatatcaggaaatttttggatggtatctatgtctctgaaaaagaagatgccagatgacact

SEQ ID NO: 4283 - DNA, 515 bp, Homo sapiens
cctcttttaccaaggacccgccaacatgggccgcgttcgcaccaaaaccgtgaagaaggcggcccgggtcatcatagaaaagtactacacgcgcctgggcaacgacttccacacgaacaagcgcgtgtgcgaggagatcgccattatccccagcaaaaagctccgcaacaagatagcaggttatgtcacgcatctgatgaagcgaattcagagaggcccagtaagaggtatctccatcaagctgcaggaggaggagagagaaaggagagacaattatgttcctgaggtctcagccttggatcaggagattattgaagtagatcctgacactaaggaaatgctgaagcttttggacttcggcagtctgtccaaccttcaggtcactcagcctacagttgggatgaatttcaaaacgcctcggggacctgtttgaattttttctgtagtgctgtattattttcaataaatctgggacaacagcaaaaaaaaaaaaaaaaaaaaaaaaaaaaaaaaaa

SEQ ID NO: 4284 - protein, 135 aa, Homo sapiens [sequence omitted]

SEQ ID NO: 4285 - DNA, 855 bp, Homo sapiens
cagtggcagcatggaacctgcatttcatagaggagatcttctctttctaacaaatcgagttgaagatcccatacgagtgggagaaattgttgtttttaggatagaaggaagagagattcctatagttcaccgagtcttgaagattcatgaaaagcaaaatgggcatatcaagtttttgaccaaaggagataataatgcggttgatgaccgaggcctctataaacaaggacaacattggctagagaaaaaagatgttgtggggagagccaggggatttgttccttatattggaattgtgacgatcctcatgaatgactatcctaaatttaagtatgcagttctctttttgctgggtttattcgtgctggttcatcgtgagtaagaagcctgccttgctgttcctgggaagatgccatagttttcgttactggatgtttggagtagatactggtctgtgattggtggaatggagaacacacgtgttggtgcttctgggtagcactggtttgcattagtttatgtttccatgccagagtttgtgtgggcgggcgcatgtgcaccacagagtgcactcgaggggactttcagtcacaggatttcataattgtcattgtcacactttcaaatttttgtacatcagtgaatttttttatattaaaaggttgagccaaagcccccagtgtttgtattttgaagccaagcttcacttctaaagtgcctacagagacttgtaaatgaaaatgcagctctgcacgagtttgaaaccgtcatacctccttctattaggaatggcatatactgaggtggtcgtaagtcttaacttctaaaattttaaataaaagactttgcacattg

SEQ ID NO: 4286 - DNA, 1291 bp, Homo sapiens
aatccttgcgcttgtaaatcgtacggggctgggacatgggagctgggcctggagcttgcctggcgggcggatgggtgtgggtggaggcacgttggggatcctggtgcagagtgggccagctgtggcctcggggctcgccaccgtggaggactccgcctgggcctaggcccccatctctaggaaatggctccttcctgcgtgcgcgcgttgtgagattactagtaagagccgcgcttgtgaagacgcagtgcccagttagtttgcgccagcctctgagttcagctcagaacacagatgatctcattgattcctcacgtcaaccttgggaaatctgggtaccctgggacgtccacacatgaggaccgaggctcagggacatcaagggactggcctggtcccagaaacagggagtaaaatgggaagtaaactcagtcccacgtctgcctgactccagagtttgggccactgaaccatgcggctgccatcttggagttctttgagctgtgaagtgctgtgcatcgtgtgattctgtgtcccttttgtgcaggtaccaggatttctatgcattcgacctgtcaggagccactcgagtccttgaatggattgatgacaaaggagtctttgttgctggctatgaaagcctgaaaaagaatgaaattcttcatctgaaattacctctcagactttctgtaaaggaaaacaagggcttattcccagaaagagatttcaaagtgcgccatggaggattttcagacaggtctatctttgatctaaagcatgtgccacataccagattgctggttaccagtggccttccaggttgttatctgcaggtgtggcaggttgcagaggacagtggtgagtgaatttgacttgatggggtttggggttctaggaaagtgtgactcatacacccctgtcccctaatctgagccagttaagaaggagactcaggctggggacagtctcatgcctgtaattgtagcactttgggaggctgagctgggtggatcacttgaattcaggagttgaagaccaccttgtacaacatggtgaaacctgtctctattaaaaatacaaaaaattagccgggcatggtggtaggcacctgtaatccctgctactggggagactgaggcaggagaattgcttgaacctgggaggcggaggttacagtgagccgagatcatgccactgcactccagcctgggcaacaagagcaaaactccgtctccaaaaaaaaaagtagtagtagactcagagccaggtgggaattaatctactttaatgc

SEQ ID NO: 4287 - DNA, 2177 bp, Homo sapiens
ccggaagagacacgcggggcttcaggctgctgccccattggaagattactccccaggcttcccttgccccaagcagtgagctgactggaatggtaccccgggaggcccctgagtctgctcagtgcctgtgcccttccctcaccatcccaaatgccaaggatgtgcttcggaagaggcacaagagaaggagccgacagcaccagcggttcatggcccggaaggccttgctgcaggagcaggggctgctgagcatgcctccagaaccagggtcctccccactgcccacccctttcggggcagcgacagcaactgaagctgccagcagtgggaagcagtgtctgagggctggatctggcagtgccccatgcagcagaaggcctgctcccgggaaagcctcagggcccttgcccagcaagtgtgtggctatcgactgtgagatggtgggcacgggaccccgagggcgggtaagcgagctggcccgctgttccattgtgagctaccatggcaatgtcctctatgacaagtacatcaggcctgagatgcccatcgctgactaccgtacccgctggagtggcatcactcggcagcacatgcgcaaggctgtccccttccaggtggcccagaaagagatccttaagctcctgaagggcaaggtggtggtggggcacgcgctgcacaacgacttccaggcgctcaagtatgtccaccctcggagccagacccgggatacgacctatgtcccaaacttcctcagcgagcccggcctccacacccgggcccgggtctctctaaaggacctggccctgcagctgctgcacaagaagatccaggtgggccagcacgggcactcatcagtagaagatgccacgacagccatggagctctaccggctggtggaggtgcagtgggaacagcaggaggcccgcagcctctggacctgccccgaggacagagaacctgacagcagcacagacatggaacagtacatggaggaccatccacccagtactgggctcttaagcaaaagtctgagaaacaagacagtggtttgaattctggggcctttgtgtaggattgtgcctgacctttatttatttattaacagcagggccactcgtctagggcagtggagtctgcgtgtctcctggggctggggcagggcattggcagttacgcagtggccctgaacctggtctggtgcccccgaacctggtctgatgccccctcagctctttgacaatcactgtggctgttgggttttctcctatttctaaaaatgttctcttctttcctaagtgacagttttgaagtattggataaccaagagctcaggtcacacagaccttggagccccatctttgcttgcagcttagctttgagatactaagcaagcgagggacttcactcttgaggctgttttttcctcatctgtaaagtggggatagtggtacggcctacctcatagggttgtaatgagcactaaatgtgaagtgcttggcacagtgcctggcacatggtgagccacagctactgtgagtttctgtttatcccccttttttttttttaagcccattgtttattctttgagaatttgttgtaacttcttcaggataacacctgagtccacaggctgagcagctgtggcccagacagaactgctccggcttggctgttccagcaggtggggcgctggcctcggtgagggcacagcagcaaggttcacggatatccgtgtgtcttgtctgtggccaccaggcacaggtttggcttccggtcagtgtcccgacactgtgcgggaggtgacaacagagcaaagcagcgcaggggtcagggaggtacagacactgctgaaatcacactaccccaccctcagctgaagccccacgttccacaaacttggggtcatagattgtccagtcactggctccctccctgtcagcacagcacagaggaaggggctaactgaatcttttaccacttctggcctggctccagaactttgttctagattccttaaaagtcggtagctgatgtcaaactcaattgagcagtagctttgatcccttggtctgggggtcgaaggaagatggtgctgttatcagcggggaaatgtactatttaagatcagctttgttgtaaaaccatttgttctagaataaaactcaattggaaacgtg

SEQ ID NO: 4288 - protein, 325 aa, Homo sapiens
MVPREAPESAQCLCPSLTIPNAKDVLRKRHKRRSRQHQRFMARKALLQEQGLLSMPPEPGSSPLPTPFGAATATEAASSGKQCLRAGSGSAPCSRRPAPGKASGPLPSKCVAIDCEMVGTGPRGRVSELARCSIVSYHGNVLYDKYIRPEMPIADYRTRWSGITRQHMRKAVPFQVAQKEILKLLKGKVVVGHALHNDFQALKYVHPRSQTRDTTYVPNFLSEPGLHTRARVSLKDLALQLLHKKIQVGQHGHSSVEDATTAMELYRLVEVQWEQQEARSLWTCPEDREPDSSTDMEQYMEDQYWPDDLAHGSRGGAREAQDRRN

SEQ ID NO: 4289 - DNA, 772 bp, Homo sapiens
ccaaatgccaaggatgtgcttcggaagaggcacaagagaaggagccgacagcaccagcggttcatggcccggaaggccttgctgcaggagcaggggctgctgagcatgcctccagaaccagggtcctccccactgcccacccctttcggggcagcgacagcaactgaagctgccagcagtgggaagcagtgtctgagggctggatctggcagtgccccatgcagcagaaggcctgctcccgggaaagcctcagggcccttgcccagcaagtgtgtggctatcgactgtgagatggtgggcacgggaccccgagggcgggtaagcgagctggcccgctgttccattgtgagctaccatggcaatgtcctctatgacaagtacatcaggcctgagatgcccatcgctgactacctcttcctccactcatttgggttcagaataaacatgtcctgaagttaaagaggagttaagtcctaaaggaggcatttcttccccacctccctgacctggaactctggctacagccattgtaggaactccgtgcctggcctgtcagctccctgctaggctacagtggaatagcagagcccacaggcttctcgtggggagttggctccttaacatttcttggcaacagaaagccccaggcacagctcagggaggagggaaggcaggtaagctttggacgagaactggcatatttattttgacccaaatcagggatttccccagtccacccagtactgggctcttaagcaaaagtctgagaaac

SEQ ID NO: 4290 - DNA, 1136 bp, Homo sapiens
agtcccggaactgctagaacgaaccattcgcatatggagggggtgacccaccatctcagaacattaaaaaagggaaagaatcccctggtgaactacagtgaaagtcttattgagcatttaaatggaaataaaaatattcagtggacctaatgaagagtagatgactttcccttctgtcccctccccgacaggcactcatggtaccggcgccggcgcagctgtgactgtcgctgcagacggaaactgactggggtcaattcaagtcatgcaggctgtgagaaacgcggggtcgcggttcctgcggtcctggacttggccccagacagccggcagggtcgtggccagaacgccggccgggaccatctgcacaggcgctcgacagctccaagacgctgcggccaagcagaaagttgaacagaacgcggctcccagccacaccaagttcagcatttaccctcccattccaggagaggagagctctctgaggtgggcaggaaagaaatttgaggagatcccaattgcacacattaaagcatcccacaacaacacacagatccaggtagtctctgctagtaatgagccccttgcctttgcttcctgtggcacagagggatttcggaatgccaagaagggcacaggcatcgcagcacagacagcaggcatagccgcagcggcgagagctaaacaaaagggcgtgatccacatccgagttgtggtgaaaggcctggggccaggacgcttgtctgccatgcacggactgatcatgggcggcctggaagtgatctcaatcacagacaacaccccaatcccacacaacggctgccgccccaggaaggctcggaagctgtgatgggaaggaggcctgcacttggacctgacctcaagcctcagctccagtgggaccttgtaaaatgctccctgtcagagctctccagaatatgcttgttggagatccttcaggcagtaagggagagttttgcctccttacacagtggcctttgcttgcacctccagctggagatgggtgtgccccagaagtaagctttgcatctcttacaagaggggagctacaggggcagccgtggcctaggcccaaactctgctctgagaaaataaatatctgtaccacctgtcaa

SEQ ID NO: 4291 - protein, 194 aa, Homo sapiens
MQAVRNAGSRFLRSWTWPQTAGRVVARTPAGTICTGARQLQDAAAKQKVEQNAAPSHTKFSIYPPIPGEESSLRWAGKKFEEIPIAHIKASHNNTQIQVVSASNEPLAFASCGTEGFRNAKKGTGIAAQTAGIAAAARAKQKGVIHIRVVVKGLGPGRLSAMHGLIMGGLEVISITDNTPIPHNGCRPRKARKL

SEQ ID NO: 4292 - DNA, 3420 bp, Homo sapiens
taatttttgcccagtctgcctgttgtggggctcctcccctttggggatataagcccggcctggggctgctccgttctctgcctggcctgaggctccctgagccgcctccccaccatcaccatggccaagggcttctatatttccaagtccctgggcatcctggggatcctcctgggcgtggcagccgtgtgcacaatcatcgcactgtcagtggtgtactcccaggagaagaacaagaacgccaacagctcccccgtggcctccaccaccccgtccgcctcagccaccaccaaccccgcctcggccaccaccttggaccaaagtaaagcgtggaatcgttaccgcctccccaacacgctgaaacccgattcctaccgggtgacgctgagaccgtacctcacccccaatgacaggggcctgtacgtttttaagggctccagcaccgtccgtttcacctgcaaggaggccactgacgtcatcatcatccacagcaagaagctcaactacaccctcagccagggcacagggtggtcctgcgtggtgtgggaggctcccagccccccgacattgacaagactgagctggtggagcccaccgagtacctggtggtgcacctcaagggctccctggtgaaggacagccagtatgagatggacagcgagttcgagggggagttggcagatgacctggcgggcttctaccgcagcgagtacatggagggcaatgtcagaaaggtggtggccactacacagatgcaggctgcagatgcccggaagtccttcccatgcttcgatgagccggccatgaaggccgagttcaacatcacgcttatccaccccaaggacctgacagccctgtccaacatgcttcccaaaggtcccagcaccccacttccagaagaccccaactggaatgtcactgagttccacaccacgcccaagatgtccacgtacttgctggccttcattgtcagtgagttcgactacgtggagaagcaggcatccaatggtgtcttgatccggatctgggcccggcccagtgccattgcggcgggccacggcgattatgccctgaacgtgacgggccccatccttaacttctttgctggtcattatgacacaccctacccactcccaaaatcagaccagattggcctgccagacttcaacgccggcgccatggagaactggggactggtgacctaccgggagaactccctgctgttcgaccccctgtcctcctccagcagcaacaaggagcgggtggtcactgtgattgctcatgagctggcccaccagtggttcgggaacctggtgaccatagagtggtggaatgacctgtggctgaacgagggcttcgcctcctacgtggagtacctgggtgctgactatgcggagcccacctggaacttgaaagacctcatggtgctgaatgatgtgtaccgcgtgatggcagtggatgcactggcctcctcccacccgctgtccacacccgcctcggagatcaacacgccggcccagatcagtgagctgtttgacgccatctcctacagcaagggcgcctcagtcctcaggatgctctccagcttcctgtccgaggacgtattcaagcagggcctggcgtcctacctccacaccttgctgtgaacaaccggtccatccaactccccaccaccgtgcgggacatcatgaaccgctggaccctgcagatgggcttcccggtcatcacggtggataccagcacggggaccctttcccaggagcacttcctccttgaccccgattccaatgttacccgcccctcagaattcaatggattgtgcccatcacatccatcagagatggcagacagcagcaggactactggctgatagatgtaagagcccagaacgatctcttcagcacatcaggcaatgagtgggtcctgctgaacctcaatgtgacgggctattaccgggtgaactacgacgaagagaactggaggaagattcagactcagctgcagagagaccactcggccatccctgtcatcaatcgggcacagatcattaatgacgccttcaacctggccagtgcccataaggtccctgtcactctggcgctgaacaacaccctcttcctgattgaagagagacagtacatgccctgggaggccgccctgagcagcctgagctacttcaagctcatgtttgaccgctccgaggtctatggccccatgaagaactacctgaagaagcaggtcacacccctcttcattcacttcagaaataataccaacaactggagggagatcccagaaaacctgatggaccagtacagcgaggttaatgccatcagcaccgcctgctccaacggagttccagagtgtgaggagatggtctctggccttttcaagcagtggatggagaaccccaataataacccgatccaccccaacctgcggtccaccgtctactgcaacgctatcgcccagggcggggaggaggagtgggacttcgcctgggagcagttccgaaatgccacactggtcaatgaggctgacaagctccgggcagccctggcctgcagcaaagagttgtggatcctgaacaggtacctgagctacaccctgaacccggacttaatccggaagcaggacgccacctctaccatcatcagcattaccaacaacgtcattgggcaaggtctggtctgggactttgtccagagcaactggaagaagctttttaacgattatggtggtggctcgttctccttctccaacctcatccaggcagtgacacgacgattctccaccgagtatgagctgcagcagctggagcagttcaagaaggacaacgaggaaacaggcttcggctcaggcacccgggccctggagcaagccctggagaagacgaaagccaacatcaagtgggtgaaggagaacaaggaggtggtgctccagtggttcacagaaaacagcaaatagtccccagcccttgaagtcacccggcccccatgcaaggtgcccacatgtgtccatcccagcggctggtgcagggcctccattcctggagcccgaggcaccagtgtcctcccctcaaggacaaagtctccagcccacgttctctctgcctgtgagccagtctagttcctgatgacccaggctgcctgagcacctcccagcccctgcccctcatgccaaccccgccctaggcctggcatggcacctgtcgcccagtgccctggggctgatctcagggaagcccagctccagggccagatgagcagaagctctcgatggacaatgaacggccttgctgggggccgccctgtaccctctttcacctttccctaaagaccctaaatctgaggaatcaacagggcagcagatctgtatatttttttctaagagaaaatgtaaataaaggatttctagatg

SEQ ID NO: 4293 - DNA, 1751 bp, Homo sapiens
ccagcgttagcccgcggccaggcagccgggaggagcggcgcgcgctcggacctctcccgccctgctcgttcgctctccagcttgggatggccggctacctgcgggtcgtgcgctcgctctgcagagcctcaggctcgcggccggcctgggcgccggcggccctgacagcccccacctcgcaagagcatccgcggcgccactatgccgacaaaaggatcaaggtggcgaagcccgtggtggagatggatggtgatgagatgacccgtattatctggcagttcatcaaggagaagctcatcctgccccacgtggacatccagctaaagtattttgacctcgggctcccaaaccgtgaccagactgatgaccaggtcaccattgactctgcactggccacccagaagtacagtgtggctgtcaagtgtgccaccatcacccctgatgaggcccgtgtggaagagttcaagctgaagaagatgtggaaaagtcccaatggaactatccggaacatcctgggggggactgtcttccgggagcccatcatctgcaaaaacatcccacgcctagtccctggctggaccaagcccatcaccattggcaggcacgcccatggcgaccagtacaaggccacagactttgtggcagaccgggccggcactttcaaaatggtcttcaccccaaaagatggcagtggtgtcaaggagtgggaagtgtacaactttcccgcaggcggcgtgggcatgggcatgtacaacaccgacgagtccatctcaggttttgcgcacagctgcttccagtatgccatccagaagaaatggccgctgtacatgagcaccaagaacaccatactgaaagcctacgatgggcgtttcaaggacatcttccaggagatctttgacaagcactataagaccgacttcgacaagaataagatctggtatgagcaccggctcattgatgacatggtggctcaggtcctcaagtcttcgggtggctttgtgtgggcctgcaagaactatgacggagatgtgcagtcagacatcctggcccagggctttggctcccttggcctgatgacgtccgtcctggtctgccctgatgggaagacgattgaggctgaggccgctcatgggaccgtcacccgccactatcgggagcaccagaagggccggcccaccagcaccaaccccatcgccagcatctttgcctggacacgtggcctggagcaccgggggaagctggatgggaaccaagacctcatcaggtttgcccagatgctggagaaggtgtgcgtggagacggtggagagtggagccatgaccaaggacctggcgggctgcattcacggcctcagcaatgtgaagctgaacgagcacttcctgaacaccatggacttcctcgacaccatcaagagcaacctggacagagccctgggcaggcagtagggggaggcgccacccatggctgcagtggaggggccagggctgagccggcgggtcctcctgagcgcggcagagggtgagcctcacagcccctctctggaggcctttctaggggatgtttttttataagccagatgtttttaaaagcatatgtgtgtttcccctcatggtgacgtgaggcaggagcagtgcgttttacctcagccagtcagtatgttttgcatactgtaatttatattgcccttggaacacatggtgccatatttagctactaaaaagctcttcacaaaaaaaaaaacggattccgcg

SEQ ID NO: 4294 - protein, 452 aa, Homo sapiens [sequence omitted]

SEQ ID NO: 4295 - DNA, 1934 bp, Homo sapiens
agaaccccgcggggtctgagcagcccagcgtgcccattccagcgcccgcgtccccgcagcatgccgcgcccccgcctgctggccgcgctgtgcggcgcgctgctctgcgcccccagcctcctcgtcgccctggatatctgttccaaaaacccctgccacaacggtggtttatgcgaggagatttcccaagaagtgcgaggagatgtcttcccctcgtacacctgcacgtgccttaagggctacgcgggcaaccactgtgagacgaaatgtgtcgagccactgggcctggagaatgggaacattgccaactcacagatcgccgcctcgtctgtgcgtgtgaccttcttgggtttgcagcattgggtcccggagctggcccgcctgaaccgcgcaggcatggtcaatgcctggacacccagcagcaatgacgataacccctggatccaggtgaacctgctgcggaggatgtgggtaacaggtgtggtgacgcagggtgccagccgcttggccagtcatgagtacctgaaggccttcaaggtggcctacagccttaatggacacgaattcgatttcatccatgatgttaataaaaaacacaaggagtttgtgggtaactggaacaaaaacgcggtgcatgtcaacctgtttgagacccctgtggaggctcagtacgtgagattgtaccccacgagctgccacacggcctgcactctgcgctttgagctactgggctgtgagctgaacggatgcgccaatcccctgggcctgaagaataacagcatccctgacaagcagatcacggcctccagcagctacaagacctggggcttgcatctcttcagctggaacccctcctatgcacggctggacaagcagggcaacttcaacgcctgggttgcggggagctacggtaacgatcagtggctgcaggtggacctgggctcctcgaaggaggtgacaggcatcatcacccagggggcccgtaactttggctctgtccagtttgtggcatcctacaaggttgcctacagtaatgacagtgcgaactggactgagtaccaggaccccaggactggcagcagtaagatcttccctggcaactgggacaaccactcccacaagaagaacttgtttgagacgcccatcctggctcgctatgtgcgcatcctgcctgtagcctggcacaaccgcatcgccctgcgcctggagctgctgggctgttagtggccacctgccacccccaggtcttcctgctttccatgggcccgctgcctcttggcttctcagcccctttaaatcaccatagggctggggactggggaaggggagggtgttcagaggcagcaccaccacacagtcacccctccctccctctttcccaccctccacctctcacgggccctgccccagcccctaagccccgtcccctaacccccagtcctcactgtcctgttttcttaggcactgagggatctgagtaggtctgggatggacaggaaagggcaaagtagggcgtgtggtttccctgcccctgtccggaccgccgatcccaggtgcgtgtgtctctgtctctcctagcccctctctcacacatcacattcccatggtggcctcaagaaaggcccggaagcgccaggctggagataacagcctcttgcccgtcggccctgcgtcggccctggggtaccatgtggccacaactgctgtggccccctgtccccaagacacttccccttgtctccctggttgcctctcttgccccttgtcctgaagcccagcgacacagaagggggtggggcgggtctatggggagaaagggagcgaggtcagaggagggcatgggttggcagggtgggcgtttggggccctctatgctggcttttcaccccagaggacacaggcagcttccaaaatatatttatcttcttcacggg

SEQ ID NO: 4296 - DNA, 2411 bp, Homo sapiens
ggccgcgcgtcccagagagccagccccggccgccgtcgcggggaagtgccgcctggtggggtcacggcgcctgaagcccacgtgcgccgccgagcccgaggtggcctcgagcgcggcggctgacagcacagcccgcctgagctgcctcccgcgctcctccccgaggaaaggattttgatttcaaagaaaggaaggaaggaaggacaactcccagcttccccgtcccgccctccccgctccgagggccgcgccaggccatgcccaagaaggcggcggcggcggcgaaccagcagaagggactttcctggcagcccggcgacgaggagcgcggacagtgagtttgctctgccccggttcatggttcctgcaagccctctaggaggccgaaagctgcagcccctccccttgccccgaagagccttccgcgttctctcgccctcgggcccaccccgcgccgcccgggctcccgccgccgcagcccagtgccctctgcccgcggcggtggatggcatgatggtgcggggaaggcaccgcggccttggccagctgagtcgcgacggccgccggggcggcggcagtggccgcggcagcggcggtggtagcgggctccccagcggcatgccagtgccccccgggcgcgatggctagcggcagcgccgggaagcccactggcgaggcggcttctccggctcctgcgagcgccatcggcggggccagctcgcagccgcggaagaggctggtatccgtctgcgaccactgcaagggcaagatgcagctggtggctgacctgctgctgctgtcgagcgaggcgcggcccgtgctcttcgagggccccgcctcctctggtgccggcgccgagtccttcgagcagtgccgggacaccatcatcgcgcgcaccaaggggctctccatcctcacccacgacgtgcagagccagctcaacatgggccgcttcggggaggcgggggacagcctggtggagctgggcgacctggtggtgtcgctgaccgagtgctcggcccacgcggcctatctggccgctgtggccacgccgggcgcccagcccgcgcagccgggcctggtggaccgctaccgcgtgacgcgatgccgccacgaggtggagcagggttgcgccgtgctgcgcgccacgccgctggccgacatgacgccgcagctgctgctggaggtgtcgcagggcctgtcgcgcaacctcaagttcctgacggacgcgtgcgccctggccagtgacaagtcacgggaccgcttttcgcgggagcagttcaagctgggcgtcaagtgcatgagcaccagcgcgtcggcgctgctggcctgcgtgcgcgaggtgaaggtggcgcccagtgagctggcgcgcagccgctgtgcgctcttcagcgggcccctggtgcaggcagtgagcgccctggtaggcttcgccaccgagccgcagttcctgggtcgcgcggcagctgtgagcgccgagggcaaggcggtgcagaccgccatcctgggcggcgccatgagcgtggtgtcggcctgcgtgctcctgacccagtgcctcagggatctggcgcagcaccccgacgggggcgccaagatgtcggaccacagggagaggctgaggaactcggcctgcgccgtgtctgaaggctgcaccctgctatctcaggctttaagggagaggtcttcgcccaggactttaccgccagtgaattccaattctgtgaattagcaccccacccccataccccttcttccacccccagactaaaggaagatacttactctctgcccctctccatttataccaaagaaatcataggtgaaaccccctaccctccccaacgttaaatgctcgagaggaatcttccacaaggcagggccatgcacgcaacctgcacacgcacttggagggcccaggtgtctctccaccagcccccatgcagtagggactggaagatatgtcatctgctggttgtgttatcactcccaccccctaccccagcccgtcttccggaatttctcaactaaatttcattattgggcaggaaggaggtcatgggttcatttcatttttgttttttgtgtttttaattaaaagaaaggttacctcagttttcactccttagacatggatgtagctacctttttttgtatgtctttttttttttaagcaatcgtgttgaattaggagtatacttggtgaggaaagagtatgaatttgccatgtgatttgcaaatggggggaagctactgtgagcgtgtgtttttttaatttacactatagagtgattttttttcccccaacgtcaagtttttaccttgcatgtactggagtatttatttcatctattaaaatgttatgtttctcagaaaaaaacctcgtggcgaattcttggcctcgagggccaaat

SEQ ID NO: 4297 - protein, 362 aa, Homo sapiens
MASGSAGKPTGEAASPAPASAIGGASSQPRKRLVSVCDHCKGKMQLVADLLLLSSEARPVLFEGPASSGAGAESFEQCRDTIIARTKGLSILTHDVQSQLNMGRFGEAGDSLVELGDLVVSLTECSAHAAYLAAVATPGAQPAQPGLVDRYRVTRCRHEVEQGCAVLRATPLADMTPQLLLEVSQGLSRNLKFLTDACALASDKSRDRFSREQFKLGVKCMSTSASALLACVREVKVAPSELARSRCALFSGPLVQAVSALVGFATEPQFLGRAAAVSAEGKAVQTAILGGAMSVVSACVLLTQCLRDLAQHPDGGAKMSDHRERLRNSACAVSEGCTLLSQALRERSSPRTLPPVNSNSVN

SEQ ID NO: 4298 - DNA, 7080 bp, Homo sapiens
gagctagcgctcaagcagagcccagcgcggtgctatcggacagagcctggcgagcgcaagcggcgcggggagccagcggggctgagcgcggccagggtctgaacccagatttcccagactagctaccactccgcttgcccacgccccgggagctcgcggcgcctggcggtcagcgaccagacgtccggggccgctgcgctcctggcccgcgaggcgtgacactgtctcggctacagacccagagggagcacactgccaggatgggagctgctgggaggcaggacttcctcttcaaggccatgctgaccatcagctggctcactctgacctgcttccctggggccacatccacagtggctgctgggtgccctgaccagagccctgagttgcaaccctggaaccctggccatgaccaagaccaccatgtgcatatcggccagggcaagacactgctgctcacctcttctgccacggtctattccatccacatctcagagggaggcaagctggtcattaaagaccacgacgagccgattgttttgcgaacccggcacatcctgattgacaacggaggagagctgcatgctgggagtgccctctgccctttccagggcaatttcaccatcattttgtatggaagggctgatgaaggtattcagccggatccttactatggtctgaagtacattggggttggtaaaggaggcgctcttgagttgcatggacagaaaaagctctcctggacatttctgaacaagacccttcacccaggtggcatggcagaaggaggctatttttttgaaaggagctggggccaccgtggagttattgttcatgtcatcgaccccaaatcaggcacagtcatccattctgaccggtttgacacctatagatccaagaaagagagtgaacgtctggtccagtatttgaacgcggtgcccgatggcaggatcctttctgttgcagtgaatgatgaaggttctcgaaatctggatgacatggccaggaaggcgatgaccaaattgggaagcaaacacttcctgcaccttggatttagacacccttggagttttctaactgtgaaaggaaatccatcatcttcagtggaagaccatattgaatatcatggacatcgaggctctgctgctgcccgggtattcaaattgttccagacagagcatggcgaatatttcaatgtttctttgtccagtgagtgggttcaagacgtggagtggacggagtggttcgatcatgataaagtatctcagactaaaggtggggagaaaatttcagacctctggaaagctcacccaggaaaaatatgcaatcgtcccattgatatacaggccactacaatggatggagttaacctcagcaccgaggttgtctacaaaaaaggccaggattataggtttgcttgctacgaccggggcagagcctgccggagctaccgtgtacggttcctctgtgggaagcctgtgaggcccaaactcacagtcaccattgacaccaatgtgaacagcaccattctgaacttggaggataatgtacagtcatggaaacctggagataccctggtcattgccagtactgattactccatgtaccaggcagaagagttccaggtgcttccctgcagatcctgcgcccccaaccaggtcaaagtggcagggaaaccaatgtacctgcacatcggggaggagatagacggcgtggacatgcgggcggaggttgggcttctgagccggaacatcatagtgatgggggagatggaggacaaatgctacccctacagaaaccacatctgcaatttctttgacttcgatacctttgggggccacatcaagtttgctctgggatttaaggcagcacacttggagggcacggagctgaagcatatgggacagcagctggtgggtcagtacccgattcacttccacctggccggtgatgtagacgaaaggggaggttatgacccacccacatacatcagggacctctccatccatcatacattctctcgctgcgtcacagtccatggctccaatggcttgttgatcaaggacgttgtgggctataactctttgggccactgcttcttcacggaagatgggccggaggaacgcaacacttttgaccactgtcttggcctccttgtcaagtctggaaccctcctcccctcggaccgtgacagcaagatgtgcaagatgatcacagaggactcctacccggggtacatccccaagcccaggcaagactgcaatgctgtgtccaccttctggatggccaatcccaacaacaacctcatcaactgtgccgctgcaggatctgaggaaactggattttggtttatttttcaccacgtaccaacgggcccctccgtgggaatgtactccccaggttattcagagcacattccactgggaaaattctataacaaccgagcacattccaactaccgggctggcatgatcatagacaacggagtcaaaaccaccgaggcctctgccaaggacaagcggccgttcctctcaatcatctctgccagatacagccctcaccaggacgccgacccgctgaagccccgggagccggccatcatcagacacttcattgcctacaagaaccaggaccacggggcctggctgcgcggcggggatgtgtggctggacagctgccggtttgctgacaatggcattggcctgaccctggccagtggtggaaccttcccgtatgacgacggctccaagcaagagataaagaacagcttgtttgttggcgagagtggcaacgtggggacggaaatgatggacaataggatctggggccctggcggcttggaccatagcggaaggaccctccctataggccagaattttccaattagaggaattcagttatatgatggccccatcaacatccaaaactgcactttccgaaagtttgtggccctggagggccggcacaccagcgccctggccttccgcctgaataatgcctggcagagctgcccccataacaacgtgaccggcattgcctttgaggacgttccgattacttccagagtgttcttcggagagcctgggccctggttcaaccagctggacatggatggggataagacatctgtgttccatgacgtcgacggctccgtgtccgagtaccctggctcctacctcacgaagaatgacaactggctggtccggcacccagactgcatcaatgttcccgactggagaggggccatttgcagtgggtgctatgcacagatgtacattcaagcctacaagaccagtaacctgcgaatgaagatcatcaagaatgacttccccagccaccctctttacctggagggggcgctcaccaggagcacccattaccagcaataccaaccggttgtcaccctgcagaagggctacaccatccactgggaccagacggcccccgccgaactcgccatctggctcatcaacttcaacaagggcgactggatccgagtggggctctgctacccgcgaggcaccacattctccatcctctcggatgttcacaatcgcctgctgaagcaaacgtccaagacgggcgtcttcgtgaggaccttgcagatggacaaagtggagcagagctaccctggcaggagccactactactgggacgaggactcagggctgttgttcctgaagctgaaagctcagaacgagagagagaagtttgctttctgctccatgaaaggctgtgagaggataaagattaaagctctgattccaaagaacgcaggcgtcagtgactgcacagccacagcttaccccaagttcaccgagagggctgtcgtagacgtgccgatgcccaagaagctctttggttctcagctgaaaacaaaggaccatttcttggaggtgaagatggagagttccaagcagcacttcttccacctctggaacgacttcgcttacattgaagtggatgggaagaagtaccccagttcggaggatggcatccaggtggtggtgattgacgggaaccaagggcgcgtggtgagccacacgagcttcaggaactccattctgcaaggcataccatggcagcttttcaactatgtggcgaccatccctgacaattccatagtgcttatggcatcaaagggaagatacgtctccagaggcccatggaccagagtgctggaaaagcttggggcagacaggggtctcaagttgaaagagcaaatggcattcgttggcttcaaaggcagcttccggcccatctgggtgacactggacactgaggatcacaaagccaaaatcttccaagttgtgcccatccctgtggtgaagaagaagaagttgtgaggacagctgccgcccggtgccacctcgtggtagactatgacggtgactcttggcagcagaccagtgggggatggctgggtcccccagcccctgccagcagctgcctgggaaggccgtgtttcagccctgatgggccaagggaaggctatcagagaccctggtgctgccacctgcccctactcaagtgtctacctggagcccctggggcggtgctggccaatgctggaaacattcactttcctgcagcctcttgggtgcttctctcctatctgtgcctcttcagtgggggtttggggaccatatcaggagacctgggttgtgctgacagcaaagatccactttggcaggagccctgacccagctaggaggtagtctggagggctggtcattcacagatccccatggtcttcagcagacaagtgagggtggtaaatgtaggagaaagagccttggccttaaggaaatctttactcctgtaagcaagagccaacctcacaggattaggagctggggtagaactggctatccttggggaagaggcaagccctgcctctggccgtgtccacctttcaggagactttgagtggcaggtttggacttggactagatgactctcaaaggcccttttagttctgagattccagaaatctgctgcatttcacatggtacctggaacccaacagttcatggatatccactgatatccatgatgctgggtgccccagcgcacacgggatggagaggtgagaactaatgcctagcttgaggggtctgcagtccagtagggcaggcagtcaggtccatgtgcactgcaatgccaggtggagaaatcacagagaggtaaaatggaggccagtgccatttcagaggggaggctcaggaaggcttcttgcttacaggaatgaaggctgggggcattttgctggggggagatgaggcagcctctggaatggctcagggattcagccctccctgccgctgcctgctgaagctggtgactacggggtcgccctttgctcacgtctctctggcccactcatgatggagaagtgtggtcagaggggagcaatgggctttgctgcttatgagcacagaggaattcagtccccaggcagccctgcctctgactccaagagggtgaagtccacagaagtgagctcctgccttagggcctcatttgctcttcatccagggaactgagcacagggggcctccaggagaccctagatgtgctcgtactccctcggcctgggatttcagagctggaaatatagaaaatatctagcccaaagccttcattttaacagatggggaaagtgagcccccaagatgggaaagaaccacacagctaagggagggcctggggagccccaccctagcccttgctgccacaccacattgcctcaacaaccggccccagagtgcccaggcactcctgaggtagcttctggaaatggggacaagtcccctcgaaggaaaggaaatgactagagtagaatgacagctagcagatctcttccctcctgctcccagcgcacacaaacccgccctccccttggtgttggcggtccctgtggccttcactttgttcactacctgtcagcccagcctgggtgcacagtagctgcaactccccattggtgctacctggctctcctgtctctgcagctctacaggtgaggcccagcagagggagtagggctcgccatgtttctggtgagccaatttggctgatcttgggtgtctgaacagctattgggtccaccccagtccctttcagctgctgcttaatgccctgctctctccctggcccaccttatagagagcccaaagagctcctgtaagagggagaactctatctgtggtttataatcttgcacgaggcaccagagtctccctgggtcttgtgatgaactacatttatcccctttcctgccccaaccacaaactctttccttcaaagagggcctgcctggctccctccacccaactgcacccatgagactcggtccaagagtccattccccaggtgggagccaactgtcagggaggtctttcccaccaaacatctttcagctgctgggaggtgaccatagggctctgcttttaaagatatggctgcttcaaaggccagagtcacaggaaggacttcttccagggagattagtggtgatggagaggagagttaaaatgacctcatgtccttcttgtccacggttttgttgagttttcactcttctaatgcaagggtctcacactgtgaaccacttaggatgtgatcactttcaggtggccaggaatgttgaatgtctttggctcagttcatttaaaaaagatatctatttgaaagttctcagagttgtacatatgtttcacagtacaggatctgtacataaaagtttctttcctaaaccattcaccaagagccaatatctaggcattttcttggtagcacaaattttcttattgcttagaaaattgtcctccttgttatttctgtttgtaagacttaagtgagttaggtctttaaggaaagcaacgctcctctgaaatgcttgtcttttttctgttgccgaaatagctggtcctttttcgggagttagatgtatagagtgtttgtatgtaaacatttcttgtaggcatcaccatgaacaaagatatattttctatttatttattatatgtgcacttcaagaagtcactgtcagagaaataaagaattgtcttaaatgtc

SEQ ID NO: 4299 - protein, 1361 aa, Homo sapiens
MGAAGRQDFLFKAMLTISWLTLTCFPGATSTVAAGCPDQSPELQPWNPGHDQDHHVHIGQGKTLLLTSSATVYSIHISEGGKLVIKDHDEPIVLRTRHILIDNGGELHAGSALCPFQGNFTIILYGRADEGIQPDPYYGLKYIGVGKGGALELHGQKKLSWTFLNKTLHPGGMAEGGYFFERSWGHRGVIVHVIDPKSGTVIHSDRFDTYRSKKESERLVQYLNAVPDGRILSVAVNDEGSRNLDDMARKAMTKLGSKHFLHLGFRHPWSFLTVKGNPSSSVEDHIEYHGHRGSAAARVFKLFQTEHGEYFNVSLSSEWVQDVEWTEWFDHDKVSQTKGGEKISDLWKAHPGKICNRPIDIQATTMDGVNLSTEVVYKKGQDYRFACYDRGRACRSYRVRFLCGKPVRPKLTVTIDTNVNSTILNLEDNVQSWKPGDTLVIASTDYSMYQAEEFQVLPCRSCAPNQVKVAGKPMYLHIGEEIDGVDMRAEVGLLSRNIIVMGEMEDKCYPYRNHICNFFDFDTFGGHIKFALGFKAAHLEGTELKHMGQQLVGQYPIHFHLAGDVDERGGYDPPTYIRDLSIHHTFSRCVTVHGSNGLLIKDVVGYNSLGHCFFTEDGPEERNTFDHCLGLLVKSGTLLPSDRDSKMCKMITEDSYPGYIPKPRQDCNAVSTFWMANPNNNLINCAAAGSEETGFWFIFHHVPTGPSVGMYSPGYSEHIPLGKFYNNRAHSNYRAGMIIDNGVKTTEASAKDKRPFLSIISARYSPHQDADPLKPREPAIIRHFIAYKNQDHGAWLRGGDVWLDSCRFADNGIGLTLASGGTFPYDDGSKQEIKNSLFVGESGNVGTEMMDNRIWGPGGLDHSGRTLPIGQNFPIRGIQLYDGPINIQNCTFRKFVALEGRHTSALAFRLNNAWQSCPHNNVTGIAFEDVPITSRVFFGEPGPWFNQLDMDGDKTSVFHDVDGSVSEYPGSYLTKNDNWLVRHPDCINVPDWRGAICSGCYAQMYIQAYKTSNLRMKIIKNDFPSHPLYLEGALTRSTHYQQYQPVVTLQKGYTIHWDQTAPAELAIWLINFNKGDWIRVGLCYPRGTTFSILSDVHNRLLKQTSKTGVFVRTLQMDKVEQSYPGRSHYYWDEDSGLLFLKLKAQNEREKFAFCSMKGCERIKIKALIPKNAGVSDCTATAYPKFTERAVVDVPMPKKLFGSQLKTKDHFLEVKMESSKQHFFHLWNDFAYIEVDGKKYPSSEDGIQVVVIDGNQGRVVSHTSFRNSILQGIPWQLFNYVATIPDNSIVLMASKGRYVSRGPWTRVLEKLGADRGLKLKEQMAFVGFKGSFRPIWVTLDTEDHKAKIFQVVPIPVVKKKKL

SEQ ID NO: 4300 - DNA, 1447 bp, Homo sapiens
agtcctgctctccgcacgccaccttaggcccgcagccgtgccgggtgctcttcagcatgtccttcatcccggtggccgaggattccgacttccccatccacaacctgccctacggcgtcttctcgaccagaggcgacccaagaccgaggataggtgtggccattggcgaccagatcctggacctcagcatcatcaagcacctctttactggtcctgtcctctccaaacaccaggatgtcttcaatcagcctacactcaacagcttcatgggcctgggtcaggctgcctggaaggaggcgagagtgttcttgcagaacttgctgtctgtgagccaagccaggctcagagatgacaccgaacttcggaagtgtgcattcatctcccaggcttctgccacgatgcaccttccagccaccataggagactacacagacttctattcctctcggcagcatgctaccaacgtcggaatcatgttcagggacaaggagaatgcgttgatgccaaattggctgcacttaccagtgggctaccatggccgtgcctcctctgtcgtggtgtctggcaccccaatccgaaggcccatgggacagatgaaacctgatgactctaagcctcccgtatatggtgcctgcaagctcttggacatggagctggaaatggctttttttgtaggccctggaaacagattgggagagccgatccccatttccaaggcccatgagcacatttttggaatggtccttatgaacgactggagtgcacgagacattcagaagtgggagtatgtccctctcgggccattccttgggaagagttttgggaccactgtctctccgtgggtggtgcccatggatgctctcatgccctttgctgtgcccaacccgaagcaggaccccaggcccctgccgtatctgtgccatgacgagccctacacatttgacatcaacctctctgttaacctgaaaggagaaggaatgagccaggcggctaccatatgcaagtccaattttaagtacatgtactggacgatgctgcagcagctcactcaccactctgtcaacggctgcaacctgcggccgggggacctcctggcttctgggaccatcagcgggccggagccagaaaacttcggctccatgttggaactgtcgtggaagggaacgaagcccatagacctggggaatggtcagaccaggaagtttctgctggacggggatgaagtcatcataacagggtactgccagggggatggttaccgcatcggctttggccagtgtgctggaaaagtgctgcctgctctcctgccatcatgagattttctctgctcttctggaaacaaagggctcaagcacccctttcaaccctgtgactggggtcctccctcgggctgtaggcctggtccgccattcagtgacaaataaagccattgtgctctgaggcctgc

SEQ ID NO: 4301 - protein, 419 aa, Homo sapiens
MSFIPVAEDSDFPIHNLPYGVFSTRGDPRPRIGVAIGDQILDLSIIKHLFTGPVLSKHQDVFNQPTLNSFMGLGQAAWKEARVFLQNLLSVSQARLRDDTELRKCAFISQASATMHLPATIGDYTDFYSSRQHATNVGIMFRDKENALMPNWLHLPVGYHGRASSVVVSGTPIRRPMGQMKPDDSKPPVYGACKLLDMELEMAFFVGPGNRLGEPIPISKAHEHIFGMVLMNDWSARDIQKWEYVPLGPFLGKSFGTTVSPWVVPMDALMPFAVPNPKQDPRPLPYLCHDEPYTFDINLSVNLKGEGMSQAATICKSNFKYMYWTMLQQLTHHSVNGCNLRPGDLLASGTISGPEPENFGSMLELSWKGTKPIDLGNGQTRKFLLDGDEVIITGYCQGDGYRIGFGQCAGKVLPALLPS

SEQ ID NO: 4302 - DNA, 1729 bp, Homo sapiens
tcgacatggcggttaccctgagtctcttgctgggcgggcgcgtttgcgccgccgtcactcgctgtgggttcgcgacccggggggtggcgggcccaggccctattggccgggagccggaccccgattccgactgggagccggaggaacgggagctgcaggaggtggagaggtaccggcttctccccgggccctcagcttgaagcagggcctcgtgccccggcgctccaggccgcgcccccttggcgccgggtgtcctgccgctgcttgcgcagcggcccttgtttcttcttacccgttgttaggggcgcagcgtcaggtgttcagctccccgggaccactggtcccttcattagtgacgtatttcatcatcagtttagagagttcggcatgcttacaggcagttattgttctaggtgttagctttctgggtgtacggagcagctctaagccggcaacatggcccggttgcccttgcgatcaaagagaagagggctgggcgctccatgatttagcctgaggctcttcaaacatccattctgcttccacgcatggcttctgccattggttctcttcccccagcaccctgaaacgacagaaacaagcaatccgattccagaaaattcggaggcaaatggaggcgcctggtgccccgcccaggaccctgacgtgggaagccatggagcagatacggtatttacatgaggaatttccagagtcctggtcagttcccaggttggctgaaggctttgatgtcagcactgatgtgatccgaagagttttaaaaagcaagtttttacccacattggagcagaagctgaagcaggatcaaaaagtccttaagaaagctgggcttgcccactcgctgcagcacctccggggctctggaaatacctcaaagctgctccctgcaggccactctgtatcaggctctttgcttatgccagggcatgaagcctcatctaaagacccaaatcacagcacagctttgaaagtgatagagtcagacactcacaggacaaatacaccaaggagaaggaagggaagaaataaagaaatccaggacctggaggagagctttgtgcctgttgctgcacccctaggtcatccaagagagctgcagaagtactccagtgattctgagagccccagaggaactggcagtggtgcgttgccaagtggtcagaagctggaggagttgaaggcagaggagccagataacttcagcagcaaagtagtgcagaggggccgagagttctttgacagcaacgggaacttcctgtacagaatttgagtcggggcttggcttatggagatgcctcgtgaaacacagctgggcaagtattaatgtatatggaacagcctggatttctgcatatggataagccaccttggaataggaagaggtgttgagcctggactgtgggaggaaagagctgcgtggatagattcaaacttcctgtggtagtgctcccagtctgacctctgtagaccttcagtactcactcttcttgcttaggctctctgtgtgttgaaagccatcccgtgttgcatgtgttgttacaattttctgtgatacttgcaatttatgtttgagaagaagtgaaaagtttgccttctgacctcatttccttcttgatcagtgaacactaacattttggggacaacttagtcaattggttttccttacaacaaaataaagtaaaatgtagcaaaaaaaaaaaaaaaaaaa

SEQ ID NO: 4303 - protein, 219 aa, Homo sapiens
MEAPGAPPRTLTWEAMEQIRYLHEEFPESWSVPRLAEGFDVSTDVIRRVLKSKFLPTLEQKLKQDQKVLKKAGLAHSLQHLRGSGNTSKLLPAGHSVSGSLLMPGHEASSKDPNHSTALKVIESDTHRTNTPRRRKGRNKEIQDLEESFVPVAAPLGHPRELQKYSSDSESPRGTGSGALPSGQKLEELKAEEPDNFSSKVVQRGREFFDSNGNFLYRI

SEQ ID NO: 4304 - DNA, 674 bp, Homo sapiens
ctgaaggctttgatgtcagcactgatgtgatccgaagagttttacaggctctttgcttatgccagggcatgaagcctcatctaaagacccaaatcacagcacagctttgaaagtgatagagtcagacactcacaggacaaatacaccaaggagaaggaagggaagaaataaagaaatccaggacctggaggagagctttgtgcctgttgctgcacccctaggtcatccaagagagctgcagaagtactccagtgattctgagagccccagaggaactggcagtggtgcgttgccaagtggtcagaagctggaggagttgaaggcagaggagccagataacttcagcagcaaagtagtgcagaggggccgagagttctttgacagcaacgggaacttcctgtacagaatttgagtcggggcttggcttatggagatgcctcgtgaaacacagctgggcaagtattaatgtatatggaacagcctggatttctgcatatggataagccaccttggaataggaagaggtgttgagcctggactgtgggaggaaagagctgcgtggatagattcaaacttcctgtggtagtgctcccagtctgacctctgtagaccttcagtactcactcttcttgcttaggctctctgtgtgttgaaagccatcccgtgttgcatgt

SEQ ID NO: 4305 - DNA, 905 bp, Homo sapiens
tctcccgaattcggcacgaggcggcgtctcgaggcgagttggcggagctgtgcgcgcggcggggcgatggggggctcgggcagtcgcctgtccaaggagctgctggccgagtaccaggacttgacgttcctgacgaagcaggagatcctcctagcccacaggcggttttgtgagctgcttccccaggagcagcggaccgtggagtcgtcacttcgggcacaagtgcccttcgagcagattctcagccttccagagctcaaggccaaccccttcaaggagcgaatctgcagggtcttctccacatccccagccaaagacagccttagctttgaggacttcctggatctcctcagtgtgttcagtgacacagccacgccagacatcaagtcccattatgccttccgcatctttgactttgatgatgacggaaccttgaacagagaagacctgagccggctggtgaactgcctcacgggagagggcgaggacacacggcttagtgcgtctgagatgaagcagctcatcgacaacatcctggaggagtctgacattgacagggatggaaccatcaacctctctgagttccagcacgtcatctcccgttctccagactttgccagctcctttaagattgtcctgtgacagcagccccagcgtgtgtcctggcaccctgtccaagaacctttctactgctgagctgtggccaaggtcaagcctgtgttgccagtgcgggccaagctggcccagcctggagctggcgctgtgcagcctcaccccgggcaggggcggccctcgttgtcagggcctctcctcactgctgttgtcattgctccgtttgtgtttgtactaatcagtaataaaggtttagaagtttgaccctaaaaaaaaaaaaaaaaaaaaaaaaa

SEQ ID NO: 4306 - protein, 191 aa, Homo sapiens
MGGSGSRLSKELLAEYQDLTFLTKQEILLAHRRFCELLPQEQRTVESSLRAQVPFEQILSLPELKANPFKERICRVFSTSPAKDSLSFEDFLDLLSVFSDTATPDIKSHYAFRIFDFDDDGTLNREDLSRLVNCLTGEGEDTRLSASEMKQLIDNILEESDIDRDGTINLSEFQHVISRSPDFASSFKIVL

SEQ ID NO: 4307 - DNA, 3766 bp, Homo sapiens
gctctgcccaagccgaggctgcggggccggcgccggcgggaggactgcggtgccccgcggaggggctgagtttgccagggcccacttgaccctgtttcccacctcccgccccccaggtccggaggcgggggcccccggggcgactcgggggcggaccgcggggcggagctgccgcccgtgagtccggccgagccacctgagcccgagccgcgggacaccgtcgctcctgctctccgaatgctgcgcaccgcgatgggcctgaggagctggctcgccgccccatggggcgcgctgccgcctcggccaccgctgctgctgctcctgctgctgctgctcctgctgcagccgccgcctccgacctgggcgctcagcccccggatcagcctgcctctgggctctgaagagcggccattcctcagattcgaagctgaacacatctccaactacacagcccttctgctgagcagggatggcaggaccctgtacgtgggtgctcgagaggccctctttgcactcagtagcaacctcagcttcctgccaggcggggagtaccaggagctgctttggggtgcagacgcagagaagaaacagcagtgcagcttcaagggcaaggacccacagcgcgactgtcaaaactacatcaagatcctcctgccgctcagcggcagtcacctgttcacctgtggcacagcagccttcagccccatgtgtacctacatcaacatggagaacttcaccctggcaagggacgagaaggggaatgtcctcctggaagatggcaagggccgttgtcccttcgacccgaatttcaagtccactgccctggtggttgatggcgagctctacactggaacagtcagcagcttccaagggaatgacccggccatctcgcggagccaaagccttcgccccaccaagaccgagagctccctcaactggctgcaagacccagcttttgtggcctcagcctacattcctgagagcctgggcagcttgcaaggcgatgatgacaagatctactttttcttcagcgagactggccaggaatttgagttctttgagaacaccattgtgtcccgcattgcccgcatctgcaagggcgatgagggtggagagcgggtgctacagcagcgctggacctccttcctcaaggcccagctgctgtgctcacggcccgacgatggcttccccttcaacgtgctgcaggatgtcttcacgctgagccccagcccccaggactggcgtgacacccttttctatggggtcttcacttcccagtggcacaggggaactacagaaggctctgccgtctgtgtcttcacaatgaaggatgtgcagagagtcttcagcggcctctacaaggaggtgaaccgtgagacacagcagatggtacaccgtgacccacccgtgcccacaccccggcctggagcgtgcatcaccaacagtgcccgggaaaggaagatcaactcatccctgcagctcccagaccgcgtgctgaacttcctcaaggaccacttcctgatggacgggcaggtccgaagccgcatgctgctgctgcagccccaggctcgctaccagcgcgtggctgtacaccgcgtccctggcctgcaccacacctacgatgtcctcttcctgggcactggtgacggccggctccacaaggcagtgagcgtgggcccccgggtgcacatcattgaggagctgcagatcttctcatcgggacagcccgtgcagaatctgctcctggacacccacagggggctgctgtatgcggcctcacactcgggcgtagtccaggtgcccatggccaactgcagcctgtacaggagctgtggggactgcctcctcgcccgggacccctactgtgcttggagcggctccagctgcaagcacgtcagcctctaccagcctcagctggccaccaggccgtggatccaggacatcgagggagccagcgccaaggacctttgcagcgcgtcttcggttgtgtccccgtcttttgtaccaacaggggagaagccatgtgagcaagtccagttccagcccaacacagtgaacactttggcctgcccgctcctctccaacctggcgacccgactctggctacgcaacggggcccccgtcaatgcctcggcctcctgccacgtgctacccactggggacctgctgctggtgggcacccaacagctgggggagttccagtgctggtcactagaggagggcttccagcagctggtagccagctactgcccagaggtggtggaggacggggtggcagaccaaacagatgagggtggcagtgtacccgtcattatcagcacatcgcgtgtgagtgcaccagctggtggcaaggccagctggggtgcagacaggtcctactggaaggagttcctggtgatgtgcacgctctttgtgctggccgtgctgctcccagttttattcttgctctaccggcaccggaacagcatgaaagtcttcctgaagcagggggaatgtgccagcgtgcaccccaagacctgccctgtggtgctgccccctgagacccgcccactcaacggcctagggccccctagcaccccgctcgatcaccgagggtaccagtccctgtcagacagccccccggggtcccgagtcttcactgagtcagagaagaggccactcagcatccaagacagcttcgtggaggtatccccagtgtgcccccggccccgggtccgccttggctcggagatccgtgactctgtggtgtgagagctgacttccagaggacgctgccctggcttcaggggctgtgaatgctcggagagggtcaactggacctcccctccgctctgctcttcgtggaacacgaccgtggtgcccggcccttgggagccttggggccagctggcctgctgctctccagtcaagtagcgaagctcctaccacccagacacccaaacagccgtggccccagaggtcctggccaaatatgggggcctgcctaggttggtggaacagtgctccttatgtaaactgagccctttgtttaaaaaacaattccaaatgtgaaactagaatgagagggaagagatagcatggcatgcagcacacacggctgctccagttcatggcctcccaggggtgctggggatgcatccaaagtggttgtctgagacagagttggaaaccctcaccaactggcctcttcaccttccacattatcccgctgccaccggctgccctgtctcactgcagattcaggaccagcttgggctgcgtgcgttctgccttgccagtcagccgaggatgtagttgttgctgccgtcgtcccaccacctcagggaccagagggctaggttggcactgcggccctcaccaggtcctgggctcggacccaactcctggacctttccagcctgtatcaggctgtggccacacgagaggacagcgcgagctcaggagagatttcgtgacaatgtacgcctttccctcagaattcagggaagagactgtcgcctgccttcctccgttgttgcgtgagaacccgtgtgccccttcccaccatatccaccctcgctccatctttgaactcaaacacgaggaactaactgcaccctggtcctctccccagtccccagttcaccctccatccctcaccttcctccactctaagggatatcaacactgcccagcacaggggccctgaatttatgtggtttttatacattttttaataagatgcactttatgtcattttttaataaagtctgaagaattactgttt

SEQ ID NO: 4308 - protein, 837 aa, Homo sapiens
MLRTAMGLRSWLAAPWGALPPRPPLLLLLLLLLLLQPPPPTWALSPRISLPLGSEERPFLRFEAEHISNYTALLLSRDGRTLYVGAREALFALSSNLSFLPGGEYQELLWGADAEKKQQCSFKGKDPQRDCQNYIKILLPLSGSHLFTCGTAAFSPMCTYINMENFTLARDEKGNVLLEDGKGRCPFDPNFKSTALVVDGELYTGTVSSFQGNDPAISRSQSLRPTKTESSLNWLQDPAFVASAYIPESLGSLQGDDDKIYFFFSETGQEFEFFENTIVSRIARICKGDEGGERVLQQRWTSFLKAQLLCSRPDDGFPFNVLQDVFTLSPSPQDWRDTLFYGVFTSQWHRGTTEGSAVCVFTMKDVQRVFSGLYKEVNRETQQWYTVTHPVPTPRPGACITNSARERKINSSLQLPDRVLNFLKDHFLMDGQVRSRMLLLQPQARYQRVAVHRVPGLHHTYDVLFLGTGDGRLHKAVSVGPRVHIIEELQIFSSGQPVQNLLLDTHRGLLYAASHSGVVQVPMANCSLYRSCGDCLLARDPYCAWSGSSCKHVSLYQPQLATRPWIQDIEGASAKDLCSASSVVSPSFVPTGEKPCEQVQFQPNTVNTLACPLLSNLATRLWLRNGAPVNASASCHVLPTGDLLLVGTQQLGEFQCWSLEEGFQQLVASYCPEVVEDGVADQTDEGGSVPVIISTSRVSAPAGGKASWGADRSYWKEFLVMCTLFVLAVLLPVLFLLYRHRNSMKVFLKQGECASVHPKTCPVVLPPETRPLNGLGPPSTPLDHRGYQSLSDSPPGSRVFTESEKRPLSIQDSFVEVSPVCPRPRVRLGSEIRDSVV

SEQ ID NO: 4309 - DNA, 9910 bp, Homo sapiens
ggtgattgtgttgttacagtgctgcttgctgaagaggacaaagctgaagatgatgtagtgttttacttggtatttttgggttccaccctccgtcactgtacaagtactcggaaggtcagttctgatacattggagaccattgctcctggtcatgattgttgtgaaacagtgaaggtgcagctctgtgcttccaaagagggccttcccgtgtttgtggtggctgaagaagactttcatttcgtccaggatgaagcgtatgatgcagctcaattcctagcaaccagtgctggaaatcagcaggctttgaactttacccgttttcttgaccagtcaggacccccatctggggatgtgaattcccttgataagaagttggtgctggcattcaggcacctgaagctgcccacggagtggaatgtattggggacagatcagagtttgcatgatgctggcccgcgagagacattgatgcattttgctgtgcggctgggactgctgaggttgacgtggttcctgttgcagaagccaggtggccgcggagctctcagtatccacaaccaggaagggcgacgcctgtgagcttggccttggagcgaggctatcacaagctgcaccagcttctaaccgaggagaatgctggagaaccagactcctggagcagtttatcctatgaaataccgtatggagactgttctgtgaggcatcatcgagagttggacatctatacattaacctctgagtctgattcacatcatgaacacccatttcctggagacggttgcactggaccaatttttaaacttatgaacatccaacagcaactaatgaaaacaaacctcaagcagatggacagtcttatgcccttaatgatgacagcacaggatccttccagtgccccagagacagatggccagtttcttccctgtgcaccggagcccacggaccctcagcgactttcttcttctgaagagactgagagcactcagtgctgcccagggagccctgttgcacagactgaaagtccctgtgatttgtcaagcatagttgaggaggagaatacagaccgttcctgtaggaagaaaaataaaggcgtggaaagaaaaggggaagaggtggagccagcacctattgtggactctggaactgtatctgatcaagacagctgccttcagagcttgcctgattgtggagtaaagggcacggaaggcctttcgtcctgtggaaacagaaatgaagaaactggaacaaaatcttctggaatgcccacagaccaggagtccctgagcagtggagatgctgtgcttcagagagacttggtcatggagccaggcacagcccagtattcctctggaggtgaactgggaggcatttcaacaacaaatgtcagtaccccagacactgcaggggaaatggaacatgggctcatgaacccagatgccactgtttggaagaatgtgcttcagggaggggaaagtacaaaggaaagatttgagaactctaatattggcacagctggagcctctgacgtgcacgtcacaagtaagcctgtggataaaatcagtgttccaaactgtgcccctgctgccagttccctggatggtaacaaacctgctgagtcttcacttgcatttagtaatgaagaaacctccactgaaaaaacagcagaaacggaaacttcacgaagtcgtgaggagagtgctgatgctccagtagatcagaattctgtggtgattccagctgctgcaaaagacaagatttcagatggattagaaccttatactctcttagcagcaggcataggtgaggcaatgtcaccctcagatttagcccttcttgggctggaagaagatgtaatgccacaccagaactcagaaacaaattcatctcatgctcaaagccaaaagggcaaatcctcacccatttgttctacaactggagacgataaactttgtgcagactctgcatgtcaacagaacacagtgacttctagtggcgatttggttgcaaaactgtgtgataacatagttagcgagtccgaaagcaccacagcaaggcaacccagctcacaagatccacccgatgcctcccactgtgaagacccacaggctcatacagtcacctctgaccctgtaagggatacccaggaacgtgcggatttttgtcctttcaaagtggtggataacaaaggccaacgaaaagatgtgaaactagataaacctttaacaaatatgcttgaggtggtttcacatccacatccagttgtccctaaaatggagaaagaactggtgccagaccaggcagtaatatcagacagtactttctctctggcaaacagtccaggcagtgaatcagtaaccaaggatgacgcactttcttttgtcccctcccagaaagaaaagggaacagcaactcctgaactacatacagctacagattatagagatggcccagatggaaattcgaatgagcctgatacgcggccactagaagacagggcagtaggcctgtccacatcctccactgctgcagagcttcagcacgggatggggaataccagtctcacaggacttggtggagagcatgagggtcccgcccctccagcaatcccagaagctctgaatatcaaggggaacactgactcttccctgcaaagtgtgggtaaggccactttggctttagattcagttttgactgaagaaggaaaacttctggtggtttcagaaagctctgcagctcaggaacaagataaggataaagcggtgacctgttcctctattaaggaaaatgctctctcttcaggaactttgcaggaagagcagagaacaccacctcctggacaagatactcaacaatttcatgaaaaatcaatctcagctgactgtgccaaggacaaagcacttcagctaagtaattcaccgggtgcatcctctgcctttcttaaggcagaaactgaacataacaaggaagtggccccacaagtctcactgctgactcaaggtggggctgcccagagcctggtgccaccaggagcaagtctggccacagagtcaaggcaggaagccttgggggcagagcacaacagctccgctctgttgccatgtctgttgccagatgggtctgatgggtccgatgctcttaactgcagtcagccttctcctctggatgttggagtgaagaacactcaatcccagggaaaaactagtgcctgtgaggtgagtggagatgtgacggtggatgttacaggggttaatgctctacaaggtatggctgagcccagaagagagaatatatcacacaacacccaagacatcctgattccaaacgtcttgttgagccaagagaagaatgccgttctaggtttgccagtggctctacaggacaaagctgtgactgacccacagggagttggaaccccagagatgatacctcttgattgggagaaagggaagctggagggagcagaccacagctgtaccatgggtgacgctgaggaagcccaaatagacgatgaagcacatcctgtcctactgcagcctgttgccaaggagctccccacagacatggagctctcagcccatgatgatggggccccagctggtgtgagggaagtcatgcgagccccgccttcaggcagggaaaggagcactccctctctaccttgcatggtctctgcccaggacgcacctctgcctaagggggcagacttgatagaggaggctgccagccgtatagtggatgctgtcatcgaacaagtcaaggccgctggagcactgcttactgagggggaggcctgtcacatgtcactgtccagccctgagttgggtcctctcactaaaggactagagagtgcttttacagaaaaagtgagtactttcccacctggggagagcctaccaatgggcagtactcctgaggaagccacggggagccttgcaggatgttttgctggaagggaggagccagagaagatcattttacctgtccaggggcctgagccagcagcagaaatgccagacgtgaaagctgaagatgaagtggattttagagcaagttcaatttctgaagaagtggctgtagggagcatagctgctacactgaagatgaagcaaggcccaatgacccaggcgataaaccgagaaaactggtgtacaatagagccatgccctgatgcagcatctcttctggcttccaagcagagcccagaatgtgagaacttcctggatgttggactgggcagagagtgtacctcaaaacaaggtgtacttaaaagagaatctgggagtgattctgacctctttcactcacccagtgatgacatggacagcatcatcttcccaaagccagaggaagagcatttggcctgtgatatcaccggatccagttcatccaccgatgacacggcttcactggaccgacattcttctcatggcagtgatgtgtctctctcccagattttaaagccaaacaggtcaagagatcggcaaagccttgatggattctacagccatgggatgggagctgagggtcgagaaagtgagagtgagcctgctgacccaggcgacgtggaggaggaggagatggacagtatcactgaagtgcctgcaaactgctctgtcctaaggagctccatgcgctctctttctcccttccggaggcacagctgggggcctgggaaaaatgcagccagcgatgcagaaatgaaccaccggagtatgagctggtgcccctctggtgtgcagtactctgctggcctgagtgctgactttaattacagaagtttcagtctagaaggcttgacaggaggagctggtgtcggaaacaagccatcctcatctctagaagtaagctctgcaaatgccgaagagctcagacacccattcagtggtgaggaacgggttgactctttggtgtcactttcagaagaggatctggagtcagaccagagagaacataggatgtttgatcagcagatatgtcacagatctaagcagcagggatttaattactgtacatcagccatttcctctccattgacaaaatccatctcattaatgacaatcagccatcctggattggacaattcacggcccttccacagtaccttccacaataccagtgctaatctgactgagagtataacagaagagaactataatttcctgccacatagcccctccaagaaagattctgaatggaagagtggaacaaaagtcagtcgtacattcagctacatcaagaataaaatgtctagcagcaagaagagcgaaaaggaaaaagaaaaagataagattaaggagaaggagaaagattctaaagacaaggagaaagataagaagactgtcaacgggcacactttcagttccattcctgttgtgggtcccatcagctgtagccagtgtatgaagcccttcaccaacaaagatgcctatacttgtgcaaattgcagtgcttttgtccacaaaggctgccgagaaagtctagcctcctgtgcaaaggtcaaaatgaagcagcccaaagggagccttcaggcacatgacacatcatcactgcccacggtcattatgagaaacaagccctcacagcccaaggagcgtcctcggtccgcagtcctcctggtggatgaaaccgctaccaccccaatatttgccaatagacgatcccagcagagtgtctcgctctccaaaagtgtctccatacagaacattactggagttggcaatgatgagaacatgtcaaacacctggaaattcctgtctcattcaacagactcactaaataaaatcagcaaggtcaatgagtcaacagaatcacttactgatgagggagtaggtacagacatgaatgaaggacaactactgggagactttgagattgagtccaaacagctggaagcagagtcttggagtcggataatagacagcaagtttctaaaacagcaaaagaaagatgtggtcaaacggcaagaagtaatatatgagttgatgcagacagagtttcatcatgtccgcactctcaagatcatgagtggtgtgtacagccaggggatgatggcggatctgctttttgagcagcagatggtagaaaagctgttcccctgtttggatgagctgatcagtatccatagccaattcttccagaggattctggagcggaagaaggagtctctggtggataaaagtgaaaagaactttctcatcaagaggataggggatgtgcttgtaaatcagttttcaggtgagaatgcagaacgtttaaagaagacatatggcaagttttgtgggcaacataaccagtctgtaaactacttcaaagacctttatgccaaggataagcgttttcaagcctttgtaaagaagaagatgagcagttcagttgttagaaggcttggaattccagagtgcatattgcttgtaactcagcggattaccaagtacccagttttattccaaagaatattgcagtgtaccaaagacaatgaagtggagcaggaagatctagcacagtccttgagcctggtgaaggatgtgattggagctgtagacagcaaagtggcaagttatgaaaagaaagtgcgtctcaatgagatttatacaaagacagatagcaagtcaatcatgaggatgaagagtggtcagatgtttgccaaggaagatttgaaacggaagaagcttgtacgtgatgggagtgtgtttctgaagaatgcagcaggaaggttgaaagaggttcaagcagttcttctcactgacattttagttttccttcaagaaaaagaccagaagtacatctttgcatcattggaccagaagtcaacagtgatctctttaaagaagctgattgtgagagaagtggcacatgaggagaaaggtttattcctgatcagcatggggatgacagatccagagatggtagaagtccatgccagctccaaagaggaacgaaacagctggattcagatcattcaggacacaatcaacaccctgaacagagatgaagatgaaggaattcctagtgagaatgaggaagaaaagaaaatgttggacaccagagcccgagaattaaaagaacaacttcaccagaaggaccaaaaaatcctactcttgttggaagagaaggagatgattttccgggacatggctgagtgcagcacccctctcccagaggattgctccccaacacatagccctagagttctcttccgctccaacacagaagaggctctcaaaggaggacctttaatgaaaagtgcaataaatgaggtggagatccttcagggtttggtgagtggaaatctgggaggcacacttgggccgactgtcagcagccccattgagcaagatgtggtcggtcccgtttccctgccccggagagcagagacctttggaggatttgacagccatcagatgaatgcttcaaaaggaggcgagaaggaagagggagatgatggccaagatcttaggagaacggaatcagatagtggcctaaaaaagggtggaaatgctaacctggtatttatgcttaaaagaaacagtgagcaggttgtccagagcgttgttcatctctacgagctcctcagcgctctgcagggtgtggtgctgcagcaggacagctacattgaggaccagaaactggtgctgagcgagagggcgctcactcgcagcttgtcccgcccgagctccctcattgagcaggagaagcagcgcagcctggagaagcagcgccaggacctggccaacctgcagaagcagcaggcccagtacctcgaggagaagcgcaggcgcgagcgtgagtgggaagctcgtgagagggagctgcgggagcgggaggccctcctggcccagcgcgaggaggaggtgcagcaggggcagcaggacctggaaaaggagcgggaggagctccagcagaagaagggcacataccagtatgacctggagcgactgcgtgctgcccagaaacagcttgagagggaacaggagcagctgcgccgggaggcagagcggctcagccagcggcagacagaacgggacctgtgtcaggtttcccatccacataccaagctgatgaggatcccatcgttcttccccagtcctgaggagcccccctcgccatctgcaccttccatagccaaatcagggtcattggactcagaactttcagtgtccccaaaaaggaacagcatctctcggacacacaaagataaggggccttttcacatactgagttcaaccagccagacaaacaaaggaccagaagggcagagccaggcccctgcgtccacctctgcctctacccgcctgtttgggttaacaaagccaaaggaaaagaaggagaaaaaaaagaagaacaaaaccagccgctctcagcccggtgatggtcccgcgtcagaagtatcagcagagggtgaagagatcttctgctgaccctcttcctctctgctgaggcagctgcctcctgatcctggccagcccacctctcctgctgtccccgcgtgcacaagtctcttacactggacgcccactgctcctcagcgtccagtcctcctgggcggccccaggtcctggacaataagcaacagatgatattgagtgtcgggtggggaaggaggcccagactctgcttcggccatgatttgtgactgcccaggactctcaggttgggctggccctactcaggattacactgaaagtaatggcctcgtaagtacaggtgatggttttggacacgtcaggaattcctaaaggctgaaagagtgtatccaagtaaggtctgaacctccgaatgccttttatttgggggaacacaaaaccaaacagcagatgttttggacttgatctgtgtacgtacatggggacctgtctgcatatacacacggggaatgccagaagaaggcccagtctgcaccaggcgtctggtcaacttagcacaagggcagtgcctggacggacccggagcccccgcatatcagcagttcacccagtactcctcagagactggtttccctctaaacccatcccgggcacataccacccgtgttttgcatgtatttctcatttcattttagggatgacaaacatttgtgaaaccagtgagagaaggcttgatgtgtataaaagacgtgatgtgcaccacctcgatctcggtgtttcaggcactaaagcaacaaaacaacccatagtatctcattctgtcatcagatccagaagaaatatcctggttttccagcatgtttacccacatgttttggccatggataaagtgaagaggcctactcaccattatccctgcagcgtgacaccttttgattgtcactgaccactcagaaggggccacggcctcctggctgtgttcctgagcccccgtcgtgcctctcccagacagcagctgtctggcccttgctgggtgagggcacaccactgccaggggtcagcctcgcacccaggccaggcagaagctgtgctctgaagctaggacagctggctgagaagtgggttcaggcgaagggtgaagccatgtgtagcagttcctgccagtgcagatctggagaggagctggcccggaaggcgtggttgtgaaagcgcccttcttatgttaggaggccttggcaaaattggatttcttcaaaaatacatgtaaaggtctgttgttgaattgtactctgcccctggaagcagatacagatggctgcctgctgctcggctttgcttttgcttttcccaccgtgttttcatctttgttcacttgaggctttccccagctggtgtgtgcaggacagttcatggtaatgttgccctctgaggccccgtacaccagaagggaggccctggaaaattttgtgcttccaacgtggccttcaattcttgcttttttgcccctcggaagcatggggcttttgagcacacttaaaaaaagaaaa

SEQ ID NO: 4310 - DNA, 1734 bp, Homo sapiens
gaaaaacaaaaagaatctttgttttaccccgaaagagaggcagaggcagaaagtcttcttctgctttttgcatctctaagaggctgaaaaagagaatggaagtgctggggcattttggccagggcagtaatggatatttggagttggcacttccctcagctagaggagtctcagtgtgtctgagaaaatggcagtcagccatccaggattttaggagcaacgccactgctctgtgccacatcagaaatcaggcatggccccaacctgaaggaacttgtagcttaatggggaagcacaccaagaataaaagagcctccagaacatgtggtgcctgtggtcctgagacagcaggaaatggctctcaggccagagttgctggaagaacccatgtggcaggatcggtgggaggcagttacagagggaaacgcccatcccagcaactaggggaggccgccactcctctcgtggatggatgatattcttgcttggggatgttgagacagctgcactctgcatagttcctgatttgcctctctactgctgatgaaaaacctctctttctctatagctgctgcttatattggaaggcttttggttattcagcacactcactcctgagcttatttcagtgatattccttggttatttcgaaacatggatgcttgtggcagatggagagcctgggtgtacacagatctgcctgtgttttgaaatgcataccatgttgccgtttgtttgattgattgatcttggaccacgaaagaaaattatactgacagcttccagggtagggggcagttgtagctttctgcagatgttgccaaatatattgggggtggggagcagcaaatgccatgtgttgctttttatgacataaggagggattccacccccatcccaataaaatcggtgctttgacaaaggagggttcccaggcagctaagagaacccagagtagatgatcctctttatctctggtttaacctgtgactaggattcttggtgtaagctcggcttttccacttatcctctaaccggaacaggcttctataatctctttgccttaaaataattatctgcatccctgtgtagagcaatcttaagcagctctccttgtttcttcagggaatgggaattcttttctaagtcgccccatcaaaggtactattggttttttacaacgccggcgtttgtgtatgtagtaaaagtattaacagcattaaaggcgatatttttaacatgtttatagatactacttgggggagggcagctaatgaaaccttcaagctctatgcagtccacagacgtgagctctgtagagttcgcagaggtgggtaagtacccagccagcacacccagttgaattcagccaggatttattgagttggcatcacggacgctgacagcctccaagtgaaaacccttctcttgaatatgtacaggtttcccatccacataccaagctgatgaggatcccatcgttcttccccagtcctgaggagcccccctcgccatctgcaccttccatagccaaatcagggtcattggactcagaactttcagtgtccccaaaaaggaacagcatctctcggacacacaaagataaggggccttttcacatactgagttcaaccagccagacaaacaaaggaccagaagggcagagccaggcccctgcgtccacctctgcctctacccgcctgtttgggttaacaaagccaaaggaaaagaagg

SEQ ID NO: 4311 - DNA, 4414 bp, Homo sapiens
tctgttaaatgttccgaagccactgccaaaacaactgtgggagaccaaggagattcagtccctgtcaggacgccctcgatcctgtgatgttggaggtggcaatgcttttccacataatggtcaaaacctaggcctctcacccttcttggggaccttgaacactggagggtcattgccagatctaaccaacctccactactcgacacccctgccagcctccctggacaccaccgaccaccactttggcagtatgagtgtggggaatagtgtgaacaacatcccagctgctatgacccacctgggtataagaagctcctctggtctccagagttctcggagtaacccctccatccaagccacgctcaataagactgtgctttcctcttccttaaataaccacccacagacatctgttcccaacgcatctgctcttcacccttcgctccgtctgttttcccttagcaacccatctctttccaccacaaacctgagcggcccgtctcggcgtcggcagcctcccgtcagccctctcacgctttctcctggccctgaagcacatcaaggtttcagcagacagctgtcttcaaccagcccactggccccatatcctacctcccagatggtgtcctcagaccgaagccaactttcctttctgcccacagaagctcaagcccaggtgtcgccgccacccccttaccctgcaccccaggagctcacccagcccctcctgcagcagccccgcgcccctgaggcccctgcccagcagccccaggcagcctcctcactgccacagtcagactttcagcttctcccggcccagggctcatctttgaccaacttcttcccagatgtgggttttgaccagcagtccatgaggccaggccctgcctttcctcaacaggtgcctctggtgcaacaaggttcccgagaactgcaggactcttttcatttgagaccaagcccgtattccaactgcgggagtctcccgaacaccatcctgccagactccagcaccagcctgttcaaagacctcaacagtgcgctggcaggcctgcctgaggtcagcctgaacgtggacactccatttccactggaagaggagctgcagattgaacccctgagcctggacggactcaacatgttaagtgactccagcatgggcctgctggacccctctgttgaagagacgtttcgagctgacagactgtgaacagaaggcagtggaacagaagaatgtttttctgcaacagccaaaatagaatggaatagaatgaagccagctgataccacgggctttcgttatcttgacatagaaggaagcaatgccacggctccagggtttcagatgagatcccatctcagacactgtggcttcctccagatcacacagctttgtactgcctctcccgcctgtggccaaagtcgtgttgcagcaggcaggctgcttggagcttcccatgaactggaaagctcacctccactgcatctttttactggccatccagtcagccgatgtgtaagagtaggaaatactgtgtcactggaggcctccgtagcattgtgtagtgtgctcagaaccactgatctccgtccgcaccgaaggcgggcccggagtgggaggctcggcctggggcggcggcaccggagagggcacctcgatgcctgctctgacctgacccagagggcgaggccctccagcgggggacattcccaggctgagtggaccccacggctctctcccacgcctggattacgacatgaagtttttaccacaagcccgagggcaggcttgagttaggcagactgaaggctaattttcattttctcccagctggtttctgctgcttcagaaaagtacaccttttccttatggaccagaggaagaggaagaccattttatcagtcactgaaaagagtcccctggcactgatgagcctgaagagaactgtgctcctcctcgggggctggggaaggaagacagggactgcaggtgtctcatactcagtggcctccagacaaactccagacaagcacagacctccccactaagagcagccagagggagctggtgaggccctaaccccacccaccgagcaactgagcttccccatccctccccagagctgtgtctctgtgggctgggagtctaatgtcacccccctagaccgtaagctccttgagggcagggacagtgccttatcattgttgaacccgtagcacctaacacgtgcgtggcagcacagtcgtgtgctggagtgagtgctgcagaaccgtgcgtgcagcgcatgatgaatgagtgcgtccgccatgccgtaaggcaggctcacctgtagctatccccttccctgccagatcttctcagagctttagcttttctagcactcgtgcctatggtgaagcatgcactttaatatgcttttaacactaggtgaccaaatcacagtgaagccgggcactgcattctccttgggctgtgctccacgcgggtgggtgggagctgtcttctgagtacatccggaagggctgagcaggtgagtgccctgagcatcctggctgggccccacccaggaagatcttccttctcagatccacgtttggctctaaattgcttcaagtagagattcattctttgaggttgaaaaaatagtttatagtaaaacgaaggcctaattcatggaagcatcattagtcatcaataccttctcataaaatagatgggccagatttccaccaccgcctgcctcctctaacttgggtgatgccagtaggtttgaagggggcagagcattgcagggggaggggggggtctaggctgtgagaggacagggtggagaggaggagaaccctgaaggagagacggaagatgccaggacctttgcttggacagccattgcccttccaggagaccctggagtgtactgagggttgctggactgttccacccagaggagcaaggctgtacaatgagggtctgaatctggcacacctgtcccttatgtaaaaggagtcgtggtcacaagaccctgggctggttagcctctcccgacctcattccatttctatcttctgaccttgcctctcatctttaaaataaccctcatggggtgcccctccaccttcctctggaatccaagtattcctgtttcacatttgccccaaatctttgctgtggaattgggaaatcaaaccagagtcctcctcgcctgatttccagctcaggaagggcctgctggcctgccctgttcccagttacactttcagatccctttgtgctcaagatctcagagggggtggctttttgttaaagagccttcagtcgcaatgctacccagcaccccatgtgccaaaagaaaccagctcctgtgtcaaagggcttccaaacctgatctcactctcaacaggcgatggtgctgatgtttcaagaattgtgtttttataaaacagaggtctcagcatagtcactcttcacatagtgccttacccatgggtatcgtcatatccgggtcccagttcagtttgtctgcacagcagccaccctgcctggcaacagagaccccaagacctacacagtgaaccctactgccccaaaggcgttctccaggtgacttgtgaaaacagacctccggggaagtgatttattgggggtgtacactgggggcaatatggtttagcactgaattcaatttgtccttaggtctatgagtgagtccgatcttttcttgtgaaaggttttgggcatcgtacaacccactctgcctagaaggtgtggaggactcaccacgggcagggtcgccctggcccacagcacgtgagcctgcactcactgcggcctttgtaacaaaaccagttgtggtcctcagcatttgaagcagctgcatacttcagagtaaactatttttcattatttagttttgtcacaagaaatcgaccattgtactactctcacttacagcagttaaacagcatagaactaaaaacctgtctgcatttccattttttctttctgtatggttgtgggttttaggacatagggggttaggagaaggggtttcttgatcatgtcatgaattctcctttgtcctgtttctcctgtttcatttctcctccgcctgctgtatattacctgagctggtgttgtatcttcaagtccatatgcgtatttgcagacctttcctgttcccactcttgttggctcttctgatttatgcacagatggttcccagcatgtgtccagtgcttcatggatgggaccatcccagcaactaatcagacttcctgccagtgtcctaacccccagggcaccctgttcaaccatatttaaaaattggaatttgtataaagttgcttccaagttttataatgcatcattttacatcttttgtaattaaaagcatcacaatgaggttgtctctgc

SEQ ID NO: 4312 - DNA, 2509 bp, Homo sapiens
tttttctggtagaaggcggggttctcctcgtacgctgcggagtctctgcggggtgtagaccggaatcctgctgacgggcagagtggatcagggagggagggtcgagacacggtggctgcaggtctgagacaaggctgctccgaggtagtagctctcttgcctggaggtggccattcattcctggagtgctgctgaggagcgagggcccatctggggtctctggaagtcggtgcccaggcctgaaggatagccccccttgcgcttccctgggctgcggccggccttctcagaacgaagggcgtccttccaccccgcggcgcaggtgaccgctgccatggcttttccccatcggccggacgcccctgagctgcctgacttctccatgctgaagaggctggctcgagaccagctcatctatctgctggagcagcttcctggaaaaaaggatttattcattgaggcagatctcatgagccctttggatcgaattgccaatgtctccatcctgaagcaacacgaagtagacaagctatacaaggtggagaacaagccagccctcagctccaatgaacaattgtgcttcttggtcagaccccgcatcaagaatatgcgatacattgccagtcttgtcaatgctgacaaattggctggccgaactcgcaaatacaaagtgatcttcagccctcaaaagttctatgcgtgtgagatggtgcttgaggaagagggaatctatggagatgtgagctgtgatgaatgggccttctctttgctgcctcttgatgtggatctgctgagcatggaactaccagaatttttcagggattactttctggaaggagatcagcgttggatcaacactgtagctcaggccttacaccttctcagcactctctatggaccctttccaaactgctatggaattggcaggtgcgccaagatggcatatgaattgtggaggaacctggaggaggaggaggatggcgaaaccaagggccgaaggccagagattggacatatctttctcttggacagagatgtggactttgtgacagcactttgctcccaagtggtttatgagggcctagtagatgacaccttccgcatcaagtgtgggagtgtcgactttggcccagaagtcacatcctctgacaagagcctgaaggtgctactcaatgccgaggacaaggtgtttaatgagattcggaacgagcacttctccaatgtctttggcttcttgagccagaaggcccggaacttgcaggcccagtatgatcgccggagaggcatggacattaagcagatgaagaatttcgtgtcccaggagctcaagggcctgaaacaggagcaccgcctgctgagtctccatattggggcctgtgaatccatcatgaagaagaaaaccaagcaggatttccaggagctaatcaagactgagcatgcactgctagaggggttcaacatccgggagagcaccagctacattgaggaacacatagaccggcaggtgtcgcctatagaaagcctgcgcctcatgtgccttttgtccatcactgagaatggtttgatccccaaggattaccgatctctgaaaacacagtatctgcagagctatggccctgagcacctgctaaccttctccaatctgcgaagagctgggctcctaacggagcaggcccccggggacaccctcacagccgtggagagtaaagtgagcaagctggtgaccgacaaggctgcaggaaagattactgatgccttcagttctctggccaagaggagcaattttcgtgccatcagcaaaaagctgaatttgatcccacgtgtggacggcgagtatgatctgaaagtgccccgagacatggcttacgtcttcagtggtgcttatgtgcccctgagctgccgaatcattgagcaggtgctagagcggcgaagctggcagggccttgatgaggtggtacggctgctcaactgcagtgactttgcattcacagatatgactaaggaagacaaggcttccagtgagtccctgcgcctcatcttggtggtgttcttgggtggttgtacattctctgagatctcagccctccggttcctgggcagagagaaaggctacaggttcattttcctgacgacagcagtcacaaacagcgctcgccttatggaggccatgagtgaggtgaaagcctgatgtttttcccggccagtgttgacatcttccctgaacacattcctcagtgagatgcaggcatctggcacccagctgctataaccaagtgtccaccaactacctgctaagagccgggagcatggaacgtgttgggatttagagaacattatctgagaaaagagttcacttcctgctcccaggatatttctcttttctgtttatgaagtacaacccatgctgctaagatgcgagcaggaagaggcatcctttgctaaatcctgtttgaatgtcattgtaaataaagcctctgctctcagatgtaaaaaaaaaaaaaaaaaaaaa

SEQ ID NO: 4313 - protein, 617 aa, Homo sapiens
MAFPHRPDAPELPDFSMLKRLARDQLIYLLEQLPGKKDLFIEADLMSPLDRIANVSILKQHEVDKLYKVENKPALSSNEQLCFLVRPRIKNMRYIASLVNADKLAGRTRKYKVIFSPQKFYACEMVLEEEGIYGDVSCDEWAFSLLPLDVDLLSMELPEFFRDYFLEGDQRWINTVAQALHLLSTLYGPFPNCYGIGRCAKMAYELWRNLEEEEDGETKGRRPEIGHIFLLDRDVDFVTALCSQVVYEGLVDDTFRIKCGSVDFGPEVTSSDKSLKVLLNAEDKVFNEIRNEHFSNVFGFLSQKARNLQAQYDRRRGMDIKQMKNFVSQELKGLKQEHRLLSLHIGACESIMKKKTKQDFQELIKTEHALLEGFNIRESTSYIEEHIDRQVSPIESLRLMCLLSITENGLIPKDYRSLKTQYLQSYGPEHLLTFSNLRRAGLLTEQAPGDTLTAVESKVSKLVTDKAAGKITDAFSSLAKRSNFRAISKKLNLIPRVDGEYDLKVPRDMAYVFSGAYVPLSCRIIEQVLERRSWQGLDEVVRLLNCSDFAFTDMTKEDKASSESLRLILVVFLGGCTFSEISALRFLGREKGYRFIFLTTAVTNSARLMEAMSEVKA

SEQ ID NO: 4314 - DNA, 947 bp, Homo sapiens
gacgggacgcgacgccaatcgcgacgaggcttcgccccgtggcgcggtttgaaattttgcggggctcaacggctcgcggagcggctacgcggagtgacatcgccggtgtttgcgggtggttgttgctctcggggccgtgtggagtaggtctggacctggactcacggctgcttggagcgtccgccatgaggagaagtgaggtgctggcggaggagtccatagtatgtctgcagaaagccctaaatcaccttcgggaaatatgggagctaattgggattccagaggaccagcggttacaaagaactgaggtggtaaagaagcatatcaaggaactcctggatatgatgattgctgaagaggaaagcctgaaggaaagactcatcaaaagcatatccgtctgtcagaaagagctgaacactctgtgcagcgagttacatgttgagccatttcaggtccgtggcagcccacagggtctctggtgatctgtctggggcctgagacttagaaagcaacgttgacttgggcctgcagatggaaggcttcctcgtagggatggagctagacgaagaaggagagacgaccatcttgcaactagaaaaagatttgcgcacccaagtggaattgatgcgaaaacagaaaaaggagagaaaacaggaactgaagctacttcaagagcaagatcaagaactgtgcgaaattctttgtatgccccactatgatattgacagtgcctcagtgcccagcttagaagagctgaaccagttcaggcaacatgtgacaactttgagggaaacaaagacatttctttgcgggaggctagagggctagcctctgtgctgctgctttgccgtgagtgacactggctttctatgctgtagctggaaatgcagaaatcacaaaatgaagcagtgtgtgaggggctgcgtactcaaatccgagagctctgg

SEQ ID NO: 4315 - DNA, 2135 bp, Homo sapiens
ggcacgaggggcgtttcctccaaggctgcccaccagaaggacctgcccgagagggtagagggcatagggtcaagatcaagataaggcagctccagcccctggaaggccagagacttgccagtgtcccactagcgggctcttcgcaagaatccccccgggcccgccgcagccaggcggcggccggcagagggcgctgctcgggcatggcggaggagcggccgggggcctggttcggcttcggtttctgcggcttcgggcaggagctgggctccggacgcgggcgccaggtgcacagccccagtccgctgcgggcgggcgtcgacatctgccgcgtgagcgcgagctggagctacaccgctttcgtgacccgtgagcactccccgccccgtccccacttattccagccgcgctccccagtcgcctccccgcaccgctgtggccagtccagtttgtctcccccgttcaggccgccagccccacattctgggttggtccccaattcgaccccttcccaggaacaccccgctccccccatccccgccgcctccattctggccaccctgctccaatccgccccgcaggtggaggccgcttggagctgtcgggctcagccagcggcgcggcgggccgctgcaaggacgcgtgggcctcggaggggctcctcgcggtgctgcgcgccgggccggggccggaggcgttactgcaggtctgggcggccgaatcggcgctgcgtggggagccattgtgggcccagaatgtggtgcccgaggccgaaggggaagacgatccggccggtgaggcccaggctgggaggctacccctgctgccctgcgcccgtgcctacgtgagcccgcgggcgcccttctaccggcctctggctccggagctgcgggcacgccagctggagctgggcgccgagcacgcgttgctgctggacgctgctggccaggtgttctcctggggcgggggcaggcatggacagctgggccatgggaccctggaggcagagctggagccacggctgttggaggcgttgcagggcctagtcatggctgaggtggccgcggggggctggcattctgtgtgtgtgagtgagactggggatatttatatctggggctggaatgaatcagggcagctggccctgcccaccaggaacctggcagaggatggagagactgtcgcaagggaagccacagaactgaatgaagatggttctcaggtgaagagaacgggtggggctgaggatggagcccctgcccccttcatagctgtccagcccttcccggcattactggatctccccatgggctcagatgcagtcaaggccagctgtggatcccggcacacagctgtggtgacacgaacaggggagctctacacctggggctggggtaaatatggacagctgggccacgaggacaccaccagcttggatcggcctcgccgtgtggaatactttgtagataagcaactccaagtaaaggctgtcacctgtgggccgtggaacacctacgtgtatgctgtggagaaagggaagagctgacatgtgtacgtatatgtatatgcaacacctgtgagacccccattcaggtcaaggaaaaccattgcctgcaccccaagggccccatatttgcccctccccatcacagtcctgcccttcaccctcaagcacggtcctaaacttgtctgcactttagaaacacctggagagcattgaaaactctgctgcctaaggtcagcatcaatcaaaacaatgaaatcaatgaaacaatgaaaccagagcttctaggtgtgtggcctggatagtggtagattcaaagctccacccacctcatcccaggtacatttgatgtgcagctgagattggggcacattccaggtcatcgtcttctgtcagtcatttccctgctttcgtttgaattttaccattcttgtatgcagccttatacgacatagttgtgtttgcttttgagtgttagataaatggaatcctgtgtatgtgcttttgtgtcgtttttgtcactcagcattgtataatccatccttgttgggtcctggagttcatttttaatgctatatggtgttctgttgtatgaataatacctcaagtgatacaaaaaaaaaaaaaaaaa

SEQ ID NO: 4316 - protein, 165 aa, Homo sapiens
MAEVAAGGWHSVCVSETGDIYIWGWNESGQLALPTRNLAEDGETVAREATELNEDGSQVKRTGGAEDGAPAPFIAVQPFPALLDLPMGSDAVKASCGSRHTAVVTRTGELYTWGWGKYGQLGHEDTTSLDRPRRVEYFVDKQLQVKAVTCGPWNTYVYAVEKGKS

SEQ ID NO: 4317 - DNA, 3037 bp, Homo sapiens
cgcccgcggccgaggtggacggagcctcccggctcgctgctcccgccggcggagcgaggctgccctttcttcgcagcgtgatttattttcttctttttttctgaactcttcttccagggagaggctagtggtaacaggccgagctggatggatgggtatggggagaggggcaggacgttcagccctgggattctggccgaccctcgccttccttctctgcagcttccccgcagccacctccccgtgcaagatcctcaagtgcaactctgagttctggagcgccacgtcgggcagccacgccccagcctcagacgacacccccgagttctgtgcagccttgcgcagctacgccctgtgcacgcggcggacggcccgcacctgccggggtgacctggcctaccactcggccgtccatggcatagaggacctcatgagccagcacaactgctccaaggatggccccacctcgcagccacgcctgcgcacgctcccaccggccggagacagccaggagcgctcggacagccccgagatctgccattacgagaagagctttcacaagcactcggccacccccaactacacgcactgtggcctcttcggggacccacacctcaggactttcaccgaccgcttccagacttgcaaggtgcagggcgcctggccgctcatcgacaataattacctgaacgtgcaggtcaccaacacgcctgtgctgcccggctcagcggccactgccaccagcaagctcaccatcatcttcaagaacttccaggagtgtgtggaccagaaggtgtaccaggctgagatggacgagctcccggccgccttcgtggatggctctaagaacggtggggacaagcacggggccaacagcctgaagatcactgagaaggtgtcaggccagcacgtggagatccaggccaagtacatcggcaccaccatcgtggtgcgccaggtgggccgctacctgacctttgccgtccgcatgccagaggaagtggtcaatgctgtggaggactgggacagccagggtctctacctctgcctgcggggctgccccctcaaccagcagatcgacttccaggccttccacaccaatgctgagggcaccggtgcccgcaggctggcagccgccagccctgcacccacagcccccgagaccttcccatacgagacagccgtggccaagtgcaaggagaagctgccggtggaggacctgtactaccaggcctgcgtcttcgacctcctcaccacgggcgacgtgaacttcacactggccgcctactacgcgttggaggatgtcaagatgctccactccaacaaagacaaactgcacctgtatgagaggactcgggacctgccaggcagggcggctgcggggctgcccctggccccccggcccctcctgggcgccctggtcccgctcctggccctgctccctgtgttctgctagacgcgtagatgtggagggaggcgcgggctccgtcctctcggcttccccatgtgtgggctgggaccgcccacggggtgcagatctcctggcgtgtccaccatggccccgcagaacgccagggaccgcctgctgccaagggctcaggcatggacccctccccttctagtgcacgtgacaaggttgtggtgactggtgccgtgatgtttgacagtagagctgtgtgagagggagagcagctcccctcgccccgcccctgcagtgtgaatgtgtgaaacatcccctcaggctgaagccccccacccccaccagagacacactgggaaccgtcagagtcagctccttccccctcgcaatgcactgaaaggcccggccgactgctgctcgctgatccgtggggccccctgtgcccgccacacgcacgcacacactcttacacgagagcacactcgatccccctaggccagcggggacaccccagccacacagggaggcatccttggggcttggccccaggcagggcaaccccggggcgctgcttggcaccttagcagactgctggaaccttttggccagtaggtcgtgcccgcctggtgccttctggcctgtggcctccctgcccatgttcacctggctgctgtgggtaccagtgcaggtcccggttttcaggcacctgctcagctgcccgtctctggcctgggcccctgccccttccaccctgtgcttagaaagtcgaagtgcttggttctaaatgtctaaacagagaagagatccttgacttctgttcctctccctcctgcagatgcaagagctcctgggcaggggtgcctgggccccagggtgtggcaggagacccagtggatggggccagctggcctgccctgatcctctgcttcctcctcacaaccccaagagcccccagcccggtccatccacgtctggagtctggggagaggagcagggtcttaggactctcagctctgagcatccctggcagggtcttcaacctctaatctcttcccttaagccctgtggccacacagccaggagagacttgccgctggctcccgcctcatttcagcccagggtgctcatccaggggcccagaacagtcccacctgtgctgctatgcccacagcacaaagccaggcttcactcccaaaagtgcagccaggccctggagggtgatcctgccagcagccctacagctccacaccctacccacccatcggcagcccctctgctgttccccagggacctctcatacactggccaggaggctgcagaacgtgtgtctccccctccctccaagaggtcctgctccctctgccagaaccgtgtgtgggcgggtgggagggcgctcggggcccggcccctccctctccctgctggttttagttggtccctatgttggaagtaaaaagtgaagcactttattttggttgtgtttgctcacgttctgcttggaagtggggacccctcactgcgtccacgtgtctgcgacctgtgtggagtgtcaccgcgtgtacatactgtaaattatttattaatggctaaatgcaagtaaagtttggtttttttgtt

SEQ ID NO: 4318 - protein, 434 aa, Homo sapiens
MGMGRGAGRSALGFWPTLAFLLCSFPAATSPCKILKCNSEFWSATSGSHAPASDDTPEFCAALRSYALCTRRTARTCRGDLAYHSAVHGIEDLMSQHNCSKDGPTSQPRLRTLPPAGDSQERSDSPEICHYEKSFHKHSATPNYTHCGLFGDPHLRTFTDRFQTCKVQGAWPLIDNNYLNVQVTNTPVLPGSAATATSKLTIIFKNFQECVDQKVYQAEMDELPAAFVDGSKNGGDKHGANSLKITEKVSGQHVEIQAKYIGTTIVVRQVGRYLTFAVRMPEEVVNAVEDWDSQGLYLCLRGCPLNQQIDFQAFHTNAEGTGARRLAAASPAPTAPETFPYETAVAKCKEKLPVEDLYYQACVFDLLTTGDVNFTLAAYYALEDVKMLHSNKYKLHLYDRTRDLPGRAAAGLPLAPRPLLGALVPLLALLPVFC

SEQ ID NO: 4319 - DNA, 3442 bp, Homo sapiens
agccggtgcgccgcagactagggcgcctcgggccagggagcgcggaggagccatggccaccgctaacggggccgtggaaaacgggcagccggacaggaagccgccggccctgccgcgccccatccgcaacctggaggtcaagttcaccaagatatttatcaacaatgaatggcacgaatccaagagtgggaaaaagtttgctacatgtaacccttcaactcgggagcaaatatgtgaagtggaagaaggagataagcccgacgtggacaaggctgtggaggctgcacaggttgccttccagaggggctcgccatggcgccggctggatgccctgagtcgtgggcggctgctgcaccagctggctgacctggtggagagggaccgcgccaccttggccgccctggagacgatggatacagggaagccatttcttcatgcttttttcatcgacctggagggctgtattagaaccctcagatactttgcagggtgggcagacaaaatccagggcaagaccatccccacagatgacaacgtcgtgtgcttcaccaggcatgagcccattggtgtctgtggggccatcactccatggaacttccccctgctgatgctggtgtggaagctggcacccgccctctgctgtgggaacaccatggtcctgaagcctgcggagcagacacctctcaccgccctttatctcggctctctgatcaaagaggccgggttccctccaggagtggtgaacattgtgccaggattcgggcccacagtgggagcagcaatttcttctcaccctcagatcaacaagatcgccttcaccggctccacagaggttggaaaactggttaaagaagctgcgtcccggagcaatctgaagcgggtgacgctggagctgggggggaagaacccctgcatcgtgtgtgcggacgctgacttggacttggcagtggagtgtgcccatcagggagtgttcttcaaccaaggccagtgttgcacggcagcctccagggtgttcgtggaggagcaggtctactctgagtttgtcaggcggagcgtggagtatgccaagaaacggcccgtgggagaccccttcgatgtcaaaacagaacaggggcctcagattgatcaaaagcagttcgacaaaatcttagagctgatcgagagtgggaagaaggaaggggccaagctggaatgcgggggctcagccatggaagacaaggggctcttcatcaaacccactgtcttctcagaagtcacagacaacatgcggattgccaaagaggagattttcgggccagtgcaaccaatactgaagttcaaaagtatcgaagaagtgataaaaagagcgaatagcaccgactatggactcacagcagccgtgttcacaaaaaatctcgacaaagccctgaagttggcttctgccttagagtctggaacggtctggatcaactgctacaacgccctctatgcacaggctccatttggtggctttaaaatgtcaggaaatggcagagaactaggtgaatacgctttggccgaatacacagaagtgaaaactgtcaccatcaaacttggcgacaagaacccctgaaggaaaggcggggctccttcctcaaacatcggacggcggaatgtggcagatgaaatgtgctggaggaaaaaaatgacatttctgaccttcccgggacacattcttctggaggctttacatctactggagttgaatgattgctgttttcctctcactctcctgtttattcaccagactggggatgcctataggttgtctgtgaaatcgcagtcctgcctggggagggagctgttggccatttctgtgtttccctttaaaccagatcctggagacagtgagatactcagggcgttgttaacagggagtggtatttgaagtgtccagcagttgcttgaaatgctttgccgaatctgactccagtaagaatgtgggaaaaccccctgtgtgttctgcaagcagggctcttgcaccagcggtctcctcagggtggacctgcttacagagcaagccacgcctctttccgaggtgaaggtgggaccattccttgggaaaggattcacagtaaggttttttggtttttgttttttgttttcttgtttttaaaaaaaggatttcacagtgagaaagttttggttagtgcataccgtggaagggcgccagggtctttgtggattgcatgttgacattgaccgtgagattcggcttcaaaccaatactgcctttggaatatgacagaatcaatagcccagagagcttagtcaaagacgatatcacggtctaccttaaccaaggcactttcttaagcagaaaatattgttgaggttacctttgctgctaaagatccaatcttctaacgccacaacagcatagcaaatcctaggataattcacctcctcatttgacaaatcagagctgtaattcgctttaacaaattacgcatttctatcacgttcactaacagcttatgataagtctgtgtagtcttccttttctccagttctgttacccaatttagattagtaaagcgtacacaactggaaagactgctgtaataacacagccttgttatttttaagtcctattttgatattaatttctgattagttagtaaataacacctggattctatggaggacctcggtcttcatccaagtggcctgagtatttcactggcaggttgtgaatttttcttttcctctttggggatccaaatgatgatgtgcaatttcatgttttaacttgggaaactgaaagtgttcccatatagcttcaaaaacaaaaacaaatgtgttatccgacggatacttttatggttactaactagtactttcctaattgggaaagtagtgcttaagtttgcaaattaagttggggagggcaataataaaatgagggcccgtaacagaaccagtgtgtgtataacgaaaaccatgtataaaatgggcctatcacccttgtcagagatataaattaccacatttgccttcccttcatcagctaacacttatcacttatactaccaataacttgttaaatcaggatttggcttcatacactgaattttcagtattttatctcaagtagatatagacactaaccttgatagtgatacgttagagggttcctattcttccattgtacgataatgtctttaatatgaaatgctacattatttataattggtagagttattgtatctttttatagttgtaagtacacagaggtggtatatttaaacttctgtaatatactgtatttagaaatggaaatatatatagtgttaggtttcacttcttttaaggtttacccctgtggtgtggtttaaaaatctataggcctgggaattccgatcctagctgcagatcgcatcccacaatgcgagaatgataaaataaaattggatatttgaga

SEQ ID NO: 4320 - DNA, 1054 bp, Homo sapiens
gaattccgcgggaggccacgggctttccacagcgcgggggaacgggaggctgcaggatggtcaagctgacggcggagctgatcgagcaggcggcgcagtacaccaacgcggtgcgcgaccgggagctggacctccgggggtataaaattcccgtcattgaaaatctaggtgctacgttagaccagtttgatgctattgatttttctgacaatgagatcaggaaactggatggttttcctttgttgagaagactgaaaacattgttagtgaacaacaacagaatatgccgtataggtgagggacttgatcaggctctgccctgtctgacagaactcattctcaccaataatagtctcgtggaactgggtgatctggaccctctggcatctctcaaatcgctgacttacctaagtatcctaagaaatccggtaaccaataagaagcattacagattgtatgtgatttataaagttccgcaagtcagagtactggatttccagaaagtgaaactaaaagagcgtcaggaagcagagaaaatgttcaagggcaaacggggtgcacagcttgcaaaggatattgccaggagaagcaaaacttttaatccaggtgctggtttgccaactgacaaaaagagaggtgggccatctccaggggatgtagaagcaatcaagaatgccatagcaaatgcttcaactctggctgaagtggagaggctgaaggggttgctgcagtctggtcagatccctggcagagaacgcagatcagggcccactgatgatggtgaagaagagatggaagaagacacagtcacaaacgggtcctgagcagtgaggcagatgtataataataggccctcttggaacaagtcttgcttttcgaacatggtataatagccttgtttgtgttagcaaagtggaatctatcagcattgttgaaatgcttaagactgctgctgataattttgtaatataagttttgaaatctaaatgtcaattttctacaaattataaaaataaactccactctctatgctaaaaaaaaaaaaaaggaattc

SEQ ID NO: 4321 - protein, 255 aa, Homo sapiens
MVKLTAELIEQAAQYTNAVRDRELDLRGYKIPVIENLGATLDQFDAIDFSDNEIRKLDGFPLLRRLKTLLVNNNRICRIGEGLDQALPCLTELILTNNSLVELGDLDPLASLKSLTYLSILRNPVTNKKHYRLYVIYKVPQVRVLDFQKVKLKERQEAEKMFKGKRGAQLAKDIARRSKTFNPGAGLPTDKKRGGPSPGDVEAIKNAIANASTLAEVERLKGLLQSGQIPGRERRSGPTDDGEEEMEEDTVTNGS

SEQ ID NO: 4322 - DNA, 1503 bp, Homo sapiens; identical to SEQ ID NO: 2278

SEQ ID NO: 4323 - DNA, 4131 bp, Homo sapiens
gcaccagaagccagcagtggggttgcacacgcgcctcttcacgaggtggaaacaagatggaggattcggcctcggcctcgctgtcttctgcagccgctactggaacctccacctcgactccagcggccccgacagcacggaagcagctggataaagaacaggttagaaaggcagtggacgctctcttgacgcattgcaagtccaggaaaaacaattatgggttgcttttgaatgagaatgaaagtttatttttaatggtggtattatggaaaattccaagtaaagaactgagggtcagattgaccttgcctcatagtattcgatcagattcagaagatatctgtttatttacgaaggatgaacccaattcaactcctgaaaagacagaacagttttatagaaagcttttaaacaagcatggaattaaaaccgtttctcagattatctccctccaaactctaaagaaggaatataaatcctatgaagccaagctccgccttctgagcagttttgatttcttccttactgatgccagaattaggcggctcttaccctcactcattgggagacatttctatcaaagaaagaaagttccagtatctgtaaaccttctgtccaagaatttatcaagagagatcaatgactgtataggtggaacagtcttaaacatttctaaaagtggttcttgcagtgctatacgtattggtcacgttggaatgcaaattgagcacatcattgaaaacattgttgctgtcaccaaaggactttcagaaaaattgccagagaagtgggagagcgtgaaactcctgtttgtgaaaactgagaaatcggctgcacttcccatcttttcctcgtttgtcagcaattgggatgaagccaccaaaagatctttgcttaataagaagaaaaaagaggcaaggagaaaacgaagagaaagaaattttgaaaaacaaaaggagaggaagaagaagaggcagcaggctaggaagactgcatcagttcttagtaaagatgatgtggcacctgaaagtggtgatactacagtgaagaaacctgaatcaaagaaggaacagaccccagagcatgggaagaaaaaacgtggcagaggaaaagcccaagttaaagcaacaaatgaatccgaagacgaaatcccacagctggtaccaataggaaagaagactccagctaatgaaaaagtagagattcaaaaacatgccacaggaaagaagtctccagcaaagagtcctaatcccagcacacctcgtgggaagaaaagaaaggctttgccagcatctgagaccccaaaagctgcagagtctgagaccccagggaaaagcccagagaagaagccaaaaatcaaagaagaggcagtgaaggaaaaaagtccttcgctggggaaaaaagatgcgagacagactccaaaaaagccagaggccaagtttttcaccactcctagtaaatctgtgagaaaagcttcccacacccccaaaaaatggcccaaaaaacccaaagtaccccagtcgacctaaagtcagtgattcaactggaaggaaacctcaatgctgcctccagagctttttggaaatactcagatcctggccgcctttgtaaccttctctaaacgtcaggcctggacttaaaagattttttaaaacctccataagtagtccaggggcggtggctcacgcctgtaatcccagcactttgggaggccgaggcaggcggatcacaaggtcaacgagatcgagaccatcctggccaacatggtgaaaccctgtctgtaccaaaaatacaaaaattaattgggcatggtggtggacacctgtaatcccagctactagggaggctgaggcaggagaattgcttgaacctgggaggcggaggttgcagtgagccactgcactccagcctgatgacagagcaagactcagtctcaaaaataaataaaaataataaaacctccataagtaatcctgacatatgttcctgggtataatctgtttctaaattgtccttctgtgtatttgctaatgtaatagagggaaaaatagagtgcttctctgtggttgttcagcactttaggtagccaaggtgagaggattgcttgaggccaggagtttgagactagcctgggcaacttggtaaaaccccatctctacaaaagaaaaaaaaaaattagtgtggcatggtggcatgcatctgtgctcccagctcctcacgaggctgaggtggaaggatcaagtgagcgcaagaggttgaggctccagtgagccacgatcaccccactgtgctgtagcctgggtgacagtgtgagattctgtctcagaaaaaacaaagtataacattgctttgcttctgagtatactgttggctttccaaatcagtgggtctgacttgaggtctgtgatgtgacccttttcctcacctgctcaaccattattcacatggactccatcatattcatttgtagtcattcccagagtggcccagtgagggtctcgctgtatgagagtcggctacggaatttaggagaaacagaagtttcttggctttcatgctgagcttgttggtctaagcttatgagtcactggattagcatccatatgggaagggaaattaacatggagtcatttatacagggactaaattgaatcctacctaccggaggcaagaacatgatttatcttccataagccttatcctcttcctccttattcctcagtccatatggatttgcttatgtatgacaactccaaggaatcttggaagagtagattgctaacgtttccacaattgtcaagtatattctgaggcagtaaacacctttttaggtacgtggcctttcactggttgtgaattggtatgcatccgtagtagtaagttcacagattcactgcagtgcaggaatgttcttgcatgccaaagactcaactgctttcaaagataatgtgggtgctagatgcagtggcttacatctgtaaccctgttagggtgaccagacccaacaccaggtcgtgggggtgacaaagtccagtggagtcaaaggattgagaaaaagacagtttgagagagaagtaggaccagcagaccatcgggatggtggaggctgtgaaggccgtgagctctgggagcccacactatttattggtaatccaacaaagaaacagatggtgagaatgtgaaggtcagaagggcaccttgcattaagcacatgatttacagctgtgatggtttagcatttgctctgctacttgagatgatggagagcaggttcttttaactcaagttacagtcgatcctgggagagcaaggagccagcaagtctagacattccagagccacaggccctggattttatccaagccacgagggattttatgccctgggcttagattatggtgcgtcagggcagccttccaccctttagcacagagcttggtgttccaaagaccacaaggggttttagacccttgaccctggacatattccaagactcttttacattatgtcagaatgcaagccctgcctcagcttctcccaacactcagcttttcgcaacataatcccagcactttggaacgctgggtggattgcttgaacccaggagttcgagaccatcctgggcaatatggcaaaaccccatctttaccaaaaataagctgggtgtggtggaacatgcctgtggtcccagcttcttgggaggctgaggtgggaggattgcttgaacccgggaggtagaggctgcaatgggccatgatcacgatcctgcactccagcctgggcaacagagagagacagtccctggcccactgcccccttccctggcccagtctcaaaaaaaatgaggctgggcgtggtggctcacatctgtaatcccagccaaggctggcagatcacttgaggccaggagttctgagaccagcctggcttacatggtgaaaccccatctctactaaaaatacaaaaactagccaggcatggtgggaggcacctgtaatcccagctacttgggaggctgaagcaggagaatcactttaacccgggaggtggaggttgcagtgagctgagatcacaccactgcactccagcctgggcggcagagcaaaactgaaaaaaagagaaaaaaaaaaa

SEQ ID NO: 4324 - protein, 296 aa, Homo sapiens
MEDSASASLSSAAATGTSTSTPAAPTARKQLDKEQVRKAVDALLTHCKSRKNNYGLLLNENESLFLMVVLWKIPSKELRVRLTLPHSIRSDSEDICLFTKDEPNSTPEKTEQFYRKLLNKHGIKTVSQIISLQTLKKEYKSYEAKLRLLSSFDFFLTDARIRRLLPSLIGRHFYQRKKVPVSVNLLSKNLSREINDCIGGTVLNISKSGSCSAIRIGHVGMQIEHIIENIVAVTKGLSEKLPEKWESVKLLFVKTEKSAALPIFSSFVSNWDEATKRSLLNKKKKGGKEKTKRKKF

SEQ ID NO: 4325 - DNA, 638 bp, Homo sapiens
ccagccacttccgctggtcggcgctggaggtgtccgtgggcttgtacacgtccctgtgccagtacttcagcgaggaggatgtggtgtggcggacagaggggctgctgcccctggaggagacctcgccccgccaggccgtctgcctcacccgccacctcaccgccttcggcgccagcctcttcatgcccccaagccatgagccgacagcggatgtaaactacatcgtcatgctgacatgtgctgtgtgcctggtgacctacatggtcatggccgccatcctgcacaagctggaccagttggatgccagccggggctgcgccatccccttctgtgggcagcggggccgcttcaagtacgagatcctcgtcaagacaggctggggccggggctcaggtaccacggcccacgtgggcatcatgctgtatggggtggacagccggagcggccaccggcacctggacggcgacagagccttccaccgcaacagtctggacatcttccagatcgccaccccgcacagcctgggtagcgtgtggaagatccgagtgtggcacgacaaagggctcagccctgcctggttcctgcagcacatcatcgtcagggacctgcagacggcacgcagcaccttcttcctggtc

SEQ ID NO: 4326 - DNA, 3056 bp, Homo sapiens
ctggggctgtgaccgtggggtcgaagcgcgcgtgcgcggcggcggctggcggcggcggtggggcggggcctgggctgtcagccggcctaggaggaggaaggagcctgcggcgtgcagtgtgaggggcgggacccggctgccggcggtgggtctagctgggggaggtcgggccatgctggtgggccagggcgcggggccgctggggcccgcggtggtcaccgccgcggtggtgctgctgctgagcggcgtggggccggcgcacggctcggaggacatcgtggtgggctgcggtggcttcgtcaagtcggacgtggagatcaactactctctcatcgagataaagctgtacaccaagcatgggactttgaaataccagacagactgtgcccctaataatggttactttatgatccctttgtatgataagggggatttcattctgaagattgagcctcccctagggtggagttttgagccgacgaccgtggagctccatgtggatggagtcagtgacatctgcacaaagggtggggacatcaactttgtcttcactgggttctctgtgaatggcaaggtcctcagcaaagggcagcccctgggtcctgcgggagttcaggtgtctctgagaaacactgggaccgaagcaaagatccagtccacagttacacagcctggcggaaagtttgcattttttaaagttctgcctggagattatgaaatcctcgcaactcatccaacctgggcgttgaaagaggcaagcaccacagtgcgtgtaaccaactccaatgccaatgcggccagtcccctcatagttgctggctacaatgtgtctggctctgtccgaagtgatggggagcccatgaaaggcgtgaagtttcttctcttttcttctttagtaactaaagaggatgtcctgggctgcaatgtctcaccagtgcctgggttccagccccaagacgagagtctggtgtatttgtgctacacggtctccagagaagatggctcgttctctttctattccttgccaagtgggggctacactgtgattccgttctatcgaggggagaggattacctttgatgtggcgccttccagacttgacttcacagtggagcatgacagcttgaaaatcgagcccgtgttccacgtcatgggattctccgtcaccgggagggtcttgaacggacccgaaggagatggtgttccagaagcagtagtcaccctgaataaccaaatcaaagttaaaacaaaagctgatggctcattccgccttgagaacataaccacagggacatacaccatccatgctcagaaagagcacctctactttgaaacggtcaccatcaaaattgcaccaaacacacctcagctggctgacattgttgcaacagggttcagtgtctgtggtcagatatcaatcattcgcttccccgacaccgtcaagcagatgaataaatacaaagttgtcctgtcatctcaagacaaggacaagtctttggtcaccgtggagacagatgctcatggatcattttgttttaaagcaaacccagggacttacaaagtgcaggtgatggttcctgaggcagaaaccagagcagggctgacgttgaaaccccagacatttcctcttactgtgaccgacaggcctgtgatggatgtggcctttgtacagttcttggcatcagtttctgggaaagtctcttgtttggacacctgtggtgacttgctggtgactctacagtccctgagccgccagggtgagaagcggagcctccagctctccggcaaggtcaacgccatgactttcacctttgacaacgtgctccctggaaaatacaaaataagcatcatgcatgaggattggtgctggaagaacaagagcctggaggtggaagtgctggaggatgacgtgtctgcagttgagttcaggcagacgggctacatgctgagatgttccctgtctcacgccatcactctggaattttatcaggatggaaatgggcgtgagaatgtggggatttataacctctccaaaggagtcaaccgattctgcctgtccaagcctggtgtgtacaaagtgacccctcgctcctgccaccggtttgagcaagcgttctacacctatgacacgtcttcacctagtatcttgacattgacagccattcgccaccatgtccttggaactatcaccaccgacaaaatgatggatgtcactgtgactatcaagtcttccatcgacagtgaacccgccttggtcttaggccctctgaagtctgtgcaggagctgcggagggagcagcagctggctgagatcgaggcccgcaggcaggagagggagaaaaacggcaaagaggaaggcgaagaaagaatgaccaagcctcccgtgcaggagatggtagatgagttacaaggccccttctcgtatgatttctcttactgggcgcggtctggagagaaaatcactgttacaccgtcatctaaagagctgctcttttatcccccttcaatggaagccgttgtcagtggagaaagctgcccagggaagctgatcgagatccacgggaaggcaggcctgtttttagaaggccagatccaccccgagttggaaggagtcgagattgtcatcagtgaaaagggggcaagttcaccgctgatcacagtctttactgatgacaaaggtgcctacagtgttggccccctgcacagtgacctggagtacacggtgacctcacagaaggagggctatgttctgactgcggtggaaggaaccatcggagacttcaaggcctatgccctggcaggcgtaagctttgagataaaagctgaggatgaccagcccctcccgggagtcctcttatccctgagcggtggcctgtttcgttccaacctcttgacccaggacaacggaattctgacattctcaaacctggtgacgtgttctgcaatttaccacctgcctgtcttccctgagagagagccaggatgcagcatgcgagacttacgtgttgcttgacaacgtgagaagagaaggccaatgtggagtggtttcagtttct

SEQ ID NO: 4327 - DNA, 1997 bp, Homo sapiens
agccgcctctgccgccgccgccgcgttggcctcgccgcccctgctcggacaccatgccacaaggagagtgatctcttcccctgttttcacaatggaggactccggaaagactttcagctccgaggaggaagaagctaactattggaaagatctggcgatgacctacaaacagagggcagaaaatacgcaagaggaactccgagaattccaggagggaagccgagaatatgaagctgaattggagacgcagctgcaacaaattgaaaccaggaacagagacctcctgtccgaaaataaccgccttcgcatggagctggaaaccatcaaggagaagtttgaagtgcagcactctgaaggctaccggcagatctcagccttggaggatgacctcgcgcagaccaaagccattaaagaccaattgcagaaatacatcagagagctggagcaagcaaatgacgacctggaaagagccaagcgcgccacgatcatgtctctcgaagactttgagcagcgcttgaatcaggccatcgaaagaaatgccttcctggaaagtgaacttgatgaaaaagagaatctcctggaatctgttcagagactgaaggatgaagccagagatttgcggcaggaactggccgtgcagcagaagcaggagaaacccaggacccccatgcccagctcagtggaagctgagaggacagacacagctgtgcaggccacgggctccgtgccgtccacgcccattgctcaccgaggacccagctcaagtttaaacacacctgggagcttcagacgtggcctggacgactccaccggggggacccccctcacacctgcggcccggatatcagccctcaacattgtgggagacctactgcggaaagtcggggcactggagtccaaactcgcttcctgccggaacctcgtgtacgatcagtccccaaaccgaacaggtggcccagcctctgggcggagcagcaagaacagagatggcggggagagacggccaagcagcaccagcgtgcctttgggtgataaggggttggacacgagttgccgctggttgtccaaatcaacaaccaggtcgtccagctcctgctgaagcctgttcttggtcttttccagtttatcatacgcggccgccttctcctcgtactgctgggtgaggttctcgatctccttctggaacctcttcttcccctcttccagagcttccacggtgctggcaaagtcctgcagcttcttcttcgagtcggagagctacaaggacagcgtccagggtagggtgagagggggaccatgaatggcccctgtccctggccccacagactctgagaagcgaagaccatgtctcctcgttggagaaacccaatagcaggggaagctggggggtcaagcaccatcgcaccaacactccaccgcgatctgcctgcgggggatctcagcgcagagaagttgagaggacccatgaaggaagcaaggacacggggcaggcacctggatgttgagagtggagatgtggcgctccaggttctgcttggcctccatctcctcgtccagctggtcttgcaggctgttccgctcctcctccagctggcgcagcttcgtagacacgttgagcttctgccgggtttcttcttgaagcagctcctgcaaaagggatgcaaagaggtcccagggacctgccccgaggaaggccaccccccaggtcccctggatgatgtggcaggacactcacctgggtgtcctggagctgggaactgagggacgccacgtccttggccagcttaatggccttcccctcggcctcgttaagcatccctgtgacgctctcaacttcattctaagggtgccaagagactggttagtcaaagcctctagaaggggatcctcgttgaaaggagccctttttactcaaaacacatgggctagtacttgaggtgttcactgattgagaaaatacccgtgaggtatgggactctgaaaaaaaaaaaaaaaaa

SEQ ID NO: 4328 - protein, 335 aa, Homo sapiens
MEDSGKTFSSEEEEANYWKDLAMTYKQRAENTQEELREFQEGSREYEAELETQLQQIETRNRDLLSENNRLRMELETIKEKFEVQHSEGYRQISALEDDLAQTKAIKDQLQKYIRELEQANDDLERAKRATIMSLEDFEQRLNQAIERNAFLESELDEKENLLESVQRLKDEARDLRQELAVQQKQEKPRTPMPSSVEAERTDTAVQATGSVPSTPIAHRGPSSSLNTPGSFRRGLDDSTGGTPLTPAARISALNIVGDLLRKVGALESKLASCRNLVYDQSPNRTGGPASGRSSKNRDGGERRPSSTSVPLGDKGLDTSCRWLSKSTTRSSSSC

SEQ ID NO: 4329 - DNA, 1911 bp, Homo sapiens
ggctggggaaacagaaactcgcagaagttaaaaaaatgtgcttgaggtgccactggagaataacaatcatagccaggatctgaagcctgtcagtttcctcagccgcaaattcttccatgtggggcgacctcacagagacgggatgtatgggacggcggagtgcaaagaaagatcagctggacatcatctccatggcggagacaaccatgatgccagaggagattgagctggagatggcaaaaattcagcgtctccgggaagtcttggtccgccgggagtctgagctcaggttcatgatggatgacatccagctctgcaaggacatcatggacttgaagcaggagctgcagaacttggtcgccatcccagaaaaagaaaaaaccaaactgcagaagcagagagaggatgagctaatccagaagatccacaaactggtgcagaagagagacttcctggtggacgatgcggaggtcgagcggttaagggagcaagaagaagacaaggaaatggctgatttcctgagaatcaagttaaaacctctagacaaagtaaccaaatctccagccagctcccgggcagagaagaaagcagagcccccacctagcaagcccacggtggccaagacggggctggcactgatcaaggattgttgcggggccacccagtgcaacatcatgtagcccccacgtggggtgccctgggccatggggacccccccccaccctcttgtctttatagcccccatttcaccggggcccaagagctctccaaggcagaaggggttgaaggcaagcccgtgactgtcaccagaggccatgggcacggcaggcgggcctggccaccctgtacagagtgtagcagtagggagtctctcaccgtcgcatggtcctccccagagcatgccgaacccaggagtctgtctcactgtttatccaaacaccaggaaaggtcctccctcaaaaaagcatatctccacttctctctagctgtatctaacccaccgtgtgaatgaactgggagaggggcatgctccccagctgtgtgtagtcgtgacttctcaacaatctagcaccatgtcggacacgttccccatccaccctcctagctctgctctcagagctaggcacatgggcacaggtcccctcccgtctgtcctctcccagcaactgtgccctggagggctccacatggcccccgtgtctctcgggcaccacccatatagcagtcccagagggcccatctgtaaagatcgagcttgtgtgtggtgtcgtggtcacatctcccgcttccccccatcctgtgtctgggcacagttcacatcaggacagcgtccattgtgctctcagtctgcctcaggtgtgtgcctggagggggcctggactggcatggatccagtgtgcagaagagccagcagggaaccggaagctctgatgtcaaggccagagcagttgagaatgggacccagagtagatgctgacctgggcactccaccattccggggccaccacagagatgccagcaggatgccactttgccagcccgacacacggacctttgtaaagaacagcaacaggcaggagaggcagcgtgtgaccagattgtgtcccgtcattgggtggcatatgttaactagctgccaaacaacttcaacccgtgtaattcatgtacatttgcaacagccagcccggtacagcctgtgtgacttctctgtatgtgtgtgtgtgtcgtgaccagcctaagtagttagcataactcaagatgctgatgtgcagtcacccatcagagaaaataaaaatggaaaccacgttcacagcattttaaaagtttttactttttttcttgattatggaagtaatccatgtacatagtaaatcattttaaaagtacaaaaagtatgaagaagtttgtctt

SEQ ID NO: 4330 - protein, 218 aa, Homo sapiens [sequence omitted]

SEQ ID NO: 4331 - DNA, 626 bp, Homo sapiens
ggcagatgtacagaactgaaattcgaatggcgaggatggcaagaaaagctggcaacttctatgtacctgcagaacccaaattggcgtttgtcttcagaatcagaggtatcaatggcgtgagcccaaaggttcgaaagatgttgcagcttctttgccttcgtcgagtcttcaatggaaccttcgtgaagctcaacaaggcttcgattaacatgctgaggattgtagagccatatactgcatgggggtgccccaatctgaagtcagtaaatgaactaatctacaagcgtggttatggcaaaatcaataagaagcaaattgctttgacagataacgctttgattgctcgatctcttggtaaatacggcatcatctgcatggaggatctgattcatgagatctatactgttggaaaacacttcaaagaggcaaataacttcctgtggcccttcaaattgtcttctccacgagttggaatgaagaaaaagaccacccatcttgtagaaggtggagatgctggcaacagggaggacaagatcaacaggcttattagaaaaatgaaccaaggtgtctaccatgattatttttctaagctggttggttaataaacagtacctgctctcaaattg

SEQ ID NO: 4332 - protein, 198 aa, Homo sapiens
MYRTEIRMARMARKAGNFYVPAEPKLAFVFRIRGINGVSPKVRKMLQLLCLRRVFNGTFVKLNKASINMLRIVEPYTAWGCPNLKSVNELIYKRGYGKINKKQIALTDNALIARSLGKYGIICMEDLIHEIYTVGKHFKEANNFLWPFKLSSPRVGMKKKTTHLVEGGDAGNREDKINRLIRKMNQGVYHDYFSKLVG

SEQ ID NO: 4333 - DNA, 771 bp, Homo sapiens
atgataaatggtattcagtactggactgtgcctgaggagaggcttcaactgaatgtggatgttgatgacctggactgtcagggtccacctctacctcccagagcctcagagcccacaagacaaaaaactgagcctgtgaagcgattaaaagtctggatcttagagggagctccaaggaaaactaaatccaaaatgcctcatctgggaggtgaagcaatgattgaacaaggattgctgagctttggcaaggaagaaaagggcacttgctgtcaacagaaagcaggtgttctgggaagactggaggagctgtgggtggtgaggcagacactgggcttggctctggaagcccgaactcagaacattaagctgaaccatctgaagctcctccacgaaacaggatatttgttgcagacactcagagaatctccagagaaacctggcttagaggccgtggattcagggacatcgctgaagccctgtgctggtggaattcccactactgatatcttgggccaggaactgcattctgggaaccagcactggtacgaggagctgcaggtcacagcaggcagacatggggacgacctgcgcaacaccaagcaggagattgctgagatcaaccgcatgatccagaggctgagatctgagatcgaccatgtcaagaagcagcatattatatctcaggcatcgggacaggtcactgcctatattccttcttcctccaagcaggcaagcttcatattagtgtctccacttgctggggaactttga

SEQ ID NO: 4334 - DNA, 2332 bp, Homo sapiens
gggaagggcggccgacccatataagcagcctgcggggcgttccctcgggttgtggttggtgtgcgggtttcggttggaggactcgttggggaggtggcctgcgcttgtagagactgcatccccgagacgatggcggagggagataatcgcagcaccaacctgctggctgcagagactgcaagtctggaagaacagctgcaaggatggggagaagtgatgctgatggctgataaagtcctccgatgggaaagagcctggtttccacctgccatcatgggtgtggtttctttggtgtttctgattatctactatctagatccatctgttctgtccggcgtttcctgttttgttatgtttttgtgcttggctgactaccttgttcccattctagcgcctagaatttttggctccaataaatggaccactgaacaacagcaaagattccatgaaatttgcagcaatctagtaaaaactcgacgcagagctgtgggttggtggaaacgcctcttcacactaaaggaagaaaaacctaagatgtacttcatgaccatgatcgtttcccttgctgcggttgcttgggtgggacaacaagtccacaacctgcttctcacctacctgatagtgacttccttactattgcttcctggactaaaccaacatggaatcattttgaagtacattggaatggccaagagggagataaacaaacttctcaaacaaaaagaaaagaaaaacgaatgattcatctgctttaatcagtgtgattaatgcagcacccattgccccgggaaccgtttctgctgtactatctggatactaaaatgttacggaagtagctctttgttctccctcactctgcccttagttaatagaaattcagactcgccaagtaaggcttcgtgcatagtgtcttcatgtcgcgtatagttgagcgcgttcttagcagttggcttcatggacaactcattagtgttttgacttttcttacccagcgttaattgaattcttgcttttagacaacttcctttttgtagtggtgaaccttgccctttagtacagttcaagtgaatctggataattgttcatctttgctttagcttagataccatgtagtggtctgtggctacaggaagctggttctgtctgcttccacagtctgcttaaaaaactgtctgacttcgtgaatatagagaccaagtttaccacttctgatgaagagaccaattaagattcattcctcattctgtttctttccagtgggagaagagtccccatgaaataagatgaaactgattccatgcactagtacatgtaggcttctcccttgtgcaaagcttagcaatttgtaggaaactttgatctttttgtccaagaaaaggaatgtctgacaggcttaagctttcgtccccttgcacttagactcgaagttagtaaatccttaaaggctttttaatagcagacttccaaaagattgcatttaggatttctagcatgcttttaatttcagattttcagctgacattagctatagtatacagtaggttaagactcatgtctatgactttcactctaagactggcaaaaggacagcagtcttctatgtttagtcaatattcatttcagtagaagataatcttatctaatttttgagaccagaataagccttttaaggtaaacctcaaaattatcattttatggtaatactgaccattttagtcccctaggtttgacatgggagatagtgactacactggtgtctgacttttttcctagagatttctccctgaaaaatacaagggctgttggtgagagcagacttgaggtgatgatagttggcctctggtctacaaagatttcataactccttggaaagcttcttataatcattcttaacttcttggtagctagaaatttagagtagttgaaatctttaggaatgaacttctgagggccaaaaaatgtgactgacgggaacaattcttaaactgattaactagctgtaatatagttttgtgaatttattgcactgatgttgtaccttgtggtatatctgtccctattaaataagtgttgttttctcctctttaatattgctgtgaacagtggtgcccattgtagcatatgtttgatttttttttattatttcataagaaaactacgttaattttaccttactttcattgtaaataagcctgtcttcctatctggattttttgtgtgcatacatattctactgattaactacttttgcagttttaatcctgtattatttcttctactttgttttgtgtaaaaggggaaaaaataaaaaaagctggaatcttcatgtctc

SEQ ID NO: 4335 - DNA, 2135 bp, Homo sapiens
gccccaggagcccggcgggtccgggactcccgtccgtgccggtgcgggcgccggcatgtggctgtgggaggaccagggcggcctcctgggccctttctccttcctgctgctagtgctgctgctggtgacgcggagcccggtcaatgcctgcctcctcaccggcagcctcttcgttctactgcgcgtcttcagctttgagccggtgccctcttgcagggccctgcaggtgctcaagccccgggaccgcatttctgccatcgcccaccgtggcggcagccacgacgcgcccgagaacacgctggcggccattcggcaggcagctaagaatggagcaacaggcgtggagttggacattgagtttacttctgacgggattcctgtcttaatgcacgataacacagtagataggacgactgatgggactgggcgattgtgtgatttgacatttgaacaaattaggaagctgaatcctgcagcaaaccacagactcaggaatgatttccctgatgaaaagatccctaccctaagggaagctgttgcagagtgcctaaaccataacctcacaatcttctttgatgtcaaaggccatgcacacaaggctactgaggctctaaagaaaatgtatatggaatttcctcaactgtataataatagtgtggtctgttctttcttgccagaagttatctacaagatgagacaaacagatcgggatgtaataacagcattaactcacagaccttggagcctaagccatacaggagatgggaaaccacgctatgatactttctggaaacattttatatttgttatgatggacattttgctcgattggagcatgcataatatcttgtggtacctgtgtggaatttcagctttcctcatgcaaaaggattttgtatccccggcctacttgaagaagtggtcagctaaaggaatccaggttgttggttggactgttaatacctttgatgaaaagagttactacgaatcccatcttggttccagctatatcactgacagcatggtagaagactgcgaacctcacttctagactttcacggtgggacgaaacgggttcagaaactgccaggggcctcatacagggatatcaaaataccctttgtgctagcccaggccctggggaatcaggtgactcacacaaatgcaatagttggtcactgcatttttacctgaaccaaagctaaacccggtgttgccaccatgcaccatggcatgccagagttcaacactgttgctcttgaaaatctgggtctgaaaaaacgcacaagagcccctgccctgccctagctgaggcacacagggagacccagtgaggataagcacagattgaattgtacaatttgcagatgcagatgtaaatgcatgggacatgcatgataactcagagttgacattttaaaacttgccacacttatttcaaatatttgtactcagctatgttaacatgtactgtagacatcaaacttgtggccatactaataaaattattaaaaggagcactaaaggaaaactgtgtgccaagcatcatatcctaaggcatacggaatttggggaagccaccatgcaatccagtgaggcttcagtgtacagcaaccaaaatggtagggaggtcttgaagccaatgagggatttatagcatcttgaatagagagctgcaaaccaccagggggcagagttgcacttttccaggctttttaggaagctctgcaacagatgtgatctgatcataggcaattagaactggaagaaacttccaaaaatatctaggtttgtcctcattttacaaatgaggaaactaaactctgtggaagggaaggggttgcctcaaaagtcacagcttagctgggcacagtggctcatgccgataatcccagcaattcagaaagctgaggcaggaggattacttgaggccagactgggcaatatagcaagaccccatctctaaaaaattaggcatggtggtgcatgcctgtattcccagctactcaggaggttgaggtgggaggatcacttgagcccagaagttcaaggctgcaatgagccatgattacaccacggcactacaaccttggtggcacagtgagaacctgactcttaaaaaaaaaaaaaaaaaa

SEQ ID NO: 4336 - protein, 331 aa, Homo sapiens
MWLWEDQGGLLGPFSFLLLVLLLVTRSPVNACLLTGSLFVLLRVFSFEPVPSCRALQVLKPRDRISAIAHRGGSHDAPENTLAAIRQAAKNGATGVELDIEFTSDGIPVLMHDNTVDRTTDGTGRLCDLTFEQIRKLNPAANHRLRNDFPDEKIPTLREAVAECLNHNLTIFFDVKGHAHKATEALKKMYMEFPQLYNNSVVCSFLPEVIYKMRQTDRDVITALTHRPWSLSHTGDGKPRYDTFWKHFIFVMMDILLDWSMHNILWYLCGISAFLMQKDFVSPAYLKKWSAKGIQVVGWTVNTFDEKSYYESHLGSSYITDSMVEDCEPHF

SEQ ID NO: 4337 - DNA, 1475 bp, Rattus norvegicus
ctctttccgccatctttccgcgccggccacaatggtgcgcatgaatgtcctggcagatgctctcaagagtatcaacaatgccgaaaagagaggcaaacgccaggtgcttattaggccgtgctccaaagtcatcgtccggtttctcactgtgatgatgaagcatggttacattggcgaatttgaaatcattgatgaccacagagctgggaaaattgttgtgaacctcacaggcaggctaaacaagtgtggggtgatcagccccagatttgacgtgcaactcaaagacctggaaaaatggcagaataatctgcttccatcccgccagtttggtttcattgtactgacaacctcagctggcatcatggaccatgaagaagcaagacgaaaacacacaggagggaaaatcctgggattctttttctagggatgtaatacatatatttacaaataaaatgcctcatggactctggtgcttccacttggtcgttttgagcctttacagcagtgtagccacagcttctgcggcagcatgcagttgcttcgtttatcggtgaatgcgattcccagattcaagtagttctcgtgcctcagcctcctgagtagctgggattacaggtgtgtgccaccatgtctggctgatttttgtatttttagtagaggtggggtttcaccatgttggccaggctggtctcgaactcctgatctcaagtgatctgcctgccttggtctcccaaagtgctgggattacaggtgtgaccaccacgccctgccttaagaattgttccaagagaatctggtgccacttgcaggtgcccattgaagtgcaatgggcactgttgatcactgaggaggtagtgggtgctgacccggtgctggggcctgtcccctagtctctgctttgcccttggctagctaggtggtgtgccaagtggggagagaagctaccttattaaggggcatggatcagcttcctgaaaggagggcctgcctctgtaagatatgggaagtcgctgagaatgttacagaacggccctagagatggggcagataacggcccccatttgtgagaagtgagttgggaggcatgtttggggcctctgatgtttgggaggctgtgggtaattaacatgagttttggggtccagcagcagaattcaggtttcctcttccactcagtaacctcagcatccgtatctgtaatgggaatgatacaaaacctatccccaagttgagggaaaaatgagattgtgtaaagcgcacttggcacatgacagtcacaagcatggggacagtgagtccagaaggattttcttatgccagcattgtaagccctaggatcacagggctctggcttgtttaaccatcgtgtctctggtccctagcctgcaaacctggtgtgtagggatgcctcagtcgcttacatgttgattgagtgaatcgtcggtttctttctggacactgacttcaaaaataaa

SEQ ID NO: 4338 - DNA, 2632 bp, Homo sapiens
cgcagagtccccgggccaagatggctgcgcggtgctccacacgctggttgctggtggttgtggggaccccgcggctgccggctatatcgggtagaggggcccggccgcccagggagggcgtggtgggggcatggctgagccgcaagctgagcgtccccgcctttgcgtcttccctgacctcttgcggcccccgagcgctgctgacattgagacctggtgtcagccttacaggaacaaaacataaccctttcatttgtactgcctccttccacacgagtgcccctttggccaaagaagattattatcagatattaggagtgcctcgaaatgccagccagaaagagatcaagaaagcctattatcagcttgccaagaagtatcaccctgacacaaataaggatgatcccaaagccaaggagaagttctcccagctggcagaagcctatgaggttttgagtgatgaggtgaagaggaagcagtacgatgcctacggctctgcaggcttcgatcctggggccagcggctcccagcatagctactggaagggaggccccactgtggaccccgaggagctgttcaggaagatctttggcgagttctcatcctcttcatttggagatttccagaccgtgtttgatcagcctcaggaatacttcatggagttgacattcaatcaagctgcaaagggggtcaacaaggagttcaccgtgaacatcatggacacgtgtgagcgctgcaacggcaaggggaacgagcccggcaccaaggtgcagcattgccactactgtggcggctccggcatggaaaccatcaacacaggcccttttgtgatgcgttccacgtgtaggagatgtggtggccgcggctccatcatcatatcgccctgtgtggtctgcaggggagcaggacaagccaagcagaaaaagcgagtgatgatccctgtgcctgcaggagtcgaggatggccagaccgtgaggatgcctgtgggaaaaagggaaattttcattacgttcagggtgcagaaaagccctgtgttccggagggacggcgcagacatccactccgacctctttatttctatagctcaggctcttcttgggggtacagccagagcccagggcctgtacgagacgatcaacgtgacgatcccccctgggactcagacagaccagaagattcggatgggtgggaaaggcatcccccggattaacagctacggctacggagaccactacatccacatcaagatacgagttccaaagaggctaacgagccggcagcagagcctgatcctgagctacgccgaggacgagacagatgtggaggggacggtgaacggcgtcaccctcaccagctctggtggcagcaccatggatagctccgcaggaagcaaggctaggcgtgaggctggggaggacgaggagggattcctttccaaacttaagaaaatgtttacctcatgatatcccagccgaggaaaaagatccactggaaactaggccgggaagcagcagcccctccaagggccagggcacctgggagacgggaggattccagaacagcagcactgagctcccacccgcagagcctctggacggccttggcaacagcaaaatcatgggacaacacctctctccacggaaaggtcacagtggacagcccgggcagtaggatgcagccccagaggctggtggcagtttcctgtccattggtaggtgacggcccctggctcaggcagagggagatggttagactcttgcagggctaaaactctaatttggaattgaatattgtggatatcttagttaaaggccatgcttacagcttagaaatgaagccttaagctgcatcaagttacgaagtgattaatttccttctcagcaaacctccgggaggttccagaatgagttcttcctgacaggttgtcttcactgggagcgtggggcccccaggccccaccagcaccgtcctcccctaatgaggggccctgccgaggcatcagctgctctgctcagttagtttttattcccggggtaccaagcagctgcacagtcggtgcctgggaggcacgtagaggcccagagagtccctgggggttctgctctgaccgtgtgggtggtgatccttgtcaggatgtacagtccttgctcccaccccatccgggatggccgcctgtccctgactattgagtcctgttgttgtaagccaggcatggagggctcctgcccttctgctgagccacagcccattgcagcactgtgctggccagacttcagctgccttgggaactgaagccctgccactgttgctagtcaggggcttggttctcccacttacactgttgacatctattttctgaagtgtgtttaaattattcagtgctaatcattgttttttcctttgtaaatgttgattcagaaaaggaaagcacaggctaagcagttgaaggttccccaccattcagtgagagcagaacccccattccccagcctctgctggtagcatgtcgcagtttccatgtgtttcaggatcttcgggctgtcgttagacaggttaatgaagaacacttctcaacagtttcctttttgttttcctttataattcactaaaataaagcatctattagtgtctg

SEQ ID NO: 4339 - protein, 480 aa, Homo sapiens
MAARCSTRWLLVVVGTPRLPAISGRGARPPREGVVGAWLSRKLSVPAFASSLTSCGPRALLTLRPGVSLTGTKHNPFICTASFHTSAPLAKEDYYQILGVPRNASQKEIKKAYYQLAKKYHPDTNKDDPKAKEKFSQLAEAYEVLSDEVKRKQYDAYGSAGFDPGASGSQHSYWKGGPTVDPEELFRKIFGEFSSSSFGDFQTVFDQPQEYFMELTFNQAAKGVNKEFTVNIMDTCERCNGKGNEPGTKVQHCHYCGGSGMETINTGPFVMRSTCRRCGGRGSIIISPCVVCRGAGQAKQKKRVMIPVPAGVEDGQTVRMPVGKREIFITFRVQKSPVFRRDGADIHSDLFISIAQALLGGTARAQGLYETINVTIPPGTQTDQKIRMGGKGIPRINSYGYGDHYIHIKIRVPKRLTSRQQSLILSYAEDETDVEGTVNGVTLTSSGGSTMDSSAGSKARREAGEDEEGFLSKLKKMFTS

SEQ ID NO: 4340 - DNA, 900 bp, Homo sapiens
atggtggacaagaaactggtggtggttttcggaggcacaggtgcccagggtggctccgtggcccgcacactcctggaagatgggacattcaaggttcgagtggtgacccgaaaccctaggaagaaggcagcaaaggagctgaggctgcaaggtgcagaagtagtgcagggagaccaagatgaccaggtcatcatggagctggccctgaatggggcttacgccaccttcatcgtgaccaattactgggagagctgcagccaggagcaggaggtcaagcaggggaagctgctcgctgatctggccaggcgcctgggcctccactatgtggtctacagcggcctggagaacatcaagaagctgacggcagggagattggccgccgcgcactttgacggcaaaggggaggtggaggaatatttccgggacattggcgttcccatgaccagtgtgcggctgccctgctattttgagaacctcctctcccacttcttgccccagaaagccccagacggaaagagctacttgctgagcttgcccacaggtgacgttcccatggatggcatgtccgtgtctgacctgggtcctgtggtgctcagccttttgaagatgccagaaaaatacgtcggccagaacatcgggctgagcacttgcaggcacacggccgaggagtacgctgccctgctcaccaagcacacccgcaaggtcgtgcacgatgccaagatgactcctgaggactacgaaaagcttggctttcccggtgcccgggacctggccaacatgttccgtttctatgccctgagacccgaccgtgacatcgagctgaccctgagactcaaccccaaggccctgacgctggaccagtggctggaacagcacaaaggggacttcaacctgctgtga

SEQ ID NO: 4341 - protein, 299 aa, Homo sapiens
MVDKKLVVVFGGTGAQGGSVARTLLEDGTFKVRVVTRNPRKKAAKELRLQGAEVVQGDQDDQVIMELALNGAYATFIVTNYWESCSQEQEVKQGKLLADLARRLGLHYVVYSGLENIKKLTAGRLAAAHFDGKGEVEEYFRDIGVPMTSVRLPCYFENLLSHFLPQKAPDGKSYLLSLPTGDVPMDGMSVSDLGPVVLSLLKMPEKYVGQNIGLSTCRHTAEEYAALLTKHTRKVVHDAKMTPEDYEKLGFPGARDLANMFRFYALRPDRDIELTLRLNPKALTLDQWLEQHKGDFNLL

SEQ ID NO: 4342 - DNA, 1582 bp, Homo sapiens
gaccagaggagcgagagcagcaagaaccacacccagcagcaatgtcagcggaagtggaaacctcagagggggtagacgagtcagaaaaaaagaactctggggccctagaaaaggagaaccaaatgagaatggctgacctctcggagctcctgaaggaagggaccaaggaagcacacgaccgggcagaaaacacccagtttgtcaaggacttcttgaaaggcaacattaagaaggagctgtttaagctggccaccacggcactttacttcacatactcagccctcgaggaggaaatggagcgcaacaaggaccatccagcctttgcccctttgtacttccccatggagctgcaccggaaggaggcgctgaccaaggacatggagtatttctttggtgaaaactgggaggagcaggtgcagtgccccaaggctgcccagaagtacgtggagcggatccactacatagggcagaacgagccggagctactggtggcccatgcatacacccgctacatgggggatctctcggggggccaggtgctgaagaaggtggcccagcgagcactgaaactccccagcacaggggaagggacccagttctacctgtttgagaatgtggacaatgcccagcagttcaagcagctctaccgggccaggatgaacgccctggacctgaacatgaagaccaaagagaggatcgtggaggaggccaacaaggcttttgagtataacatgcagatattcaatgaactggaccaggccggctccacactggccagagagaccttggaggatgggttccctgtacacgatgggaaaggagacatgcgtaaatgccctttctacgctgctgaacaagacaaaggtgccctggagggcagcagctgtcccttccgaacagctatggctgtgctgaggaagcccagcctccagttcatcctggccgctggtgtggccctagctgctggactcttggcctggtactacatgtgaagcacccatcatgccacaccggtaccctcctcccgactgaccactggcctacccctttctccagccctgactaaactaccacctcaggtgactttttaaaaaatgctgggtttaagaaaggcaaccaataaaagccagatgctagagcctctgcctgacagcatcctctctatgggccatattccgcactgggcacaggccgtcaccctgggagcagtcggcacagtgcagcaagcctggcccccgacccagctctactccaggcttccacacttctgggccctaggctgcttccggtagtccctgtttttgcagtacatgggtgactatctcccctgttggaggtgagtggcctgtaagtccaagctgtgcgagggggccttgctggatgctgctgtacaacttctgggcctctcttggaccctgggagtgagggtgggtgtgggtggaagcctcagaggccttgggagctcatccctctcacccagaatccctctaaccccttgggtgcggtttgctcagccccagcttatctcctcctccgcgctgtgtaaatgctccagcactcaataaagtgggctttgcaagct

SEQ ID NO: 4343 - protein, 316 aa, Homo sapiens
MSAEVETSEGVDESEKKNSGALEKENQMRMADLSELLKEGTKEAHDRAENTQFVKDFLKGNIKKELFKLATTALYFTYSALEEEMERNKDHPAFAPLYFPMELHRKEALTKDMEYFFGENWEEQVQCPKAAQKYVERIHYIGQNEPELLVAHAYTRYMGDLSGGQVLKKVAQRALKLPSTGEGTQFYLFENVDNAQQFKQLYRARMNALDLNMKTKERIVEEANKAFEYNMQIFNELDQAGSTLARETLEDGFPVHDGKGDMRKCPFYAAEQDKGALEGSSCPFRTAMAVLRKPSLQFILAAGVALAAGLLAWYYM

SEQ ID NO: 4344 - DNA, 6421 bp, Homo sapiens
cggcctggtccgggccatgtccgcgtgaggaccccgccgctgtcgccgctcccgttccggccctggcccctctgcccggcagcgccgcgcaccatgggctccattctcagccgccgcatcgcgggggtggaggacatcgacatccaggcgaactcggcctatcgctaccctccgaagtccggaaactactttgcttcgcactttttcatgggaggagagaaattcgacaccccccaccctgaaggttacctctttggagagaacatggatctgaacttcctgggcagccgcccggtccagtttccctacgtcactcctgccccccacgagcccgtgaagacgctgcggagcctggtgaacatccgcaaagactccctgcggctggtgaggtacaaagacgatgccgacagccccaccgaggacggcgacaagccccgggtgctctacagcctggagttcaccttcgacgccgatgcccgcgtggccatcaccatctactgccaggcatcggaggagttcctgaacggcagggcagtatacagccccaagagcccctcgctacagtccgagaccgtccactacaagagaggggtgagccagcagttctccctgccctccttcaagattgacttctcggaatggaaggatgacgagctgaactttgacctggaccggggcgtgtttccagtagtcatccaggctgtggtggacgaaggagatgtggtggaagtgactggccacgcccacgtgctcttggctgcctttgaaaagcacatggacggcagcttctctgtgaagcctttaaagcagaagcaaattgtggaccgggtcagctacctcctgcaggagatctatggcattgagaacaagaacaaccaggagaccaagccctcggacgacgagaacagcgacaacagcaacgagtgtgtggtgtgcctgtccgacctgcgggacacgctgatcctgccctgccgccacctgtgcctctgtacctcctgcgccgacacgctgcgctaccaggccaacaactgccccatctgccggctctttccgggccctcctgcagatccgggcggtgcggaagaagccaggagccctgtcccccgtgtccttcagccccgtcctggcccagagcctggagcatgatgagcactcttgtccctttaaaaaatcaaagccgcaccccgcctccctggccagcaagaaacctaaaagggaaacaaactctgacagcgtcccacctggctacgagcccatctcgctgctcgaggcgctcaacggcctccgggctgtctccccggccatcccctcggcccctctttatgaagaaatcacctattcaggcatctcggacggcctgtcccaggccagctgtcccctcgcggctatcgaccacatcctggacagcagccgccagaagggcaggccgcagagcaaggcccccgacagcaccctacggtccccgtcttcccccatccacgaagaggatgaggagaagctctccgaggacgtggacgcccctcccccactgggtggcgcagagctggccctgcgggaaagcagctcccctgagagtttcataacagaagaggttgatgagtcgtcgtcaccacagcaagggacccgagcagcttccattgagaatgtcctgcaggacagcagccccgagcactgtggccgaggcccacctgctgacatctacctgccagccctggggcccgactcctgctctgttggtatagacgagtaagccggtacgtgacctcccagacgcgcttcgggggctctgacgcgcgtccttggagagaggagccctcccctgctctctggcgggggttccttctggtttttgggtcttcgtccgcatccgcatcttcccaggggccctggattccgaatccagagctctccagtggctgctgcaccttcccccagaaagtggcctcctggggggtcctgactttcggggccagaggtctctccatctggactaggcggccggtcaggctcttcttccagccttgaggggccctggaacagtcccagcccaggcagggagacagacacagcccaggtgcgccagagccactgtccactgcgggaggcaggagcttgagggatgagggcagcaccgtggagggaaccccagggagacatggggtgagcgtcccaaggggagaggcctgggcctggccttgttccggatggtcccaccatgagttcgcatcggtcctgcagcagacacgttaggacgctcagcaggtccactcccgtgttccggtcgtggctttaacaattcatggggaaagaatgcgccccgattgggagagcccctggatcacgtcttcccaagctcagtccctgtctcttggagggagtccgtcctcgaggggccctctggtgcccaggggagagtatcttgcgtcctgtcctgagggcgtccgctcacacagccacctgctcccccgctccctccttcccttgtcagcatggccaccgtgggcctggcatcaccatgggcctggcacacagtccctcgtgggctgcctttgtgccatgagcccactgctgccgactcacctgtccctcccagtactggaaccttctggaacaccagcactaaaagataggaggccctgtgaggttggcatcccccatcccccccaagaggcgccctctaccagggtggcccaggtgagtgttttacagaaggcggctctgtccaggcagtggttcgcacctataagcccggtactttgggagaccgaggggatagatcacttgagcccaggaattcaagatcagtgtagaaaacatagaccccctctctatgaaaaataaaaaattggcttgggcgtggtagcttgtgcctgtggtcccagctactcaggggtgctgaggtgggaggattgccggagctggggaggtcaaggcccactccagcctgagacgctgtctcaataaaaaaaaatacacacacacccacccacccactccagcctgagaccctgtctcaagaaaaaaaaaatacacacacacacacacacacacacacacacgggggagagagagaaggcagctccaggagtgccaccaaaatgtaggcagacggattggggaccctctgccttcccagagggtcttggcacacaagctgcgtgcagctctggtctgccgaggcccatgcagcctgctgggaggtgcctggccgggggtgcaggctctaagaggccctttccccttgggtggacttgagccgggtcagggagaacttcgcttcttttgactgcgctctgcattcccatgaacctctgtcttcttgagcccagcgagtccctctgttgacccctgtcctgagccattatacccctagattgaaacagtcagcacctttcagacggccccggcctgcgcatcggtggaaggtgccgtgcgaatgtcacgattcaggtcaagcttccggagctggggagtgcaggtgtgatctagaacagggctcacagcctcggaaacctgctctcgccgcggcccccgaagaaaatagacgcccttcaccggagagtggggcctgggccgtgtctgctgggagccatgtgtcagggctggtggctgggtgtcaggcagccctgaggccatgctggccccgtcccaggctctgcaccagcaccattgcccaagccccagggacgccagacccatctggggacagcgcccggcggcgtcgtgcaggccacagtctgggcattggggctctgtgggaggctcctctctttgccttgcagtagccatccgggggctactctgagcacgggcttgttctcacccagggccgctccccacccctgcaccctgggttgaccgagttccaccctaacccagccgtaagaaccttggcaggacagtggctggccacatcccaggaaaccggaaccagggcaagggcaggaggcccagagggcatccaccgcggtgccgtgtcgcgctctgactcggggctgcagatctgctgtgggtgtccggggatctgggatcgtctgtcccaagagggacacagcgtatttggcacagttagggagtccccgggcccttggtgtgctcacatctgagtgaatgctgttgtggccacaggcggcgggagtgggggtgctggatggcccagcccctctggggctccagatcggtaggagcgggtggcgtggcaccaggcatccgagtgtgaccctcctccctctgctcccacctgcaggacggcccacctccatggagacggcccacggcctcgccaccaccagccccacctggcctccacttggtggccccagccccgatcccagcgccgccgagctgaccccactctgagagcctggccgagctggcagcatggagccctcggctccccagactttgccgaggggctgctccggaccccgttgtgagccggcctcctgtctgcatgccccctgtggccaccaggctccgaggggccgtggtgactcttgatcaaagagcacagtgaactgtcccttctgagtctcccttttctacagttgatatatttgtaactggtacaagatgaaggacagcagctttccatccctagttcagagcccccgttccccagggtcctgtgggctgagcggctggggctggggctgcccacgtgtggcctccgctggctctgcctgctcctgcaacagtgcggtccctgcccggagaactcaggaggcctgcagaagagaactgattggtggtcgaagcaccatcttcacagatgttcaggggcagtggggggctccaggcacggtcaatgaaggaaacagtgcctgtccacccaccctgcgtgtcactgtggcggcctggctgtcgctgctttttgtcctctgccgtgtttgcgcggcctcagtgccctccctggtgcgtctgcgctggggccctcagtgctcggggccttggggtgcatgggtgccgccctgggcagctagagtgtctcagcccggtgctgggcctggccgaggggcggaggcacagctgcttccagcagccagcattcagtggccttgtcaccaagctccacacctcctcctggtgctggctttggtgacatcacaaggcccctccaggtgcaggggcttctgtttggcaggcccctgccagggaggacctggtggcctcctcattctcttttgccattggaatgtccccttgcagttctcttctctttttttttttttttgagatggagtttcactcttgctgcccaggctggagtgcagtggctcaatctcgggtcactgcaacctccgcctcccgggttcaagtgatcgtcctgccttaggctcctgagtagctggggattacaggtgcctaccagcatgctcggctaatttttttgtatttttagtagagaagggatttcaccatgttggccgggctggtctcaaactcctaaggtcatccacctgcctcggcctcccagagtgctgagattacaggcgtgagcctccgcgcccggcccccttgcagttctctctgatttggtttgttctgtctcaggcttctgtggcaggactggcccagggaggaggaagccagcagcacacctggggaatggggtcccggccgggaggcttggcctctgggcgacctcgtcctgttttttttgtttgtttgtttgtttttttaaaggtaaacctcctgggccgcagatggcaaagggagtgcctgggcctggtgacccagggctggatccacccctgcggagccctgggccaggcaggtgtctgctgctcacctggctctggagggctgccctgcagctgggcctggggacaggtcggctgtggggcagctcagtaccctccctgaggctcacggtggctccgagcatgaggtccgcctcctgggcgagacccagcagtggacagcatggtcctcacacccagctccctgcacacccaggccagccacccctcccgctcgtgcacaggcacgcagatgcgctcacacgtacacacacacaaatgcacgcccacttgcacatgctcacgcacatgttcacacatgcacactcacgctcacacatgctgtcacgcatacacacacgcacatactcctgcacatgttcccatgcatgtgtgtgcactcggaccgagcatctcccacgcacctctaccccaccccaagcacctctctccccccatgcacctctccccaacaacacacacagccccctgcaccgcccgccccccgcccccaccaaggccccagcctctggccatcagtcctggtgccagagctttgcgtgaagttcgggccgcagagtggcccgctgggactcccatgtgctgccgtctgatgtgctcagatgggctcatcgttggttcgtttttactgtatatttatagtaataaaatcatgcagc

SEQ ID NO: 4345 - protein, 350 aa, Homo sapiens
MGSILSRRIAGVEDIDIQANSAYRYPPKSGNYFASHFFMGGEKFDTPHPEGYLFGENMDLNFLGSRPVQFPYVTPAPHEPVKTLRSLVNIRKDSLRLVRYKDDADSPTEDGDKPRVLYSLEFTFDADARVAITIYCQASEEFLNGRAVYSPKSPSLQSETVHYKRGVSQQFSLPSFKIDFSEWKDDELNFDLDRGVFPVVIQAVVDEGDVVEVTGHAHVLLAAFEKHMDGSFSVKPLKQKQIVDRVSYLLQEIYGIENKNNQETKPSDDENSDNSNECVVCLSDLRDTLILPCRHLCLCTSCADTLRYQANNCPICRLFPGPPADPGGAEEARSPVPRVLQPRPGPEPGA

SEQ ID NO: 4346 - DNA, 1474 bp, Homo sapiens
agacgccgggggcggacgggaggaccggaggaccgaggacagaaagattggtggacaggagcagcggccggtggggagggcgctcggcggcggcctgcggccatggccaccgtgatggcagcgacggcggcggagcgggcggtgctggaggaggagttccgctggctgctgcacgacgaggtgcacgctgtgttgaagcagctgcaggacatcctcaaggaggcctctctgcgcttcactctgccgggctccggcactgaggggcccgccaagcaagagaacttcatcctaggcagctgtggcacagaccaggtgaagggtgtgctgactctgcagggggatgccctcagccaggcggatgtgaacctgaagatgccccggaacaaccagctgctgcacttcgccttccgggaggacaagcagtggaagctgcagcagatccaggatgccagaaaccatgtgagccaagccatttacctgcttaccagccgggaccagagctaccagttcaagacgggcgctgaggtcctcaagctgatggacgcagtgatgctgcagctgaccagagcccgaaaccggctcaccacccccgccaccctcaccctccccgagatcgccgccagcggcctcacgcggatgttcgcccctgccctgccgtccgacctgctggtcaacgtctacatcaacctcaacaagctctgcctcacggtgtaccagctgcatgccctgcagcccaactccaccaagaacttccgcccagctgggggcgcggtgctgcatagccctggggccatgttcgagtggggctctcagcgcctggaggtgagccacgtgcacaaagtggagtgcgtgatcccctggctcaacgacgccctggtctacttcaccgtctccctgcagctctgccagcagctcaaggacaagatctccgtgttctccagctactggagctacagacccttctgatcacagcacccaggagcttgtctccaggaaggcggccccgtcccctactcatacccaccacagagcaccagccagtgccaacgccaggctgctatttatctccctatcccaccccctaccccacctaacacatttgcactgccaggaatggacactggaagtgccaggaggaaggaaggctggtttggtggggtagtggggaggtcagggaggcggggccaagggtgtcccacattcccaacaccgccctctgatcaccatgggaatctttggactcaggacagggccaggtgcagggctctccctcctctccccttcgctgtcccctccccctggagggcatggtgtcggggggtggcactgagctatgagtcccggggatggtgaggaacgccacagacagagccaccctaggagtgagtatagtgctggtgactgtgtttcatagccccagtccagggctgtctaagaaataaagatcatcagactccaaaaaaaaaaaaaaaaa

SEQ ID NO: 4347 - protein, 287 aa, Homo sapiens
MATVMAATAAERAVLEEEFRWLLHDEVHAVLKQLQDILKEASLRFTLPGSGTEGPAKQENFILGSCGTDQVKGVLTLQGDALSQADVNLKMPRNNQLLHFAFREDKQWKLQQIQDARNHVSQAIYLLTSRDQSYQFKTGAEVLKLMDAVMLQLTRARNRLTTPATLTLPEIAASGLTRMFAPALPSDLLVNVYINLNKLCLTVYQLHALQPNSTKNFRPAGGAVLHSPGAMFEWGSQRLEVSHVHKVECVIPWLNDALVYFTVSLQLCQQLKDKISVFSSYWSYRPF

SEQ ID NO: 4348 - DNA, 1909 bp, Homo sapiens
gtcatggcgcccgaggagaacgcggggaccgaactcttgctgcagagtttcgagcgccgcttcctggcggcacgcacactgcgctccttcccctggcagagcttagaagcaaagttaagagactcatcagattctgagctgctgcgggatattttgcacaagactgtgaagcatcctgtgtgtgtgaagcacccgccgtccgtcaaatatgcccggtgctttctctcagaactcatcaaaaagcacgaggctgtccacacagagcctttggacgagctgtatgaagcgctggcggagaccctgatggccaaggagtccacccagggccaccggagctatttgctgccctcgggaggctcggtcacactctccgagagcacggccatcatctcctacggtaccacaggcctggtcacatgggacgccgccctctaccttgcagaatgggccatcgagaacccggcagtcttcactaacaggactgtcctagagcttggcagtggtgctggcctcacaggcctggccatctgcaagatgtgccgcccccgggcatacatcttcagcgactgtcacagccgggtccttgagcagctccgagggaatgtccttctcaatggcctctcattagaggcagacatcactgccaagttagacagccccagggtgacagtggcccagctggactgggacgtcgcgacggtccatcagctctctgccttccagccagatgttgtcattgcagcagatgtgctgtattgcccagaagccatcatgtcgctggtcggggtcctgcggaggctggctgcctgccgggagcaccagcgggctcctgaggtctacgtggcctttaccgtccgcaacccagagacgtgccagctgttcaccaccgagctaggccgggccgggatcagatgggaagtggaacctcgtcatgagcagaaactgtttccctacgaagagcacttggagatggcaatgctgaatctcaccctgtaggactcacacacgactccaacgggattgtgagaatcaagtcactctcatgggaagaatttttatatgggaaagcggataaaactttcattggactggaatgtttggagaatgttaatttccaaatcaggaaccacaaactgccctctaataagacatcggctatctaagcgtgtgggtgccccctttctgccagcagttctggttcttaagaaaatcaccataaatcagacatgaaaattctggctccaaaaatagcattttctttgtgcaaataaaaacgtgtgtatcaagtatgatgttcccccaacgtggacacactcagttcctcacaaagccaagcccactgcagctgccacatccctgggcttacggtgcagcaggtgcttttttcaagacaggaatcaaaatgttaggaacacggcagaaaggggacacctggagaccaaacgcaggatgaggagttctgcagaggtcacagggaagtcacagaacagtaatacgctagcaggggcatggggcgtgaagaacagaagaagagaggaagcgtttccaagcctccagagaagaaatcaaggccaaccaaagcttcccgggtcacagaaccaattcttttaccaggcagtaccactgctgtcatttcagcttctggccactgggaggtgctgctcgaaagggtttgccctgagactccaagaagaagctgcgggaaggacagcaggggtcctggggttttagcctctggcccaggagttatgtgtccataaccaaagggagcacagtctgcacccagctctcatcccatcggagctgctgcgactcccgcaggttcttccggaactggtttagcttgcccgcaggatcaggaaagtttgagaaaagcatctgcaaaaaaataaagagcagagcttacctc

SEQ ID NO: 4349 - protein, 330 aa, Homo sapiens
MAPEENAGTELLLQSFERRFLAARTLRSFPWQSLEAKLRDSSDSELLRDILHKTVKHPVCVKHPPSVKYARCFLSELIKKHEAVHTEPLDELYEALAETLMAKESTQGHRSYLLPSGGSVTLSESTAIISYGTTGLVTWDAALYLAEWAIENPAVFTNRTVLELGSGAGLTGLAICKMCRPRAYIFSDCHSRVLEQLRGNVLLNGLSLEADITAKLDSPRVTVAQLDWDVATVHQLSAFQPDVVIAADVLYCPEAIMSLVGVLRRLAACREHQRAPEVYVAFTVRNPETCQLFTTELGRAGIRWEVEPRHEQKLFPYEEHLEMAMLNLTL

SEQ ID NO: 4350 - DNA, 1704 bp, Homo sapiens
ggcacgagggagagatcgtccaggaggcggtgttgatgcggcaaagggcaacaggaagggcattaggacttgaaatcggagacgcacgcaggggagggagtcagtgtcggaacctggtaggccctgggagaactccggcttttcgtctgcgtgagctggagaagagccgaaggtttctgcgcacagcacggacctgcgtgcctcagctttaaggaaatcaccgtggccgccgctgtgaacgcagagaagggcgcgagcgtgggagcaggaacccaaggcggtgggaaacggtggggctttctgagtgtattggaaagtagagcccacagatctgctgcagaccagaaaggggcgcgagaaagagcggacagaggcagacgccggggctggcggcgatggagcagcagtcggaggacgcggaaggcctgcgagagtcgcccgcggcccagcgccggccttcgggtcccaccttgcgggtgatgttgtgcacgtaggggcacgtgttgcaggcgaagcggtggcagcgttgtccctcctccacgatcagcccgttcccgcagccggggcagaacagcagcatggtctcgaactccgcaggctccaactcccggcagctcccactgccgctcagcgccgatgcgccgcccgcctcgagctcacattggtcctggcagccttcccgccacaccaaccaaccaatagacagggcgattctgcgctcccggccctgctgcaggctgtctcgcacttgtcattggtcactgcagccgccccaccccccccggcgcgccagtggctgggcggcctcgctggggcgggccgcagttcctgcgcgtgcgcgcttggcctccctagtgcgggctggcagtgcgggcagagcccggctgagaggggcggccctggaggagacggaggccgcgggtgggcccgaggcgcaagaggaagatgaggacgaagaagaggcgctgccgcactccgaggccatggacgtgttccaggagggtctggctatggtggtgcaggacccgctgctctgcgatctgccgatccaggttactctggaagaagtcaactcccaaatagccctagaatacggccaggcaatgacggtccgagtgtgcaagatggatggagaagtaatgcccgtggttgtagtgcagagtgccacagtcctggacctgaagaaggccatccagagatacgtgcagctcaagcaggagcgtgaagggggcattcagcacatcagctggtcctacgtgtggaggacgtaccatctgacctctgcaggagagaaactcacggaagacagaaagaagctccgagactacggcatccggaatcgagacgaggtttccttcatcaaaaagctgaggcaaaagtgagcctccagacaggacaaccctcttcatcactggtggctgagctttttcccagcaggaatgggtcctcgaatcatcgtgcctctttcacagaaaggacgttgtggtggcctcaccccaggcatgcccaacagtaactgtcagcataaacctgggggccctcaggactaggacagggtgagccagtgctccctcctttcatgtacttggcctgagactgacctctccctaggtccaaatgccctagtcacatggcagacccacggcctggcccactgtataaaataaacctgtttgcttcttaaaaaaaaaaaaaaaaaaaaaa

SEQ ID NO: 4351 - protein, 132 aa, Homo sapiens
MDVFQEGLAMVVQDPLLCDLPIQVTLEEVNSQIALEYGQAMTVRVCKMDGEVMPVVVVQSATVLDLKKAIQRYVQLKQEREGGIQHISWSYVWRTYHLTSAGEKLTEDRKKLRDYGIRNRDEVSFIKKLRQK

SEQ ID NO: 4352 - DNA, 1107 bp, Homo sapiens
cctgggcccccatgccgtgcagctcgcacatatgtggggcagagcagccaccctgcccccagcagcagccgtccatcgtcagacgtgatcatttcctgaggcctcgagtgtgtcagggtgtttgtgcctcataacaacccacaggatggtcacccccgctttgcagatgaagaaaccaaagcagttttgccgacggatggggcaaaagaagcagcgaccagctagagcagggcagccacacagctcgtccgacgcagcccaggcacctgcagagcagccacacagctcgtccgatgcagcccaggcaccttgccccagggagcgctgcttgggaccgcccaccactccgggcccataccgcagcatctatttctcaagcccaaagggccaccttacccgactggggttggagttcttcgaccagccggcagtccccctggcccgggcatttctgggacaggtcctagtccggcgacttcctaatggcacagaactccgaggccgcatcgtggagaccgaggcatacctggggccagaggatgaagccgcccactcaaggggtggccggcagaccccccgcaaccgaggcatgttcatgaagccggggaccctgtacgtgtacatcatttacggcatgtacttctgcatgaacatctccagccagggggacggggcttgcgtcttgctgcgagcactggagcccctggaaggtctggagaccatgcgtcagcttcgcagcaccctccggaaaggcaccgccagccgtgtcctcaaggaccgcgagctctgcagtggcccctccaagctgtgccaggccctggccatcaacaagagctttgaccagagggacctggcacaggatgaagctgtatggctggagcgtggtcccctggagcccagtgagccggctgtagtggcagcagcccgggtgggcgtcggccatgcaggggagtgggcccggaaacccctccgcttctatgtccggggcagcccctgggtcagtgtggtcgacagagtggctgagcaggacacacaggcctgagcaaagggcctgcccagacaagattttttaattgtttaaaaaccgaataaatgttttatttctag

SEQ ID NO: 4353 - DNA, 3201 bp, Homo sapiens
ttcccatccgcaccagcaagaggggcccctgtgccccaaacgcgaaccgtacggctccagacagcaccgcggaactcggtggcttccagaaggccccgcgcctgcgcattccgctgcctgcgcctgcgcctgcgcctgcgccgttctcccggccgccgccttagcacctcctccggacggtgtcgccgaagtctcgcgagcccggagcgtggcacgtgggccccctccgcctccggctccgtcctcctctggccccctccgcccccggccccggccccacggcgggatgcgggacaacaccagccccatcagcgtgattctggtgagctcggggagcaggggcaataagctgctgttcaggtaccccttccagagaagccaggagcacccggcgtcccagacaagtaagccgcgtagcagatacgctgccagcaacacgggcgaccatgctgatgagcaggacggcgattccaggttttcagatgttattctggcaacaattttggcaaccaagtctgaaatgtgtggccaaaaatttgaactgaagattgataatgtgcgatttgttgggcacccaacactgctacagcatgctctggggcagatctccaaaacagatccttccccgaagagggaagcacctactatgattctttttaatgtggtgtttgcactgagggccaacgcagacccgtcagtgataaactgtctgcataacctgtcccgtcgtatcgccaccgtgctgcagcacgaggagcgccgctgccagtacctcacccgggaggccaagctgatcctggcgctccaggatgaggtgtccgccatggctgatggaaatgaaggtcctcagtccccattccatcacatcctgcccaagtgcaagctggccagggacctcaaggaagcttatgacagcctgtgcacgtcgggcgtagttcggcttcacatcaacagctggctggaggtgagcttctgcctgccccacaagatccactatgcggcctccagtctgatccccccagaggccatcgaacggagcctgaaagccatccgcccctaccatgccctgctgctgctcagtgatgagaagtccttgctgggtgagcttcctattgactgctcccctgccctagtgcgggtgatcaagaccacatctgctgtgaagaacctgcagcagctagcccaagatgcggacctggccttgctgcaggttttccagcttgcagctcatctggtgtactggggcaaggccatcatcatctacccgctgtgtgagaacaacgtctacatgctgtctcccaatgccagcgtatgtctgtactccccgctggccgagcagttctcccaccagttcccatctcatgacctgccgtccgttcttgccaagttctccttgccggtctccttgtcagaatttaggaatcccctggcccccgctgtgcaggagacccagctcatccagatggtggtgtggatgctgcagcgccggcttctcatccagctgcacacctatgtctgcctgatggcctcacccagcgaggaggagccccgtccgcgagaggacgacgtccccttcactgcccgggtcggcggtcgcagcctcagcacgcccaacgccctcagctttggctccccaaccagcagcgatgacatgaccctcaccagccccagcatggacaactccagcgcagagctacttcccagcggggactcgccactgaaccagaggatgacggagaacctgctggccagctgtcggagcatgaacgcgcagccatcctcagtgtacccgcagcccagaaccctgaggacctccgcatgtttgccaggctccttcactacttccgcggccgccaccacctggaggagattatgtacaacgagaacacgcggcgctcccagctgctcatgctgtttgacaagttccgcagcgtgctggtggtgaccacccacgaggaccctgtcattgccgtcttccaggctctgctcccctgagcccaggcggagggcggaaggctgctggggtgcgcaggtgggcgctcgcgtctccccaccccagggctccccccgtgctgaggctgagccctcttggccctgaggcctggcattgggtggatgcgggctggccgtggcccagtgaagcctgcagagccccgctgtccttgcccctggtggttccgctgtggggctgctgccctctgtgttcctacgcttccctccagtccttgccgcacgcgtaggcatctccacgctggaggggggcctgccaggactcctgtctctgggtgaggccgcatccttcaaggcccatgtgggctgtgcgtttctcagaccctccttctgtccctacacctgctccttggaccccccagtctgtggccaccctgaagaatgtgcagaaacacttgtgtggcctgtccctgtctctctgacagccttctatttgtgaagtgccctgtggccccctccccagcacctctgtctgccatgcgcttcttcctcccaggctaccctgagcctttcctggcccagtcctcaccacagtccacagaagccgcaaacaggctcatagccaagctgtgacctggtcctgaccatctggggcacgagggcctgggctggccctgctaggctggagaagccctgtcacctgtgcacatcttgctggtggaggcatggcccactgtgcaggaccccaccctcgggggctttcggctcccacactgatgattctccccagcatccacaccgggcctggcgctacgtactcaggcccccagctctcgtgtcctggaggaagagctagctccagacatgggttgatcacctagaggagctctggctaaggcacagttttctagaaataaaacatttattcggtttggaaaggccccttggattcctggctggggacaatgatgacctggaccctggccagaagagccctggccctccagcaaggcagcacctgctctgatgcacctgtgcacccctggccctcccagccacctgggagtccgaagcttagcctggaggtggccaagccagtccctactcttgggctgcggccacgtgaggctccgcatcagcagccaggggcgagcactagtggacaaagccagcaaatgcggcgttcctgtgagcagataccctcaaccagccagctgtcaaaagtatttcaagataaaatccaggccaagc

SEQ ID NO: 4354 - DNA, 575 bp, Homo sapiens
actcttctggtccccacagactcagagagaacccaccatggtgctgtctcctgccgacaagaccaacgtcaaggccgcctggggtaaggtcggcgcgcacgctggcgagtatggtgcggaggccctggagaggatgttcctgtccttccccaccaccaagacctacttcccgcacttcgacctgagccacggctctgcccaggttaagggccacggcaagaaggtggccgacgcgctgaccaacgccgtggcgcacgtggacgacatgcccaacgcgctgtccgccctgagcgacctgcacgcgcacaagcttcgggtggacccggtcaacttcaagctcctaagccactgcctgctggtgaccctggccgcccacctccccgccgagttcacccctgcggtgcacgcctccctggacaagttcctggcttctgtgagcaccgtgctgacctccaaataccgttaagctggagcctcggtagccgttcctcctgcccgctgggcctcccaacgggccctcctcccctccttgcaccggcccttcctggtctttgaataaagtctgagtgggcggc

SEQ ID NO: 4355 - protein, 142 aa, Homo sapiens
MVLSPADKTNVKAAWGKVGAHAGEYGAEALERMFLSFPTTKTYFPHFDLSHGSAQVKGHGKKVADALTNAVAHVDDMPNALSALSDLHAHKLRVDPVNFKLLSHCLLVTLAAHLPAEFTPAVHASLDKFLASVSTVLTSKYR

SEQ ID NO: 4356 - DNA, 576 bp, Homo sapiens
actcttctggtccccacagactcagagagaacccaccatggtgctgtctcctgccgacaagaccaacgtcaaggccgcctggggtaaggtcggcgcgcacgctggcgagtatggtgcggaggccctggagaggatgttcctgtccttccccaccaccaagacctacttcccgcacttcgacctgagccacggctctgcccaggttaagggccacggcaagaaggtggccgacgcgctgaccaacgccgtggcgcacgtggacgacatgcccaacgcgctgtccgccctgagcgacctgcacgcgcacaagcttcgggtggacccggtcaacttcaagctcctaagccactgcctgctggtgaccctggccgcccacctccccgccgagttcacccctgcggtgcacgcctccctggacaagttcctggcttctgtgagcaccgtgctgacctccaaataccgttaagctggagcctcggtggccatgcttcttgccccttgggcctccccccagcccctcctccccttcctgcacccgtacccccgtggtctttgaataaagtctgagtgggcggc

SEQ ID NO: 4357 - protein, 142 aa, Homo sapiens; identical to SEQ ID NO: 4355

SEQ ID NO: 4358 - DNA, 1542 bp, Homo sapiens
ccgacgcgaccatcgtttgtcgacgccgctgccaccgcctgcctgagagaagtcgtcgcggccgaccccgtcgcctccgccggctaccatgtccgcccaggcgcagatgcgggccctgctggaccagctcatgggcacggctcgggacggagacgaaaccagacagagggtcaagtttacagatgaccgtgtctgcaagagtcaccttctggactgctgcccccatgacatcctggctgggacgcgcatggatttaggagaatgtaccaaaatccacgacttggccctccgagcagattatgagattgcaagtaaagaaagagacctgttttttgaattagatgcaatggatcacttggagtcctttattgctgaatgtgatcggagaactgagctcgccaagaagcggctggcagaaacacaggaggaaatcagtgcggaagtttctgcaaaggcagaaaaagtacatgagttaaatgaagaaataggaaaactccttgctaaagccgaacagctaggggctgaaggtaatgtggatgaatcccagaagattcttatggaagtggaaaaagttcgtgcgaagaaaaaagaagctgaggaagaatacagaaattccatgcctgcatccagttttcagcagcaaaagctgcgtgtctgcgaggtctgttcagcctaccttggtctccatgacaatgaccgtcgcctggcagaccacttcggtggcaagttacacttggggttcattcagatccgagagaagcttgatcagttgaggaaaactgtcgctgaaaagcaggagaagagaaatcaggatcgcttgaggaggagagaggagagggaacgggaggagcgtctgagcaggaggtcgggatcaagaaccagagatcgcaggaggtcacgctcccgggatcggcgtcggaggcggtcaagatctacctcccgagagcgacggaaattgtcccggtcccggtcccgagatagacatcggcgccaccgcagccgttcccggagccacagccggggacatcgtcgggcttcccgggaccgaagtgcgaaatacaagtaactactctgactccttcggtagctgcaaccaggagtgagcccttctctgtgttcccagggtctgctgagggccgtgtctggtggggatggggctgggctcaccctcaggagtagggctggggagtcgtgaacgggactcaggtgtgggaagaggcgagagggctgtggaggagctcgcacggcgccaggtgatgggctgcacaggcactgtcccctgcctgcgtcctggggcctgtgcactgttgcgtccatgctcagagtggctgagacttgtgtcctgaccaggccctgcttacctctgttttggtttttgtttttgatatttttttttccattgtgtttttacgtagtgtcatgttctgtgcatatagtgttgtattctcctttgcactgtttatgttacagtgaaggctctccttattaaaaatcttcgcaaaggtcaaaaaaaaaaaaaaaaaaaaaaaaaaaaaaaaaaaa

SEQ ID NO: 4359 - protein, 325 aa, Homo sapiens
MSAQAQMRALLDQLMGTARDGDETRQRVKFTDDRVCKSHLLDCCPHDILAGTRMDLGECTKIHDLALRADYEIASKERDLFFELDAMDHLESFIAECDRRTELAKKRLAETQEEISAEVSAKAEKVHELNEEIGKLLAKAEQLGAEGNVDESQKILMEVEKVRAKKKEAEEEYRNSMPASSFQQQKLRVCEVCSAYLGLHDNDRRLADHFGGKLHLGFIQIREKLDQLRKTVAEKQEKRNQDRLRRREEREREERLSRRSGSRTRDRRRSRSRDRRRRRSRSTSRERRKLSRSRSRDRHRRHRSRSRSHSRGHRRASRDRSAKYK

SEQ ID NO: 4360 - DNA, 809 bp, Homo sapiens
agcggcgagggctggatcctgggccaaatatatgccaacaacgacaagctctccaagaggctgaagaaagtgtggaagccacagctgtttgagcgagagttctacagtgagatcctggacaagaagttcacagtgactgtgaccatgcggaccctggacctcatcgatgaggcttacgggctcgacttttacatcctcaagaccccgaaggaggacctgtgctccaagtttgggatggagctgaagcgagggatgctgctgcggcttgcccggcaggacccccagctgcaccccgaggaccccgagcggcgggcagccatctacgacaagtacaaggaatttgccatcccagaggaggaggcagagtgggtgggcctcacgctggaggaggccattgagaagcagagacttttggaggagaaggaccctgtacccctgttcaagatctatgtggcggagctgatccagcagctgcagcagcaggcactgtcagagccggcggtggtgcagaagacagccagtggccagtgaccacacagctcctccatgcctgaccaacaggcccagctttccctgccaggccctttgcactgaggacacagatcccggggagctgtgagggccaccggtgggcagtgggtggatcctggtttcgtgtgctgcccatgcaccttccagcccggggccagcttggcagggatccccaggaggcctgggccgcccagaggctcctctcaggctgggccccgacgtttgcggcagtgttccttgtcccgtggggccgggagcgagtaaagtctgggccaggc

SEQ ID NO: 4361 - protein, 128 aa, Homo sapiens
MRTLDLIDEAYGLDFYILKTPKEDLCSKFGMELKRGMLLRLARQDPQLHPEDPERRAAIYDKYKEFAIPEEEAEWVGLTLEEAIEKQRLLEEKDPVPLFKIYVAELIQQLQQQALSEPAVVQKTASGQ

SEQ ID NO: 4362 - DNA, 4163 bp, Homo sapiens
gcaccgcggctgaggagcgggaggccgtccgggcagcgcggccggcggcgagaggggccccgccgctctccggaggcagaagttgtggatcggccggcgggggcgagcgggcccgggggccggggccgcgctgcccgggccgcgaggacgaggcggcgccgccgggctgtggaggcagcagcccagacgcggcacagagagggcctgggagcttgctgcagcttcagacagggagccaggatgggaaccacggactgacctgacctgcgtcctcggggccactgcactgggtgattcacgtgtgcccaggccctgaggtgggccggacctgggagtggcagccacacccactcgcccgggtctatggccacggtcggagagtggtcctgtgtgcgctgcaccttcctgaacccggccggccagcgccagtgctccatctgcgaggctccccggcacaagcccgacctcaaccacatcctgcggctcagcgtggaggagcagaaatggccctgcgcccgctgcaccttccgcaacttcctgggcaaggaggcctgcgaggtgtgcggcttcaccccggagcctgcgcctggggctgccttcctgccagtcctcaacggggtcctccccaagccacccgccatcctgggggagcccaagggcagctgccaggaggaagcaggtccagtgaggactgcggggctggtggccacggagcccgccagggggcagtgcgaggacaaggacgaggaggagaaggaggagcaggaggaggaggagggagcggcggagcccagagggggctgggcgtgtccgcgttgcacgctgcacaacacgcccgtggccagctcctgctccgtctgcgggggcccacgcaggctctcgctgccacggatccctcctgaggccctggtggtcccggaagtggtggccccggccggcttccacgtcgtgcctgccgcgcctccacctggcctccccggggaaggtgccgaggccaaccccccagccaccagccagggcccagctgccgaaccagagccgcccagggtcccgcccttcagccccttctcgtccaccctgcagaacaaccccgtgccgcgcagccgacgcgaggttcccccccagctgcagccaccggtgcctgaggctgcccagccgtcaccctctgccggctgcaggggagccccccagggctcgggctgggctggggcctcccgcctagcagagttgctgtctggcaagcggctgagtgtgctggaggaagaggccacggagggtggcaccagccgcgtagaggccggcagctccacctcgggcagtgacatcattgacctggccggagacaccgtgcgttacacgcccgccagcccctccagccccgacttcaccacctggtcatgtgccaagtgcacgctcagaaaccccacagtggcccccaggtgctcggcctgcggctgctccaaactgcacggcttccaggagcatggcgagccccccacccactgccccgactgtggggccgacaagcccagcccctgcggcagaagctgcggacgggtgtcctcggcccagaaggccgcccgcgtcctgcccgagcgcccgggccagtgggcctgccctgcctgtaccctgctcaacgcactgcgggccaagcactgcgccgcctgccacacgcctcagctcctggtggcccagcggcggggggccgcgcccctgaggcgcagggagagcatgcacgtggagcagcggcggcagacagacgagggcgaggccaaggcactctgggagaacatcgtggccttctgccgggagaacaatgtgagcttcgtggatgacagcttccctcccgggcccgagtctgtcggcttccccgcgggtgacagcgtgcagcagcgtgtgaggcagtggctgcgaccccaggagatcaactgctccgtcttcagggaccacagggccacgtggtctgtgttccacacactgcggccctcagacatcctgcaggggctgctggggaactgctggttcctgagcgccctggcggtgctggcggagcggccggacctggtggagcgggtgatggtcacgcgcagcctgtgtgcagagggcgcctaccaggtgcggctgtgcaaggacggcacgtggaccacggtgctggtggacgacatgctgccctgtgatgaggccggctgcctcctcttctcacaggcgcagcggaagcagctgtgggtggccctcatcgagaaggcgctggccaagctgcacggctcctactttgcgctccaggcgggccgcgccatcgaaggcctggccacgctcaccggcgccccctgtgagagcctggcgctgcagctcagctccactaacccccgcgaggagcccgttgacactgacctcatctgggccaaaatgctgagttctaaggaggctgggttcctcatgggtgcctcctgtggcgggggcaacatgaaggtggacgattcggcctacgagagcctgggcctgcgcccccggcatgcctactccatcctggatgtccgagatgtccagggcaccaggcttctgcggctccgaaacccgtggggccgtttctcctggaacggcagctggtccgacgagtggccacactggccggggcacctgcgtggcgagctcatgccgcacggcagcagtgagggtgtcttctggatggagtacggcgactttgtcaggtacttcgactccgtggacatctgtaaggtgcactcggactggcaggaggcgcgggtgcagggctgctttcccagctcggccagcgcgcccgtgggggtaacagcgctcacggtgctggagcgggcctcgctggagttcgcgctcttccaggagggcagcaggcgctcggacgccgtggacagccacctgctggacctgtgcatcctggtgttccgggccacgttcggcagcggcggccacctcagcctgggccgcctcctggcccacagtaagcgcgcggtcaagaagttcgtcagctgcgacgtcatgctggagcctggcgagtacgctgtggtgtgctgcgccttcaaccactgggggccgcccctgccgggcacccctgccccccaggcctccagcccctcggcaggggtcccgagagcctccccagagccgccgggccacgtgctggctgtgtacagctcgaggctggtcatggtggagcccgtggaagcccagccgaccacgctggccgacgccatcatcctgctcaccgagagccgcggagagcggcacgagggccgtgagggcatgacctgctactacctgacacacggttgggcggggctcatcgtggtggtggagaaccgacaccccaaggcctacctgcacgtgcagtgtgactgcaccgacagcttcaacgtggtgtccacacgcggcagcctgcgtacccaggatagcgtgccacccctgcacaggcaggtcctggtgatcttgtcccagctagagggcaacgccggcttctctatcacccaccgcctggcacatcgcaaggcagcccaggccttcctcagtgactggacagcctccaaggggacccacagccccccactcacgccagaggtcgccggtctgcatgggccccgaccgctgtgaccaccatgcctggggcaggggctgtgcacagacggaccccccacccccacacgcactttatgagggagaccccgacagaggacgcttgagccagaatctcaggaccccgcccagggagctgccagcccagggctcagcttcccatgggccccccgcccccctccttcccctccctgaaccccacagtccgcctggccagacctcctggccgccacgcagaatacctcgaaccaggcgggctgtgaaccagccccgctcacctgccagccccaacacccgacgggggccgaggccaggctgcccctccctgtgggctcagggtctcctgcgggctaggcagccaggagctctgtccgcaaaaccaaatctgggtgtcagaggccaagaccctggggtgggatcagggaccacccctcacggggcataaggtcagttttcccccagagcccgggtccctgtcccccacagggcaggcggggtccctggagccctggtgtggagcggcgagtcccggggcggtgcctgtctcagaagaaggg

SEQ ID NO: 4363 - protein, 1086 aa, Homo sapiens
MATVGEWSCVRCTFLNPAGQRQCSICEAPRHKPDLNHILRLSVEEQKWPCARCTFRNFLGKEACEVCGFTPEPAPGAAFLPVLNGVLPKPPAILGEPKGSCQEEAGPVRTAGLVATEPARGQCEDKDEEEKEEQEEEEGAAEPRGGWACPRCTLHNTPVASSCSVCGGPRRLSLPRIPPEALVVPEVVAPAGFHVVPAAPPPGLPGEGAEANPPATSQGPAAEPEPPRVPPFSPFSSTLQNNPVPRSRREVPPQLQPPVPEAAQPSPSAGCRGAPQGSGWAGASRLAELLSGKRLSVLEEEATEGGTSRVEAGSSTSGSDIIDLAGDTVRYTPASPSSPDFTTWSCAKCTLRNPTVAPRCSACGCSKLHGFQEHGEPPTHCPDCGADKPSPCGRSCGRVSSAQKAARVLPERPGQWACPACTLLNALRAKHCAACHTPQLLVAQRRGAAPLRRRESMHVEQRRQTDEGEAKALWENIVAFCRENNVSFVDDSFPPGPESVGFPAGDSVQQRVRQWLRPQEINCSVFRDHRATWSVFHTLRPSDILQGLLGNCWFLSALAVLAERPDLVERVMVTRSLCAEGAYQVRLCKDGTWTTVLVDDMLPCDEAGCLLFSQAQRKQLWVALIEKALAKLHGSYFALQAGRAIEGLATLTGAPCESLALQLSSTNPREEPVDTDLIWAKMLSSKEAGFLMGASCGGGNMKVDDSAYESLGLRPRHAYSILDVRDVQGTRLLRLRNPWGRFSWNGSWSDEWPHWPGHLRGELMPHGSSEGVFWMEYGDFVRYFDSVDICKVHSDWQEARVQGCFPSSASAPVGVTALTVLERASLEFALFQEGSRRSDAVDSHLLDLCILVFRATFGSGGHLSLGRLLAHSKRAVKKFVSCDVMLEPGEYAVVCCAFNHWGPPLPGTPAPQASSPSAGVPRASPEPPGHVLAVYSSRLVMVEPVEAQPTTLADAIILLTESRGERHEGREGMTCYYLTHGWAGLIVVVENRHPKAYLHVQCDCTDSFNVVSTRGSLRTQDSVPPLHRQVLVILSQLEGNAGFSITHRLAHRKAAQAFLSDWTASKGTHSPPLTPEVAGLHGPRPL

SEQ ID NO: 4364 - DNA, 1225 bp, Homo sapiens
ctgggccgcgaggcgcggagcttgggagcggagcccaggccgtgccgcgcggcgccatgaagggcaaggaggagaaggagggcggcgcacggctgggcgctggcggcggaagccccgagaagagcccgagcgcgcaggagctcaaggagcagggcaatcgtctgttcgtgggccgaaagtacccggaggcggcggcctgctacggccgcgcgatcacccggaacccgctggtggccgtgtattacaccaaccgggccttgtgctacctgaagatgcagcagcacgagcaggccctggccgactgccggcgcgccctggagctggacgggcagtctgtgaaggcgcacttcttcctggggcagtgccagctggagatggagagctatgatgaggccatcgccaatctgcagcgagcttacagcctggccaaggagcagcggctgaacttcggggacgacatccccagcgctcttcgaatcgcgaagaagaagcgctggaacagcattgaggagcggcgcatccaccaggagagcgagctgcactcctacctctccaggctcattgccgcggagcgtgagagggagctggaagagtgccagcgaaaccacgagggtgatgaggacgacagccacgtccgggcccagcaggcctgcattgaggccaagcacgacaagtacatggcggacatggacgagcttttttctcaggtggatgagaagaggaagaagcgagacatccccgactacctgtgtggcaagatcagctttgagctgatgcgggagccgtgcatcacgcccagtggcatcacctacgaccgcaaggacatcgaggagcacctgcagcgtgtgggtcattttgaccccgtgacccggagccccctgacccaggaacagctcatccccaacttggctatgaaggaggttattgacgcattcatctctgagaatggctgggtggaggactactgaggttccctgccctacctggcgtcctggtccaggggagccctgggcagaagcccccggcccctatacatagtttatgttcctggccaccccgaccgcttcccccaagttctgctgttggactctggactgtttcccctctcagcatcgcttttgctgggccgtgatcgtccccctttgtgggctggaaaagcaggtgagggtgggctgggctgaggccattgccgccactatctgtgtaataaaatccgtgagcacga

SEQ ID NO: 4365 - protein, 303 aa, Homo sapiens
MKGKEEKEGGARLGAGGGSPEKSPSAQELKEQGNRLFVGRKYPEAAACYGRAITRNPLVAVYYTNRALCYLKMQQHEQALADCRRALELDGQSVKAHFFLGQCQLEMESYDEAIANLQRAYSLAKEQRLNFGDDIPSALRIAKKKRWNSIEERRIHQESELHSYLSRLIAAERERELEECQRNHEGDEDDSHVRAQQACIEAKHDKYMADMDELFSQVDEKRKKRDIPDYLCGKISFELMREPCITPSGITYDRKDIEEHLQRVGHFDPVTRSPLTQEQLIPNLAMKEVIDAFISENGWVEDY

SEQ ID NO: 4366 - DNA, 2538 bp, Homo sapiens
gcggagcttccagggtctctgggtcgccagcgcgcgggcgcgcggctggagccggcgccgggcacggcatcgggggcctggactgcacggcccggcagcaggttggtcttggcgtgggcgtgggcgcgggaggggctcggagccagggtcggcctgcccaccgggcctgtgcggggcgcgggtctgcgcggactgcggggagcgaggaggccccagccctaacccgcgctgcgggcagacctggctgccgggcctggtagtgctgcagcccctccccgcccccaccgtcgggcagaggcattcacgtgcatcccctggaggggagggtctgtggggaggatctgtggggcaggtttggaacgggctctttctccaggcttaggtcaggcagggcccttcaggtcagcccggagcaggctgactccttgactccccagctgacgccctggggactgatctcggggactgaggatgcaggtgcacagtagggctgcggacccggctcggtggcttcgcaccggagcccgggtggggcggtgcgggtacctctgtatgctgggctgggggcgcaccacgtgctcacagcacacgcacccacgcgtggctcggcaggccggccatggagccaggcagcgtggagaacctgtccatcgtgtaccggagccgcgacttcctggtggtcaacaagcactgggacgttcgcattgacagcaaggcgtggcgggagactctgaccctgcagaagcagctgcggtaccgctttcccgagctggccgaccctgacacctgctacgggttcaggttctgccaccagctggatttctccaccagcggggcgctgtgcgtggccctaaacaaggcagccgccggcagcgcgtacaggtgcttcaaggagcggcgcgtgaccaaggcttacctggcattgctgcgggggcacatccaggagagccgggtaaccatcagccatgccattggcaggaacagcacggagggccgggcccacaccatgtgcatcgagggctcgcagggttgtgagaacccaaagccaagcctcacagatctcgtggttctggaacacgggctgtacgcaggcgatcctgtctccaaagtgctgctgaagccgctcacgggccggacacaccagctgcgcgtgcactgcagtgccctgggccaccccgtggtgggcgacctgacctacggagaagtctcgggccgggaggaccggccgttcagaatgatgctgcacgctttctacctgcgcatccccacggacaccgagtgtgtggaggtctgcacgcctgaccccttcctgccctccctggatgcctgctggagcccccacacactgctgcagtcgctggaccagctcgtgcaggccttacgggccacccccgaccctgaccccgaggataggggccccaggccaggcagcccctccgcactcctgcctgggcccggccggcctcctccacccccaaccaagccccctgagactgaggcacagcggggcccctgcctgcagtggctgtcggagtggacgctggaaccggacagctgagagccgtggggctggggcagggggtgtcagctgcacagcgggactctagggagatgggcgagcgagcgtctgctcactggctctggggcctcgaggtgccaggcagcatcaggcccactgggttgccccggccaggcctgcgaggaagggctgaggtggggccggcagggggcgccaggcagccgtgatcacaggtgacgaccgcaccgcggccgtgggactgatgcgggatcccgagggccttcctgcccacatgccccgggagaaaccgaggcccctccctcctcctggaacagcttccggctctcaagcgtcaccccaggggcgtcagttttacggactcaaggtcacctcaggaagaggcagggccaggttttgggataggctttgcctccaggatgggctgctcctgggcctggtgagctactgcccccaacctaccctctagaggggctgggaagggccgttctgggctcacctggcctgggagacccatctggtccctgcgtcctctgcccctcactgctctgtgcagatcctgtcgccctcagctgcctcctcccgagacctaatggtccctgctgggctcgagtctgcaggcccggctgcgtgtgccttggcctcactgtaccagtggttccctctctgcccggattctgagctcagtgtggtgtttggtgcacaggggttggtcaggggccatggccaaggccctgccacgcacgcccatccctcagatccactgtgagcaccaacctgctgcagtctcttgggcccctgctggcagctctgccacgtcaccgcctgcctggctcccacacagccatgcattgtcactctgcctccgggaccccagcttgggagctgtgggtctgccaggtcccacctcctctgtcccccatgccacaacctgggctcctggctacagcagggctccagggactccaaataaatgttcagtgactggctccaaggatgac

SEQ ID NO: 4367 - protein, 312 aa, Homo sapiens
MEPGSVENLSIVYRSRDFLVVNKHWDVRIDSKAWRETLTLQKQLRYRFPELADPDTCYGFRFCHQLDFSTSGALCVALNKAAAGSAYRCFKERRVTKAYLALLRGHIQESRVTISHAIGRNSTEGRAHTMCIEGSQGCENPKPSLTDLVVLEHGLYAGDPVSKVLLKPLTGRTHQLRVHCSALGHPVVGDLTYGEVSGREDRPFRMMLHAFYLRIPTDTECVEVCTPDPFLPSLDACWSPHTLLQSLDQLVQALRATPDPDPEDRGPRPGSPSALLPGPGRPPPPPTKPPETEAQRGPCLQWLSEWTLEPDS

SEQ ID NO: 4368 - DNA, 3148 bp, Homo sapiens
gcgggaggttcggagcgggagctcgggctcgcggacggtatggaggactacgagcaggagctgtgcggcgtcgaggatgatttccacaaccagttcgcggccgagctggaggtgctggcagagctggaaggggcgtcgactccgtcgccctccggggtccccctgttcaccgcgggccgacccccgcggacgttcgaggaggcccttgccagaggggacgcggcctccagtcccgccccagccgcatctgtgggcagcagccagggcggcgccaggaagaggcaggtggacgccgacctgcagccggccgggtccctgccccacggtaggttggcggcattgccccagggcctccggagtgggcgcgaggctgaggaggcctctggttccctgcatgtgtctcccccagcccccaggatcaaacggcctaggctgcaggtggtcaagaggctgaacttcagatcggaggagatggaggagccgccccctcccgactcctcgccgacggacatcaccccgccgccgagccctgaggacctcgcagagctttggggccacggagtctcagaagctgctgccgacgtgggtctcacacgggcctcaccagctgcccgcaatcccgtcctgaggcggccccccatcttggaggactacgtccacgtgacatccacggagggcgtccgggcttatctggtgctgcgtgctgaccccatggccccgggggtgcagggctctctcctccacgtcccatggcgaggcggtggccagctggacctgctgggtgtgtccttagcctccctgaagaagcaggtcgacggcgagcggcgggagcggctgcttcaggaggcccagaagctttcagacaccctgcacagtctcaggtcgggggaggaggaggcagcccagcccttgggggcccctgaggaggagccgactgacggtcaagacgcctccagtcactgcctctgggtggatgagtttgcaccccgccactacacggagctgctcagtgatgacttcaccaaccgctgcctgctcaagtggctgaagttgtgggacctggtggtgtttggccacgagaggccttcccggaagcccaggcccagtgttgagccggcccgggtcagcaaggaggccacagccccaggcaagtggaagagccacgaacaggtgctggaggagatgctggaggctgggctggacccgagccagcgaccgaagcagaaggtggcactgctctgtgggcccccggggctggggaagaccaccctggcacacgtgattgcgcgtcacgcggggtactctgtggtggagatgaacgccagtgacgaccgtagcccggaggtcttccgcacacgcatcgaggcggccacccagatggagtcggtgctgggtgctggcgggaagcccaactgcctggtcatcgatgagatcgacggggcccccgtggccgccatcaacgtcctcctgagcatcctgaaccgcaaggggccacaggaggtggggccacagggcccggctgtgccttcgggaggcggccgacggcgccgggcagagggggggctcctcatgaggcccattatctgcatttgcaatgaccagttcgcaccgtccctgcggcagctgaagcagcaggccttcctgctccacttcccgccgactctgccctcgaggctggtgcagcggctccaggaggtctccctgcggcagggcatgagggccgacccaggggtgctggccgccctctgtgagaaaactgacaatgacatccgggcctgcatcaacaccctgcagttcctgtacagccggggccagcgggagctgagcgtgcgggacgtgcaggccacacgcgtgggcctcaaggaccagcgcagagggctcttctcggtgtggcaggaggtcttccagctgcctcgagcccagaggcgccgtgtgggccaggaccccgccctgcctgctgacacactcctgctgggtgacggggacgcgggctccctcacctccgcctcacagcgattctaccgtgtcctgcatgccgctgcctctgcgggcgagcacgagaaggtggtccagggcttgtttgacaacttcctgcgtctgcggctgcgagactccagcctgggtgctgtgtgtgtggccctcgactggctggccttcgatgacctgctggcgggggctgctcatcacagccagagcttccagctgctgcgctacccacccttcctgcccgtggccttccatgtgctgtttgcttccagccacacacccaggatcaccttccccagcagccagcaggaggcccagaaccggatgagccagatgaggaacctgatccagacgctggtgtccggcatcgcgccagccacgcgcagccgggccacgccccaggccctgctcctcgatgccctctgcctgctcctggacattcttgcacccaagctccgccccgtgagcacacagctgtacagcacccgtgaaaagcaacagctggccagcctggtgggcacgatgctcgcttacagcctgacctaccgccaggagcgcacgcccgatggccagtacatctacaggctggagccgaacgtggaggaactctgccgcttccctgagctgcctgcccgcaagcccctcacctaccagacgaagcagctcatcgcccgcgagatcgaggtggagaagatgcggcgggcggaggcttctgcccgggtagagaacagcccccaggtggatgggagccccccagggctcgagggtctgctggggggcattggggagaaaggggtgcaccgacctgccccacgcaaccatgagcagcggctggagcacatcatgaggcgagcggcccgggaggaacagcctgagaaggacttctttggacgtgtggtcgtcaggagcacagcagtcccgagtgcaggggacacggccccggagcaggactcagtggagcggcgcatgggcacagcggtgggcaggagcgaggtctggttccgcttcaacgagggtgtctccaacgccgtgcggcgcagcctgtacatcagggacttgctctagttctctgagccgcggacatgccctcgcattgcttcccgcagagtgcagagacaggaagctggagatgtctttataaagtcacacctttacagactgt

SEQ ID NO: 4369 - protein, 1003 aa, Homo sapiens
MEDYEQELCGVEDDFHNQFAAELEVLAELEGASTPSPSGVPLFTAGRPPRTFEEALARGDAASSPAPAASVGSSQGGARKRQVDADLQPAGSLPHGRLAALPQGLRSGREAEEASGSLHVSPPAPRIKRPRLQVVKRLNFRSEEMEEPPPPDSSPTDITPPPSPEDLAELWGHGVSEAAADVGLTRASPAARNPVLRRPPILEDYVHVTSTEGVRAYLVLRADPMAPGVQGSLLHVPWRGGGQLDLLGVSLASLKKQVDGERRERLLQEAQKLSDTLHSLRSGEEEAAQPLGAPEEEPTDGQDASSHCLWVDEFAPRHYTELLSDDFTNRCLLKWLKLWDLVVFGHERPSRKPRPSVEPARVSKEATAPGKWKSHEQVLEEMLEAGLDPSQRPKQKVALLCGPPGLGKTTLAHVIARHAGYSVVEMNASDDRSPEVFRTRIEAATQMESVLGAGGKPNCLVIDEIDGAPVAAINVLLSILNRKGPQEVGPQGPAVPSGGGRRRRAEGGLLMRPIICICNDQFAPSLRQLKQQAFLLHFPPTLPSRLVQRLQEVSLRQGMRADPGVLAALCEKTDNDIRACINTLQFLYSRGQRELSVRDVQATRVGLKDQRRGLFSVWQEVFQLPRAQRRRVGQDPALPADTLLLGDGDAGSLTSASQRFYRVLHAAASAGEHEKVVQGLFDNFLRLRLRDSSLGAVCVALDWLAFDDLLAGAAHHSQSFQLLRYPPFLPVAFHVLFASSHTPRITFPSSQQEAQNRMSQMRNLIQTLVSGIAPATRSRATPQALLLDALCLLLDILAPKLRPVSTQLYSTREKQQLASLVGTMLAYSLTYRQERTPDGQYIYRLEPNVEELCRFPELPARKPLTYQTKQLIAREIEVEKMRRAEASARVENSPQVDGSPPGLEGLLGGIGEKGVHRPAPRNHEQRLEHIMRRAAREEQPEKDFFGRVVVRSTAVPSAGDTAPEQDSVERRMGTAVGRSEVWFRFNEGVSNAVRRSLYIRDLL

SEQ ID NO: 4370 - DNA, 1563 bp, Homo sapiens
atgggtagccgggcgcggggcggggccgcggggccgccgcttaaagaaacttgttgcgggtcccgcagcgggacccgagcctcggcggcggcggcggcggcggcaggggcgagggtcggggccaccgcgcggcgacctcgggtcccggagcgaccgcagggcagccccgggcgccggccccggtgcgcgtctcctgtgcgcgcccctccgcgcgcggccccgatgctggacatgagcgaggcccgctcccagccgccctgcagcccgtccggcaccgccagctccatgtcgcacgtggaggactcggactcggacgcgccgccgtctcccgccggctccgagggcctgggccgcgcgggggtcgcggtggggggcgcccggggcgacccggcggaggcggcggacgagcgcttcccggcctgcatccgcgacgccgtgtcgcaggtgctcaagggctacgactggagtctggtgcccatgccggtgcgcggcggcggcggcggcgcgctcaaagccaagccgcatgtgaagcggcccatgaacgcattcatggtgtgggcgcaggcggcgcgccgcaagctggccgaccagtacccgcacctgcacaacgccgagctcagcaagacgctgggcaagctgtggcgcttgctgagcgagagcgagaagcggcccttcgtggaggaggcagagcgccttcgcgtgcagcacaagaaggaccaccccgactacaagtaccagccacggcgcaggaagagcgccaaagccggccacagcgactccgactcgggcgcggagctgggaccccaccctggcggcggtgccgtgtacaaggctgaagcagggcttggagatgggcaccaccatggcgaccacacagggcagacccacgggccgcccaccccgcccaccacccccaagacggagctgcagcaggcgggcgccaagccggagctgaagctggagggacgccggccggtggacagcgggcgccagaacatcgacttcagcaacgtggacatctcggagctcagcagcgaggtcatgggcaccatggacgccttcgacgtccacgagttcgaccagtacctgcccctgggcggccccgccccacccgagccgggccaggcctatgggggcgcctacttccacgccggggcgtcccccgtgtgggcccacaagagtgccccgtcggcctccgcgtcgcccaccgagacgggtcccccacggccgcacatcaagacggagcagccgagccccggccactacggcgaccagccccgaggctcgcccgactacggttcctgcagcggccagtccagcgccaccccggccgcccccgccggccccttcgccggctcacagggcgactatggcgacctgcaggcctccagctactatggtgcctaccctggctacgcacccggcctctaccagtacccctgcttccactcgccgcgccggccctacgcctcacccctgctcaacggcctggccctgccgcccgcccacagccccaccagtcactgggaccagccggtgtacaccaccctgaccaggccctga

SEQ ID NO: 4371 - protein, 520 aa, Homo sapiens
MGSRARGGAAGPPLKETCCGSRSGTRASAAAAAAAGARVGATARRPRVPERPQGSPGRRPRCASPVRAPPRAAPMLDMSEARSQPPCSPSGTASSMSHVEDSDSDAPPSPAGSEGLGRAGVAVGGARGDPAEAADERFPACIRDAVSQVLKGYDWSLVPMPVRGGGGGALKAKPHVKRPMNAFMVWAQAARRKLADQYPHLHNAELSKTLGKLWRLLSESEKRPFVEEAERLRVQHKKDHPDYKYQPRRRKSAKAGHSDSDSGAELGPHPGGGAVYKAEAGLGDGHHHGDHTGQTHGPPTPPTTPKTELQQAGAKPELKLEGRRPVDSGRQNIDFSNVDISELSSEVMGTMDAFDVHEFDQYLPLGGPAPPEPGQAYGGAYFHAGASPVWAHKSAPSASASPTETGPPRPHIKTEQPSPGHYGDQPRGSPDYGSCSGQSSATPAAPAGPFAGSQGDYGDLQASSYYGAYPGYAPGLYQYPCFHSPRRPYASPLLNGLALPPAHSPTSHWDQPVYTTLTRP

SEQ ID NO: 4372 - DNA, 3769 bp, Homo sapiens
ggcacgaggccggcgcttcccggccggtgtcgctccgcggcgggccatggccaacgtctctaagaaggtgtcctggtccggccgggaccgggacgacgaggaggcggcgccgctgctgcggaggacggcgcggcccggcggggggacgccgctgctgaacggggctgggcctggggctgcgcgccagtcaccacgttctgcgcttttccgagtcggacatatgagcagcgtggagctggatgatgaacttttggacccggatatggaccctccacatcccttccccaaggagatcccacacaacgagaagctcctgtccctcaagtatgagagcttggactatgacaacagtgagaaccagctgttcctggaggaggagcggcggatcaatcacacggccttccggacggtggagatcaagcgctgggtcatctgcgccctcattgggatcctcacgggcctcgtggcctgcttcattgacatcgtggtggaaaacctggctggcctcaagtacagggtcatcaagggcaatatcgacaagttcacagagaagggcggactgtccttctccctgttgctgtgggccacgctgaacgccgccttcgtgctcgtgggctctgtgattgtggctttcatagagccggtggctgctggcagcggaatcccccagatcaagtgcttcctcaacggggtgaagatcccccacgtggtgcggctcaagacgttggtgatcaaagtgtccggtgtgatcctgtccgtggtcgggggcctggccgtgggaaaggaagggccgatgatccactcaggttcagtgattgccgccgggatctctcagggaaggtcaacgtcactgaaacgagatttcaagatcttcgagtacttccgcagagacacagagaagcgggacttcgtctccgcaggggctgcggccggagtgtcagcggcgtttggagcccccgtgggtggggtcctgttcagcttggaggagggtgcgtccttctggaaccagttcctgacctggaggatcttctttgcttccatgatctccacgttcaccctgaattttgttctgagcatttaccacgggaacatgtgggacctgtccagcccaggcctcatcaacttcggaaggtttgactcggagaaaatggcctacacgatccacgagatcccggtcttcatcgccatgggcgtggtgggcggtgtgcttggagcagtgttcaatgccttgaactactggctgaccatgtttcgaatcaggtacatccaccggccctgcctgcaggtgattgaggccgtgctggtggccgccgtcacggccacagttgccttcgtgctgatctactcgtcgcgggattgccagcccctgcaggggggctccatgtcctacccgctgcagctcttttgtgcagatggcgagtacaactccatggctgcggccttcttcaacaccccggagaagagcgtggtgagcctcttccacgacccgccaggctcctacaaccccctgaccctcggcctgttcacgctggtctacttcttcctggcctgctggacctacgggctcacggtgtctgccggggtcttcatcccgtccctgctcatcggggctgcctggggccggctctttgggatctccctgtcctacctcacgggggcggcgatctgggcggaccccggcaaatacgccctgatgggagctgctgcccagctgggcgggattgtgcggatgacactgagcctgaccgtcatcatgatggaggccaccagcaacgtgacctacggcttccccatcatgctggtgctcatgaccgccaagatcgtgggcgacgtcttcattgagggcctgtacgacatgcacattcagctgcagagtgtgcccttcctgcactgggaggccccggtcacctcacactcactcactgccagggaggtgatgagcacaccagtgacctgcctgaggcggcgtgagaaggtcggcgtcattgtggacgtgctgagcgacacggcgtccaatcacaacggcttccccgtggtggagcatgccgatgacacccagcctgcccggctccagggcctgatcctgcgctcccagctcatcgttctcctaaagcacaaggtgtttgtggagcggtccaacctgggcctggtacagcggcgcctgaggctgaaggacttccgagacgcctacccgcgcttcccacccatccagtccatccacgtgtcccaggacgagcgggagtgcaccatggacctctccgagttcatgaacccctccccctacacggtgccccaggaggcgtcgctcccacgggtgttcaagctgttccgggccctgggcctgcggcacctggtggtggtggacaaccgcaatcaggttgtcgggttggtgaccaggaaggacctcgccaggtaccgcctgggaaagagaggcttggaggagctctcgctggcccagacgtgaggcccagccctgcccataatgggcactggcgctggcaccccggcccttctgcatttcctcccggagtcactggtttctcggcccaaaccatgctccccagcagtggcaatggcgagcaccctgcagctgggcgggcaggcggcaggcgcggaactgaccctctcgcgggactgaccctgttgtgggcagtggtctccccccttggcgcctccttgcgcaggcccagcctccactctcctcgtctaggtttctttacctccagggatcagctgtgtgtgtgtgacctccctaccgggctatcggcctcttgggagccagcggcagggccggcacctgcgtgcctgtgcccgtgtgcgtgagacagagcccttgcccctgctgctgccccgagggctgccctgccctggaagggcccctctgcctccacaccagtggagtcttcgagacttgggagctgcttggcctcattttcagccatgagcagacggcctgtggtccctgggcctgaggcacggactcgtagcaccagggtttggaggctgcgaccgccccggagagcagcttcacactggcgccacagaggagccccacgtgcactccccggcctgcatccggcttgggtacacgggcccagaggactggggtgactcacgggccctgtgctgtgatgttgagagctgagaaaaacctccaaggccctgagccccatgcccagccctgccttggtcccccaacccccagagcttggagtctgggccccacacccagccctgccttggtccctgagcctcagagcgtggaattgctgccctgtggacactggctgggaaggcaggtcttcccctagcacatggggaccccggcctcgagggtgacctccctaccttgcccctgccagccaccaagcgcaggtgcagcgggggccagactcctgccggcctcagaggacacctggcccagcacaggcagctagaagggccggtgggcaccggggccgggaagcccccacctcaccacctgagggcccctgggaggctcctctggcctggctgggctgggtctggggccgccacaggcccctcacggggcggcagaggcaacttcagtgtccctgttagagcaacacgggtccctccgtggggggctgggtgcggccccctgccgtgtatttcctccccagggagtggggcctccccgggagctgacgccaccaccctgcttagccctcacagggccccaaggtgtccgagtgtgttgggtctgaacgcgaaataaagaaatcctctcaaaaaaaaaaaaaaaaaa

SEQ ID NO: 4373 - protein, 805 aa, Homo sapiens
MANVSKKVSWSGRDRDDEEAAPLLRRTARPGGGTPLLNGAGPGAARQSPRSALFRVGHMSSVELDDELLDPDMDPPHPFPKEIPHNEKLLSLKYESLDYDNSENQLFLEEERRINHTAFRTVEIKRWVICALIGILTGLVACFIDIVVENLAGLKYRVIKGNIDKFTEKGGLSFSLLLWATLNAAFVLVGSVIVAFIEPVAAGSGIPQIKCFLNGVKIPHVVRLKTLVIKVSGVILSVVGGLAVGKEGPMIHSGSVIAAGISQGRSTSLKRDFKIFEYFRRDTEKRDFVSAGAAAGVSAAFGAPVGGVLFSLEEGASFWNQFLTWRIFFASMISTFTLNFVLSIYHGNMWDLSSPGLINFGRFDSEKMAYTIHEIPVFIAMGVVGGVLGAVFNALNYWLTMFRIRYIHRPCLQVIEAVLVAAVTATVAFVLIYSSRDCQPLQGGSMSYPLQLFCADGEYNSMAAAFFNTPEKSVVSLFHDPPGSYNPLTLGLFTLVYFFLACWTYGLTVSAGVFIPSLLIGAAWGRLFGISLSYLTGAAIWADPGKYALMGAAAQLGGIVRMTLSLTVIMMEATSNVTYGFPIMLVLMTAKIVGDVFIEGLYDMHIQLQSVPFLHWEAPVTSHSLTAREVMSTPVTCLRRREKVGVIVDVLSDTASNHNGFPVVEHADDTQPARLQGLILRSQLIVLLKHKVFVERSNLGLVQRRLRLKDFRDAYPRFPPIQSIHVSQDERECTMDLSEFMNPSPYTVPQEASLPRVFKLFRALGLRHLVVVDNRNQVVGLVTRKDLARYRLGKRGLEELSLAQT

SEQ ID NO: 4374 - DNA, 3320 bp, Homo sapiens
gcgccccagaggctcaagaaaacccgcgggagcctcgcccggacccaggaactcgtgctcggggccaaccggctgggccgcgatcgcgtttcgtccggggccgcggcggccgtggggaatcggctgcagcgaatcggtggcgcgcggcgcctgagcgcgctgcagtcacccgggagccgggtccaggtcgtcttcccgtgacgcccagatctgtcctgcaggatggagccagcaccctcagaggttcgactcgccgtccgggaagccattcatgccctctcgtcttcggaggatggcggccacatcttctgcaccctggagtccctgaagcggtatctcggtgagatggagcctccagcgctcccgagggagaaggaggagtttgcctcggcccacttctcgcctgtcctcagatgtcttgccagcaggctgagcccagcctggctggagctgctgccccatggccgcctggaggagctgtgggccagcttcttcctggagggcccggcggaccaagccttcctggtgttgatggagaccatcgagggtgctgcgggccccagcttccggctgatgaagatggcgcggctgctggccagattcctgcgcgagggccggctggcagtgctgatggaggcgcagtgtcggcagcagacgcggcccggcttcatcctgctccgggagacgctgctgggcaaggtggtggccctgcccgatcacctgggcaaccgcctgcagcaggagaacttggccgagttcttcccccagaactacttccgcctgctcggcgaggaggtcgtccgggtgctgcaggcggttgtggactctctccaaggtggcctggattcctccgtgtccttcgtgtctcaggtccttgggaaagcctgtgtccacgggaggcagcaggagatcctgggcgtgctggtaccccggctggcagcgctcacccagggcagctacctgcaccagcgcgtctgctggcgcctggtggagcaagtgccggaccgggccatggaggctgtgctgaccgggctggtggaggccgcactggggcctgaggtcctttcgagactgctggggaacctggtggtgaagaacaagaaggcccagtttgtgatgacccagaagcttctgttcttacagtcccggctcacgacgcccatgctgcagagcctgctgggccatctggccatggacagccagcggcgcccgctcctgctgcaggtgctgaaggagctgttggagacgtggggcagcagcagtgccatccgccacactcccctgccgcagcagcgccacgtcagcaaggctgtcctcatctgcctggcgcaactcggggagccggaactgcgggacagccgggatgaactgctggccagcatgatggcgggcgtgaagtgccgcctggacagtagcctgccccccgtgcgacgcctgggcatgatcgtggcagaggtcgttagtgcccggatccaccccgaggggcctcccctgaaattccagtacgaagaggatgaactgagcctcgagctgctggccttggcctccccccagcctgcgggtgacggcgcctcggaggcgggcacgtccctcgttccagccacggcagagccccctgcagagacccccgcagagatcgtggatggcggcgtcccccaagcacagctggcgggctctgactcggacctggacagcgatgatgagtttgtcccctacgacatgtcgggggacagagagctgaagagcagcaaggctcctgcctacgtccgggactgcgtggaagccctgaccacgtctgaggacatagagcgctgggaggcagccctgcgggcccttgagggcctggtctacaggagccccacagccactcgggaggtgagcgtggagctggccaaggtgcttctgcatctggaggagaagacctgtgtggtgggatttgcagggctgcgccagagagccctggtggccgtcacggtcacagacccggccccggtggccgactatctgacctcacagttctatgccctcaactacagcctccggcagcgcatggacatcctggatgtgctgactctggctgcccaggagctgtctaggcctgggtgcctcgggaggactccccaacctggctccccaagtcccaacaccccgtgcctgccagaggcagccgtctctcagcctggcagtgccgtggcgtctgactggcgggtggtggtggaggagcggatcagaagcaagacccagcggctctccaagggtggcccgaggcagggcccggcaggcagccccagcagattcaactccgtggccggccacttcttcttccccctccttcagcgctttgacaggcctctggtgaccttcgacctcttgggagaagaccagctggttctcggaaggctggcgcacaccttaggggccctgatgtgcctggctgttaacaccacggtggctgtggccatgggcaaggccctgctggaattcgtgtgggcccttcgcttccacatcgatgcctacgtgcgccaggggctgttgtcggccgtctcctccgtcctgctcagcctgcctgctgcgcgcctgctggaggacctgatggacgagctgctggaagcccggtcctggctggcggacgtggctgagaaagacccggacgaggactgcaggacgctggcactgagggccctgctgcttctgcagagactcaagaacaggctcctcccacccgcgtctccctagtccctggaggcctccccaggaccaccctcgccgacagcaaggcaggcggctgagcagcggcctggagcagcagagccaggctttgtagcgaggccaggtcttcggccgcatccggtacggagagtgcagatgcaggaaggcccggcctgccgctatttatagtgcagccagtccgctaaaaatacactgggcctgggcactgcccgccgggacatggcagcctggacgtggggctggggctgtgggcgctgctggcggggttgactcttccagtgagggcagaaccaggctggcaggaggggaggacggtgtacctgctgctcagagcccccaaggctctcctctgagagccaccaagcaggacagagcagctcttgtcccaggtccctcgggctgagcgccgtgtcaccaggagaatagtgctcacagcccaggcagggtgtgtggctcctggatgggctcgtggggcgggatgggacagggcacgggctctcagaaaataaactgctttattggaaaaaaaaaaaaaaaaaaaaaaaaaaaaaaaaaaaaaaaaaaaaaaaaaaaaaaaaaaaaaaaaaaaa

SEQ ID NO: 4375 - protein, 837 aa, Homo sapiens
MEPAPSEVRLAVREAIHALSSSEDGGHIFCTLESLKRYLGEMEPPALPREKEEFASAHFSPVLRCLASRLSPAWLELLPHGRLEELWASFFLEGPADQAFLVLMETIEGAAGPSFRLMKMARLLARFLREGRLAVLMEAQCRQQTRPGFILLRETLLGKVVALPDHLGNRLQQENLAEFFPQNYFRLLGEEVVRVLQAVVDSLQGGLDSSVSFVSQVLGKACVHGRQQEILGVLVPRLAALTQGSYLHQRVCWRLVEQVPDRAMEAVLTGLVEAALGPEVLSRLLGNLVVKNKKAQFVMTQKLLFLQSRLTTPMLQSLLGHLAMDSQRRPLLLQVLKELLETWGSSSAIRHTPLPQQRHVSKAVLICLAQLGEPELRDSRDELLASMMAGVKCRLDSSLPPVRRLGMIVAEVVSARIHPEGPPLKFQYEEDELSLELLALASPQPAGDGASEAGTSLVPATAEPPAETPAEIVDGGVPQAQLAGSDSDLDSDDEFVPYDMSGDRELKSSKAPAYVRDCVEALTTSEDIERWEAALRALEGLVYRSPTATREVSVELAKVLLHLEEKTCVVGFAGLRQRALVAVTVTDPAPVADYLTSQFYALNYSLRQRMDILDVLTLAAQELSRPGCLGRTPQPGSPSPNTPCLPEAAVSQPGSAVASDWRVVVEERIRSKTQRLSKGGPRQGPAGSPSRFNSVAGHFFFPLLQRFDRPLVTFDLLGEDQLVLGRLAHTLGALMCLAVNTTVAVAMGKALLEFVWALRFHIDAYVRQGLLSAVSSVLLSLPAARLLEDLMDELLEARSWLADVAEKDPDEDCRTLALRALLLLQRLKNRLLPPASP

SEQ ID NO: 4376 - DNA, 833 bp, Homo sapiens
cgctcccgcaccgccatcatgatctgcctggtgctgaccatcttcgctaacctcttccccgcggcctgcaccggcgcacacgaacgcaccttcctggccgtgaagccggacggcgtgcagcggcggctggtgggcgagattgtgcggcgcttcgagaggaagggcttcaagttggtggcgctgaagctggtgcaggcctccgaggagctgctgcgtgagcactacgccgagctgcgtgaacgcccgttctacggccgccttgtcaagtatatggcctccgggccggtggtggccatggtttggcaggggctggacgtggtgcgcacctcgcgggcgctcatcggagccacgaacccggccgacgccccgcccggcaccatccgcggggatttctgcatcgaggttggcaagaacctgattcacggcagcgactcggtggagagtgcccgccgcgagatcgctctctggttccgcgcagacgagctcctctgctgggaggacagcgctgggcactggctgtatgagtagcccggcagatgcgcgtcacagaggctctcacactccagcctcctccagggcccaggtgggcgggcttctggccccaccccacagcgcttggagcatccctttggacgggctgctgaacatccacctgtctggacgttgcatggagggtggcgcaggcctctccaatccctggcgtacagggtttcctgcccgaggagctgctccaggagcctgcgcggctcgcctggaaacgtgccaggacactgtcctggtgcccagcccaacgtggtccaacgtttttttataataaagtcctcgttttcgtt

SEQ ID NO: 4377 - protein, 169 aa, Homo sapiens
MICLVLTIFANLFPAACTGAHERTFLAVKPDGVQRRLVGEIVRRFERKGFKLVALKLVQASEELLREHYAELRERPFYGRLVKYMASGPVVAMVWQGLDVVRTSRALIGATNPADAPPGTIRGDFCIEVGKNLIHGSDSVESARREIALWFRADELLCWEDSAGHWLYE

SEQ ID NO: 4378 - DNA, 1020 bp, Homo sapiens
gctgaggacgcggacccgccatggcgcggaagaaggtgcgtccgcggctgatcgcggagctggcccgccgcgtgcgcgccctgcgggagcaactgaacaggccgcgcgactcccagctctacgcggtggactacgagaccttgacgcggccgttctctggacgccggctgccggtccgggcctgggccgacgtgcgccgcgagagccgcctcttgcagctgctcggccgcctcccgctcttcggcctgggccgcctggtcacgcgcaagtcctggctgtggcagcacgacgagccgtgctactggcgcctcacgcgggtgcggcccgactacacggcgcagaacttggaccacgggaaggcctggggcatcctgaccttcaaagggaagactgagagcgaggcgcgggagatcgaacacgtcatgtaccatgactggcggctggtgcccaagcacgaggaggaggccttcaccgcgttcacgccggcgccggaagacagcctggcctccgtgccgtacccgcctctcctccgggccatgattatcgcagaacgacagaaaaatggagacacaagcaccgaggagcccatgctgaatgtgcagaggatacgcatggaaccctgggattaccctgcaaaacaggaagacaaaggaagggccaagggcacccccgtctagaatgccagaaccagcgggtggccttaggggctgtgaggcagtggggaccttattgatgaaagaaaccgtctttgcgttacacccgagtctgcctctcggagcagggagctcaccttccgcgacgtgttctgagggtctgcatcttaggggggagggctggggcaaatcgccacctgtgcctttcctctggccctgctgcccccacacccaactccgagggcccacgctggggaaagcgggaagcgctcgctccctttcccccattagtgctctctctgcctggatcccggcagaagctatgaaagggaataaagagaaaagaagtaaaaaaaaaaaaaaaaaa

SEQ ID NO: 4379 - protein, 218 aa, Homo sapiens
MARKKVRPRLIAELARRVRALREQLNRPRDSQLYAVDYETLTRPFSGRRLPVRAWADVRRESRLLQLLGRLPLFGLGRLVTRKSWLWQHDEPCYWRLTRVRPDYTAQNLDHGKAWGILTFKGKTESEAREIEHVMYHDWRLVPKHEEEAFTAFTPAPEDSLASVPYPPLLRAMIIAERQKNGDTSTEEPMLNVQRIRMEPWDYPAKQEDKGRAKGTPV

SEQ ID NO: 4380 - DNA, 1350 bp, Homo sapiens
ctgggaggctgacggcccgcgggcgtaagcggactgcagccgcgagctcctggaggcggcgggatggaggcggcggccgagcctggaaacctggccggcgtcaggcacatcatcctggtcctctcaggaaaggggggcgttgggaaaagcaccatctccacggagctggccctggcactgcgccatgcaggcaagaaggtgggaatcctggatgtggacctgtgtggccccagtataccccgcatgctcggggcgcagggcagggctgtgcaccagtgcgaccgcggctgggcacccgtcttcctggaccgggagcagagcatctcgctcatgtctgtgggcttcctgctggagaagccggacgaggccgtggtgtggagaggccccaagaaaaacgcgctgataaagcagtttgtgtccgacgtggcctggggggagctggactacctggtggtggacacgcccccggggacctccgatgagcacatggccaccatagaagccctgcgtccctaccagcccctgggggccctcgtggtcaccacgccccaggcggtgtccgtgggggacgtgaggcgcgagctgaccttctgtaggaagacgggcttgcgggtgatgggaatcgtggagaatatgagcggcttcacctgcccacactgcacggagtgcaccagcgtcttctccaggggcggcggagaggagctggcccagctcgccggggtgcccttcttaggctccgtgcccctggaccctgcgctcatgaggaccctggaggagggccacgacttcatccaggagttccccgggagccccgccttcgctgcactcacctccatagcccagaagattctggacgcgacgcccgcgtgcctcccctgactaaggccaccttgcagccgctttccagggccaccaagggctctgctccagcctctcagagaaacagaggcctgggctcggttcccgggccctgcaggggcaggcccaggcagcgtcagcgggagagcttctccccgaccagcccagccccaggatgtgtcgcaccagcagctctgcctggttggcctgcagtgccgtggtctgcgtgctctgcagctgtgagacgggggcggcctgggctctcttcccatccatgttgcctacctgtgcccctggcagccgcgtgtccacacagttagcggagcgcaggacttctgcagtcctcaggtgaccccgggcctccagcaccctgggtcgctgtcatctgtgtttagctcggggagtgccccctaagggggcgaactgacctcaggcatgtcttgtaactgtagaggcgcctgccattaaacgtgtccgctgctgtggcgacag

SEQ ID NO: 4381 - protein, 271 aa, Homo sapiens
MEAAAEPGNLAGVRHIILVLSGKGGVGKSTISTELALALRHAGKKVGILDVDLCGPSIPRMLGAQGRAVHQCDRGWAPVFLDREQSISLMSVGFLLEKPDEAVVWRGPKKNALIKQFVSDVAWGELDYLVVDTPPGTSDEHMATIEALRPYQPLGALVVTTPQAVSVGDVRRELTFCRKTGLRVMGIVENMSGFTCPHCTECTSVFSRGGGEELAQLAGVPFLGSVPLDPALMRTLEEGHDFIQEFPGSPAFAALTSIAQKILDATPACLP

SEQ ID NO: 4382 - DNA, 978 bp, Homo sapiens
caaaacaccaaatggcggatgacgccggtgcagcgggggggcccgggggccctggtggccctgggatggggaaccgcggtggcttccgcggaggtttcggcagtggcatccggggccggggtcgcggccgtggacggggccggggccgaggccgcggagctcgcggaggcaaggccgaggataaggagtggatgcccgtcaccaagttgggccgcttggtcaaggacatgaagatcaagtccctggaggagatctatctcttctccctgcccattaaggaatcagagatcattgatttcttcctgggggcctctctcaaggatgaggttttgaagattatgccagtgcagaagcagacccgtgccggccagcgcaccaggttcaaggcatttgttgctatcggggactacaatggccacgtcggtctgggtgttaagtgctccaaggaggtggccaccgccatccgtggggccatcatcctggccaagctctccatcgtccccgtgcgcagaggctactgggggaacaagatcggcaagccccacactgtcccttgcaaggtgacaggccgctgcggctctgtgctggtacgcctcatccctgcacccaggggcactggcatcgtctccgcacctgtgcctaagaagctgctcatgatggctggtatcgatgactgctacacctcagcccggggctgcactgccaccctgggcaacttcgccaaggccacctttgatgccatttctaagacctacagctacctgacccccgacctctggaaggagactgtattcaccaagtctccctatcaggagttcactgaccacctcgtcaagacccacaccagagtctccgtgcagcggactcaggctccagctgtggctacaacatagggtttttatacaagaaaaataaagtgaattaagcgtgaaaaaaaaaaaaaaaaaaaaaaaaaaaaaaaaaaaaaaaaaaaaaaaa

SEQ ID NO: 4383 - protein, 293 aa, Homo sapiens [sequence omitted]

SEQ ID NO: 4384 - DNA, 2618 bp, Homo sapiens
gggagtgtggcgttctgtgaagagttcggtgctaacctccctcacgcggcggtggctgccgggaccctagcaggtttcagctggagcggcggcggcggcaacatggcagagaccgcggccggagtgggccgcttcaagaccaactatgctgtggagcgcaaaattgagcctttctacaagggcggaaaagcacagctggaccagactggccagcacctcttctgcgtctgtggcaccagagtcaacattctggaagtggcctcgggggccgtgctgcggagtctggagcaggaggaccaggaggacatcactgcctttgacctcagccctgacaacgaggtgctggtgacagccagtcgggcattgctgctggctcagtgggcctggcaagagggcagcgttacccgcctgtggaaggcgatacacacggcccccgtggccaccatggccttcgaccccacctccactctgctagccacaggtggctgtgatggggccgtgcgcgtctgggacatcgtgcggcactacgggacacaccacttccgaggctcgcccggtgtcgtgcacctagtggccttccacccggaccctacacgcctgctgctcttctcctcggccacggatgccgccatccgcgtgtggtcactgcaggaccggtcatgcctggctgtgctgactgcccactacagcgccgtcacctcactggccttcagcgccgacggccacaccatgctcagctccggccgtgacaagatatgtatcatctgggaccttcagagctgccaggccacgaggaccgtgcctgtgtttgagagcgtggaggctgctgtgctgttgccagaggagccagtgtcccagctgggtgtgaagtccccagggctgtactttctgacagctggcgaccaaggcactctgcgcgtgtgggaggcagcttctgggcagtgtgtgtacacgcaggcccagccgccgggccctgggcaggagctgacccactgcaccctggcacacaccgccggcgtggtcctcaccgccaccgccgaccacaacctgttgctctacgaggctcgctccctgcggctgcagaaacagttcgctggctacagtgaggaggttttggatgtccggtttcttgggcccgaggactcccacgttgtcgtggcctccaatagcccctgcctaaaagtgtttgagctgcagacgtcagcctgccagatcctccacggccacacggatatcgtcctggccctggatgtgttccggaaggggtggctctttgccagctgtgccaaggatcagagcgtccgtatctggagaatgaacaaggctggccaggtgatgtgcgtggctcagggttccggtcacacacacagtgtgggcaccgtctgctgctctaggctgaaggagtccttcctggtgacaggcagccaggactgcactgtgaagctgtggcctcttcccaaagccttgctgtccaagaacacagccccagacaacggccctatcctcctgcaggcccagaccactcagcgctgccatgataaggacatcaacagcgtggctattgcccccaacgacaagctgctggccacaggctcacaggaccgcacggccaagctctgggccctgccacagtgccagctgctgggtgtcttctcaggccaccggcgtggcctctggtgcgtccagttctctcccatggaccaggtgctggccacggcctcagctgatggcaccatcaagctctgggcactccaggacttcagctgtctcaagacatttgaggggcacgatgcttctgtgctgaaggtggcctttgtgagccgtggcacgcagctgctgtccagcggttcggatggcctcgtgaagctctggaccatcaagaacaacgagtgtgtgcggacgctggatgcccacgaggacaaggtctgggggctgcactgcagccggctggacgaccacgccctcactggggccagtgactcccgagtcatcctctggaaggatgtgaccgaggcggagcaggcagaggagcaggccaggcaagaggagcaggtggtcaggcagcaagagctggacaacctgctgcatgagaagcggtacctgcgggcgctgggcctggccatctccctggatcggccccacaccgtgctgactgtcatccaggccatccggagggaccctgaggcctgcgagaagctggaagccaccatgctccgactgcggcgcgaccagaaagaggccctgctgcgcttctgcgtcacgtggaacaccaactcgcggcactgccacgaggcccaggccgtgctgggtgtgctcttgaggcgagaggcccccgaggagctgctggcctacgaaggcgtgcgggcagcgcttgaggccctgctgccctacactgagcggcactttcagcggctcagcaggaccctccaggccgccgctttcttggacttcctgtggcacaacatgaagctccctgtgccggccgccgcccccaccccctgggaaacccataaaggcgcactgccctagccggtccggcctctctccagtccatcctgaacccctggaaaacccataaaggccgctctcctggcaaaaaaaaaaaaaaaaaaaaaaaa

SEQ ID NO: 4385 - protein, 808 aa, Homo sapiens
MAETAAGVGRFKTNYAVERKIEPFYKGGKAQLDQTGQHLFCVCGTRVNILEVASGAVLRSLEQEDQEDITAFDLSPDNEVLVTASRALLLAQWAWQEGSVTRLWKAIHTAPVATMAFDPTSTLLATGGCDGAVRVWDIVRHYGTHHFRGSPGVVHLVAFHPDPTRLLLFSSATDAAIRVWSLQDRSCLAVLTAHYSAVTSLAFSADGHTMLSSGRDKICIIWDLQSCQATRTVPVFESVEAAVLLPEEPVSQLGVKSPGLYFLTAGDQGTLRVWEAASGQCVYTQAQPPGPGQELTHCTLAHTAGVVLTATADHNLLLYEARSLRLQKQFAGYSEEVLDVRFLGPEDSHVVVASNSPCLKVFELQTSACQILHGHTDIVLALDVFRKGWLFASCAKDQSVRIWRMNKAGQVMCVAQGSGHTHSVGTVCCSRLKESFLVTGSQDCTVKLWPLPKALLSKNTAPDNGPILLQAQTTQRCHDKDINSVAIAPNDKLLATGSQDRTAKLWALPQCQLLGVFSGHRRGLWCVQFSPMDQVLATASADGTIKLWALQDFSCLKTFEGHDASVLKVAFVSRGTQLLSSGSDGLVKLWTIKNNECVRTLDAHEDKVWGLHCSRLDDHALTGASDSRVILWKDVTEAEQAEEQARQEEQVVRQQELDNLLHEKRYLRALGLAISLDRPHTVLTVIQAIRRDPEACEKLEATMLRLRRDQKEALLRFCVTWNTNSRHCHEAQAVLGVLLRREAPEELLAYEGVRAALEALLPYTERHFQRLSRTLQAAAFLDFLWHNMKLPVPAAAPTPWETHKGALP

SEQ ID NO: 4386 - DNA, 1513 bp, Homo sapiens
ggcacgaggcaagagcaaaggggccagcacccccgctgcctccacgctgcccaccgccaacggggcccgaccggcgcgctccgggactgcgctttccggccccgacgcgccgcccaacgggccttgcagcccggccggccctcgcttggcggcggtgtcgacttctacgacgtcgccttcaaggtcatgctggtgggggactcgggtgtggggaagacctgtctgctggtgcgattcaaggatggtgctttcctggcggggaccttcatctccaccgtaggcattgacttccggaacaaagttctggacgtggatggtgtgaaggtgaagctgcagatgtgggacacagctggtcaggagcggttccgcagtgttacccatgcctactaccgggatgctcatgctctgctgctgctctacgatgtcaccaacaaggcctcctttgacaacatccaggcctggctgaccgagatccacgagtacgcccagcacgacgtggcgctcatgctgctggggaacaaggtggactctgcccatgagcgtgtggtgaagagggaggacggggagaagctggccaaggagtatggactgcccttcatggagaccagcgccaagacgggcctcaacgtggacttggccttcacagccatagcaaaggagttgaagcagcgctccatgaaggctcccagcgagccgcgcttccggctgcatgattacgttaagagggagggtcgaggggcctcctgctgccgcccttgaacctggctgagctcagtcctctggaggaagccgcccagtccctagaaggctggacagagggtctccaggcccttctgactttgttgcccagtggccaacgcccgagtgtctgttttcaggagccccaggtcaagccttgtcccttcctcctcccagcaacagtcccaacaagcaggcttctgagagcccgtggccgcacactggccgccacggaaaagcagtcttctgcacgggacggggagcggcaagtggacagactttgccacggtgctctgctgccccctcctgggcacgtccaggtgagggagggctggggctggcaccacgcacagtgcctaaccctagaaaagccatgtcttcagccgcacatgctcaggcagctaagggaggacgcctgcccacgcctgggacagaaggcttcactgctaatcacatcgtgcatctgtgtgtcctgggagctgcctgctcccggcccaccctctaggaggctctggctcaaacagcaatagggtcttcctcactgaccttggaggatgcctgtggccttgtgataaaatgtgggaaatcacagaaaacaccagaaacaacaactgccagcccggcctggccacaggtgaggtctgtgatttccgagcacgctccaccttgcactcaacttggccttttgattgcacaagcctttgttttcagtcctagtgaataaagttgtgttttctggaaaaaaaaaaaaaaaaaaaaaaaaaaaaaaaaaaaa

SEQ ID NO: 4387 - protein, 190 aa, Homo sapiens
MLVGDSGVGKTCLLVRFKDGAFLAGTFISTVGIDFRNKVLDVDGVKVKLQMWDTAGQERFRSVTHAYYRDAHALLLLYDVTNKASFDNIQAWLTEIHEYAQHDVALMLLGNKVDSAHERVVKREDGEKLAKEYGLPFMETSAKTGLNVDLAFTAIAKELKQRSMKAPSEPRFRLHDYVKREGRGASCCRP

SEQ ID NO: 4388 - DNA, 3584 bp, Homo sapiens
gggcgggaggtgcttcccaaggaccgtagatgcctctctagagcatgagctcaggcaagagtgcccgctacaaccgcttctccggggggcccagcaatcttcccaccccagacgtcaccacagggaccagaatggaaacgaccttcggacccgccttttcagccgtcaccaccatcacaaaagctgacgggaccagcacctacaagcagcactgcaggacagcatgccccccatcagcactccccgccgctccgactccgccatctctgtccgctccctgcactcagagtccagcatgtctctgcgctccacattctcactgcccgaggaggaggaggagccggagccactggtgtttgcggagcagccctcggtgaagctgtgctgtcagctctgctgcagcgtcttcaaagaccccgtgatcaccacgtgtgggcacacgttctgtaggagatgcgccttgaagtcagagaagtgtcccgtggacaacgtcaaactgaccgtggtggtgaacaacatcgcggtggccgagcagatcggggagctcttcatccactgccggcacggctgccgggtagcgggcagcgggaagccccccatctttgaggtggacccccgagggtgccccttcaccatcaagctcagcgcccggaaggaccacgagggcagctgtgactacaggcctgtgcggtgtcccaacaaccccagctgccccccgctgctcaggatgaacctggaggcccacctcaaggagtgcgagcacatcaaatgcccccactccaagtacgggtgcacgttcatcgggaaccaggacacttacgagacccacctggagacttgccgcttcgagggcctgaaggagtttctgcagcagacggatgaccgcttccacgagatgcacgtggctctggcccagaaggaccaggagatcgccttcctgcgctccatgctgggaaagctctcggagaagatcgaccagctagagaagagcctggagctcaagtttgacgtcctggacgaaaaccagagcaagctcagcgaggacctcatggagttccggcgggacgcatccatgttaaatgacgagctgtcccacatcaacgcgcggctgaacatgggcatcctaggctcctacgaccctcagcagatcttcaagtgcaaagggacctttgtgggccaccagggccctgtgtggtgtctctgcgtctactccatgggtgacctgctcttcagtggctcctctgacaagaccatcaaggtgtgggacacatgtaccacctacaagtgtcagaagacactggagggccatgatggcatcgtgctggctctctgcatccaggggtgcaaactctacagcggctctgcagactgcaccatcattgtgtgggacatccagaacctgcagaaggtgaacaccatccgggcccatgacaacccggtgtgcacgctggtctcctcacacaacgtgctcttcagcggctccctgaaggccatcaaggtctgggacatcgtgggcactgagctgaagttgaagaaggagctcacaggcctcaaccactgggtgcgggccctggtggctgcccagagctacctgtacagcggctcctaccagacaatcaagatctgggacatccgaacccttgactgcatccacgtcctgcagacgtctggtggcagcgtctactccattgctgtgacaaatcaccacattgtctgtggcacctacgagaacctcatccacgtgtgggacattgagtccaaggagcaggtgcggaccctcacgggccacgtgggcaccgtgtatgccctggcggtcatctcgacgccagaccagaccaaagtcttcagtgcatcctacgaccggtccctcagggtctggagtatggacaacatgatctgcacgcagaccctgctgcgtcaccagggcagtgtcaccgcgctggctgtgtcccggggccgactcttctcaggggctgtggatagcactgtgaaggtttggacttgctaacaggatccaggccaggctgtggtttcccctgaaccagccctggacctttctgagccaggctggccacatggggtggtctcggggtttctgcctgccccgtgggcataggtggacaggctctggcagccgggcagtgccctccccgtcccatgctcggcgagcctccctctactcggcactgtccttgctgcccagcccctctctgggtgccaggtacgacgcttgccccggcccaccctccatccccaccctccatccccaccctagatggagcgagggcctttttactcaccttttctaccgtttttagactgtatgtagatttggttacctcctggttgaaataaatgctccacagactgtggctgtgagtggggacagctcctcgggacaagggggctgtgtgtggccttgaggttggtgtgcacaggcactggctgctgtgagtgggggggcatggggcagtttcctttggtggaccccaggacttcggcccactccggggcctcccctccctgctaggaggcaactcgtcacacccaagctgctggcctccagtcccatctcccccaacacatgtgcccccaaaaagtgagccaggcacctctgtttcctgctgtttattgacagccgacggcagcgccttgcccagacctcccctgcccacctgctggagcccagcctgtgccgccctctgaggagaggcctggggggacagctgggcacgtccactcgcagggaaacacggggtgagacagcaggaaggggccctgcacgccgggacgccacctccgccagccgcctccacccgccccacaccacaatcgctggttttcggcattttttaaattttttttttaagaaacgtcaaagttgtgcccaacactgtggatcagcaaacacgatagaggagaccagtcagtacttcttggagggggcaggaggagagaggaaaagggagggcgagaatgaccacacaacacagccttggaccatgagcagaagcgtccgtgggaactccactggggtggatgggctgcctgcacagcccctggagagggggccaggcacaccctcagaggagctgcaagcccgtggcctggcctgctacatgccctgcttccacgtggctgccacgctgacacacccacattcaccaaacccacccgcgccctgggacgcagccacgccaggaggaggacacggccgccgagagcaaggcacaacctcgagttcttggggcgcagagaacttaggagagaagcacggaggagcccccggcagagcacccgcccccgggccccagccttccacctgtgctagcagcctggggcctccactctggccggaggaaggaccgcaggcagacagcctgggcctctaacagcttttgtccggagctagacttcgtgtcctttcagttggtaaatggttttctatagaatcaataatatttctttctttaaatatatatttgttaaagttatacctttttgtttctctggggaaatccgcctcagctcattcccaataaattaatactcttgataaaaaaaaaaaaaagaaaaaaaaaaaa

SEQ ID NO: 4389 - protein, 594 aa, Homo sapiens
MPPISTPRRSDSAISVRSLHSESSMSLRSTFSLPEEEEEPEPLVFAEQPSVKLCCQLCCSVFKDPVITTCGHTFCRRCALKSEKCPVDNVKLTVVVNNIAVAEQIGELFIHCRHGCRVAGSGKPPIFEVDPRGCPFTIKLSARKDHEGSCDYRPVRCPNNPSCPPLLRMNLEAHLKECEHIKCPHSKYGCTFIGNQDTYETHLETCRFEGLKEFLQQTDDRFHEMHVALAQKDQEIAFLRSMLGKLSEKIDQLEKSLELKFDVLDENQSKLSEDLMEFRRDASMLNDELSHINARLNMGILGSYDPQQIFKCKGTFVGHQGPVWCLCVYSMGDLLFSGSSDKTIKVWDTCTTYKCQKTLEGHDGIVLALCIQGCKLYSGSADCTIIVWDIQNLQKVNTIRAHDNPVCTLVSSHNVLFSGSLKAIKVWDIVGTELKLKKELTGLNHWVRALVAAQSYLYSGSYQTIKIWDIRTLDCIHVLQTSGGSVYSIAVTNHHIVCGTYENLIHVWDIESKEQVRTLTGHVGTVYALAVISTPDQTKVFSASYDRSLRVWSMDNMICTQTLLRHQGSVTALAVSRGRLFSGAVDSTVKVWTC

SEQ ID NO: 4390 - DNA, 1024 bp, Homo sapiens
agcccgcgacctttatcccgcgcgttgcggtcaagatggcgctggtggcttctgttgcgagtccggcgcgcgttctgctccgcgcgggggcccggctcccgggcgcggccctcgggcggacggagcgggcggccggcggcggagacggcgcgcggcgcttcgggagccagcgggtgctggtggagccggacgcgggcgcaggggtcgctgtgatgaaattcaagaaccccccagtgaacagcctgagcctggagtttctgacggagctggtcatcagcctggagaagctggagaatgacaagagcttccgcggtgtcattctgacctcggaccgcccgggtgtcttctcggccggcctggacctgacggagatgtgtgggaggagccccgcccactacgctgggtactggaaggccgttcaggagctgtggctgcggttgtaccagtccaacctggtgctggtctccgccatcaacggagcctgccccgctggaggctgcctggtggccctgacctgtgactaccgcatcctggcggacaaccccaggtactgcataggactcaatgagacccagctgggcatcatcgcccctttctggttgaaagacaccctggagaacaccatcgggcaccgggcggcggagcgtgccctgcagctggggctgctcttcccgccggcggaggccctgcaggtgggcatagtggaccaggtggtcccggaggagcaggtgcagagcactgcgctgtcagcgatagcccagtggatggccattccagaccatgctcgacagctgaccaaggccatgatgcgaaaggccacggccagccgcctggtcacgcagcgcgatgcggacgtgcagaacttcgtcagcttcatctccaaagactccatccagaagtccctgcagatgtacttagagaggctcaaagaagaaaaaggctaacgattgggctgccacaggcttacggccacacgtgcccctgtgggtcccagggaggtcttaaacaaggtatttttcaactt

SEQ ID NO: 4391 - protein, 302 aa, Homo sapiens
MALVASVRVPARVLLRAGARLPGAALGRTERAAGGGDGARRFGSQRVLVEPDAGAGVAVMKFKNPPVNSLSLEFLTELVISLEKLENDKSFRGVILTSDRPGVFSAGLDLTEMCGRSPAHYAGYWKAVQELWLRLYQSNLVLVSAINGACPAGGCLVALTCDYRILADNPRYCIGLNETQLGIIAPFWLKDTLENTIGHRAAERALQLGLLFPPAEALQVGIVDQVVPEEQVQSTALSAIAQWMAIPDHARQLTKAMMRKATASRLVTQRDADVQNFVSFISKDSIQKSLQMYLERLKEEKG

SEQ ID NO: 4392 - DNA, 2038 bp, Homo sapiens
ggcccgcgggactcagaccagcggggagcgcggcctccgcccttggggccctcccgccgggccggagacccaagcccccaacgccaggccctgccctggaagcgctcgcggcccggcgcctggacgggggagttgctgctctttggcgtaaattgcaatcgattagggatcgtttctcagaatcaagttagaagtgagagttcagataagtgaggccgccattgctgctttgaacacctcagaaggggagaatggatttatcaggagtgaaaaagaagagcttgctaggagtcaaagaaaataataaaaagtccagcactagggctccttcacctaccaaacgcaaagaccgctcagatgagaagtccaaggatcgctcaaaagataaaggggccaccaaggagtcgagtgagaaggatcgcggccgggacaaaacccgaaagaggcgcagcgcttccagtggtagcagcagtaccaggtctcggtccagctcgacttccagctcaggctccagcaccagcactggctcaagcagtggctccagctcttcctcagcatccagccgctcaggaagctccagcacctcccgcagctccagctctagcagctcttctggctctccaagtccttctcggcgcagacacgacaacaggaggcgctcccgctccaaatccaaaccacctaaaagagatgaaaaggagaggaaaaggcggagcccatctcctaagcccaccaaagtgcacattgggagactcacccggaatgtgacaaaggatcacatcatggagatattttccacctatgggaaaattaaaatgattgacatgcccgtggaaaggatgcatccccatctgtccaaaggctatgcgtacgtagagtttgagaatccagatgaagccgagaaggcgctgaagcacatggatggaggacaaattgatggccaggagatcactgccaccgccgtgctggccccctggcctaggccaccccccaggagattcagccctcccaggagaatgttgccaccaccgcctatgtggcgcaggtctcccccacggatgaggagaaggtcccgctccccgaggcgcaggtcccccgtgcgccggagatcacggtccccgggccgccgccgccacaggagccgctccagctccaactcctcccgataaacaggccactgaagctctcgcccctgtaacttataccccacccagctcagttttgtcacttttctagccaaaggaagaccagtaggaaagcaaacccttgactctggcaggatttgcaggcagcaggcagcacccctctgccagccgggccccggctgcagaagtgctgttggtttggatgctgtgtgcctgtcaagattccctccggttttctggctagaaagctcatccgtttccggtttctaagagtcagttcagtggcagagccaccagggaaaagtgaggctcttgggggtggtttgaccctgcttacctgggagcacacttttcccttccccgatgacctgggatggtggccaggccgtgcccttgctgttgctgggcagtgtccttttggaaagggagctgccccaggctttagtgcagctgccaaccctgttaggcctggcctctcgaggcctcttctgacctcaagggtcacaccccctcaaagatcctctcacccatggtagttgctgctcgtggttctgtctgtccgtgcaccgatgcacacaccgcaccccaccactgtactctgaaattggcgagtgagtggagagccagctctgcggagtcatcacgcagccatggttgtgcctgccgttcatggtggtctttcaggttatcttggcaacatgtacattgcttttattttttttcttttttgctttcattgtacagtcagtactataaaatttctcttttgagttttatacctttgtagcattttagatgacattgtgtttgtactttgttgtgtagagtggaagaattgtgttgaataaacccaagatcggaatgcaaaaaaaaaaaaaaaaaaaaaaaaaaaa

SEQ ID NO: 4393 - protein, 305 aa, Homo sapiens
MDLSGVKKKSLLGVKENNKKSSTRAPSPTKRKDRSDEKSKDRSKDKGATKESSEKDRGRDKTRKRRSASSGSSSTRSRSSSTSSSGSSTSTGSSSGSSSSSASSRSGSSSTSRSSSSSSSSGSPSPSRRRHDNRRRSRSKSKPPKRDEKERKRRSPSPKPTKVHIGRLTRNVTKDHIMEIFSTYGKIKMIDMPVERMHPHLSKGYAYVEFENPDEAEKALKHMDGGQIDGQEITATAVLAPWPRPPPRRFSPPRRMLPPPPMWRRSPPRMRRRSRSPRRRSPVRRRSRSPGRRRHRSRSSSNSSR

SEQ ID NO: 4394 - DNA, 1963 bp, Homo sapiens
gagcggcgccggcctcggcggctgaggaaagcaggaggaggtggcggcggcgggaagatgctgctctttggcgtaaattgcaatcgattagggatcgtttctcagaatcaagttagaagtgagagttcagataagtgaggccgccattgctgctttgaacacctcagaaggggagaatggatttatcaggagtgaaaaagaagagcttgctaggagtcaaagaaaataataaaaagtccagcactagggctccttcacctaccaaacgcaaagaccgctcagatgagaagtccaaggatcgctcaaaagataaaggggccaccaaggagtcgagtgagaaggatcgcggccgggacaaaacccgaaagaggcgcagcgcttccagtggtagcagcagtaccaggtctcggtccagctcgacttccagctcaggctccagcaccagcactggctcaagcagtggctccagctcttcctcagcatccagccgctcaggaagctccagcacctcccgcagctccagctctagcagctcttctggctctccaagtccttctcggcgcagacacgacaacaggaggcgctcccgctccaaatccaaaccacctaaaagagatgaaaaggagaggaaaaggcggagcccatctcctaagcccaccaaagtgcacattgggagactcacccggaatgtgacaaaggatcacatcatggagatattttccacctatgggaaaattaaaatgattgacatgcccgtggaaaggatgcatccccatctgtccaaaggctatgcgtacgtagagtttgagaatccagatgaagccgagaaggcgctgaagcacatggatggaggacaaattgatggccaggagatcactgccaccgccgtgctggccccctggcctaggccaccccccaggagattcagccctcccaggagaatgttgccaccaccgcctatgtggcgcaggtctcccccacggatgaggagaaggtcccgctccccgaggcgcaggtcccccgtgcgccggagatcacggtccccgggccgccgccgccacaggagccgctccagctccaactcctcccgataaacaggccactgaagctctcgcccctgtaacttataccccacccagctcagttttgtcacttttctagccaaaggaagaccagtaggaaagcaaacccttgactctggcaggatttgcaggcagcaggcagcacccctctgccagccgggccccggctgcagaagtgctgttggtttggatgctgtgtgcctgtcaagattccctccggttttctggctagaaagctcatccgtttccggtttctaagagtcagttcagtggcagagccaccagggaaaagtgaggctcttgggggtggtttgaccctgcttacctgggagcacacttttcccttccccgatgacctgggatggtggccaggccgtgcccttgctgttgctgggcagtgtccttttggaaagggagctgccccaggctttagtgcagctgccaaccctgttaggcctggcctctcgaggcctcttctgacctcaagggtcacaccccctcaaagatcctctcacccatggtagttgctgctcgtggttctgtctgtccgtgcaccgatgcacacaccgcaccccaccactgtactctgaaattggcgagtgagtggagagccagctctgcggagtcatcacgcagccatggttgtgcctgccgttcatggtggtctttcaggttatcttggcaacatgtacattgcttttattttttttcttttttgctttcattgtacagtcagtactataaaatttctcttttgagttttatacctttgtagcattttagatgacattgtgtttgtactttgttgtgtagagtggaagaattgtgttgaataaacccaagatcggaatgcaaaaaaaaaaaaaaaaaaaaaaaaaaaa

SEQ ID NO: 4395 - protein, 305 aa, Homo sapiens; identical to SEQ ID NO: 4393

SEQ ID NO: 4396 - DNA, 1325 bp, Homo sapiens
gcgaggttctgcgcgggcgcggaagacgggcggcgcgtggcggaagggttcgggacggtacgcaccagccaccttcgcgccgaaggcggtagggcgccacggagaggaaccgctctaggcacgtaaggcctcgtgaggttgcgtcgcgcgcggagcactctgggacttgtagttctggagatggagcgagctgtgccgctcgcggtgcctctgggtcagaggtgttccaggccttgcagcggctccatatgaccatcttctcccagagcgtctcaccatgtgggaagtttctggcggctggcaacaattacgggcagattgccatcttcagcttgtcctctgctttgagctcagaagccaaagaggaaagtaagaagccggtggtgactttccaagcccatgatgggcccgtctatagcatggtttccaccgatcgacatctgcttagtgctggggatggggaggtgaaggcctggctttgggcggagatgctcaagaagggctgtaaggagctgtggcgtcgtcagcctccatacaggaccagcctggaagtgcctgagatcaacgctttgctgctggtccccaaggagaattccctcatcctggctgggggagactgtcagttgcacactatggaccttgaaactgggactttcacgagggtcctccggggccacacagactacatccactgcctggcactgcgggaaaggagcccagaggtgctgtcaggtggcgaggatggagctgttcgactttgggacctgcgcacagccaaggaggtccagacgatcgaggtctataagcacgaggagtgctcgaggccccacaatgggcgctggattggatgtttggcaactgattccgactggatggtctgtggagggggcccagccctcaccctctggcacctccgatcctccacacccaccaccatcttccccatccgggcgccacagaagcacgtcaccttctaccaggacctgattctgtcagctggccagggccgctgcgtcaaccagtggcagctgagcggggagctgaaggcccaggtgcctggctcctccccagggctgctcagcctcagcctcaaccagcagcctgccgcgcctgagtgcaaggtcctgacagctgcaggcaacagctgccgggtggatgtcttcaccaacctgggttaccgagccttctccctgtccttctgatctctgacgacacccccagccagctcagggttttagagtgtttttcattttcttttttttttttttacaataaagtttcaggcttttttaaaaaaaaaaaaaaaaaaaaaaaaaaaaaaaaaa

SEQ ID NO: 4397 - protein, 317 aa, Homo sapiens
MTIFSQSVSPCGKFLAAGNNYGQIAIFSLSSALSSEAKEESKKPVVTFQAHDGPVYSMVSTDRHLLSAGDGEVKAWLWAEMLKKGCKELWRRQPPYRTSLEVPEINALLLVPKENSLILAGGDCQLHTMDLETGTFTRVLRGHTDYIHCLALRERSPEVLSGGEDGAVRLWDLRTAKEVQTIEVYKHEECSRPHNGRWIGCLATDSDWMVCGGGPALTLWHLRSSTPTTIFPIRAPQKHVTFYQDLILSAGQGRCVNQWQLSGELKAQVPGSSPGLLSLSLNQQPAAPECKVLTAAGNSCRVDVFTNLGYRAFSLSF

SEQ ID NO: 4398 - DNA, 998 bp, Homo sapiens
gcggcgggcgcagacagcggcgggcgcaggacgtgcactatggctcggggctcgctgcgccggttgctgcggctcctcgtgctggggctctggctggcgttgctgcgctccgtggccggggagcaagcgccaggcaccgccccctgctcccgcggcagctcctggagcgcggacctggacaagtgcatggactgcgcgtcttgcagggcgcgaccgcacagcgacttctgcctgggctgcgctgcagcacctcctgcccccttccggctgctttggcccatccttgggggcgctctgagcctgaccttcgtgctggggctgctttctggctttttggtctggagacgatgccgcaggagagagaagttcaccacccccatagaggagaccggcggagagggctgcccagctgtggcgctgatccagtgacaatgtgccccctgccagccggggctcgcccactcatcattcattcatccattctagagccagtctctgcctcccagacgcggcgggagccaagctcctccaaccacaaggggggtggggggcggtgaatcacctctgaggcctgggcccagggttcaggggaaccttccaaggtgtctggttgccctgcctctggctccagaacagaaagggagcctcacgctggctcacacaaaacagctgacactgactaaggaactgcagcatttgcacaggggaggggggtgccctccttccttaggacctgggggccaggctgacttggggggcagacttgacactaggccccactcactcagatgtcctgaaattccaccacgggggtcaccctggggggttagggacctatttttaacactaggggctggcccactaggagggctggccctaagatacagacccccccaactccccaaagcggggaggagatatttattttggggagagtttggaggggagggagaatttattaataaaagaatctttaactttaaaaaaaaaaaaaaaaa

SEQ ID NO: 4399 - protein, 129 aa, Homo sapiens
MARGSLRRLLRLLVLGLWLALLRSVAGEQAPGTAPCSRGSSWSADLDKCMDCASCRARPHSDFCLGCAAAPPAPFRLLWPILGGALSLTFVLGLLSGFLVWRRCRRREKFTTPIEETGGEGCPAVALIQ

SEQ ID NO: 4400 - DNA, 1372 bp, Homo sapiens
ggcacgaggatctccttcgcagtgcagctccttcaacctcgccatggcctctgccggaatgcagatcctgggagtcgtcctgacactgctgggctgggtgaatggcctggtctcctgtgccctgcccatgtggaaggtgaccgctttcatcggcaacagcatcgtggtggcccaggtggtgtgggagggcctgtggatgtcctgcgtggtgcagagcaccggccagatgcagtgcaaggtgtacgactcactgctggcgctgccacaggacctgcaggctgcacgtgccctctgtgtcatcgccctccttgtggccctgttcggcttgctggtctaccttgctggggccaagtgtaccacctgtgtggaggagaaggattccaaggcccgcctggtgctcacctctgggattgtctttgtcatctcaggggtcctgacgctaatccccgtgtgctggacggcgcatgccgtcatccgggacttctataaccccctggtggctgaggcccaaaagcgggagctgggggcctccctctacttgggctgggcggcctcaggccttttgttgctgggtggggggttgctgtgctgcacttgcccctcgggggggtcccagggccccagccattacatggcccgctactcaacatctgcccctgccatctctcgggggccctctgagtaccctaccaagaattacgtctgacgtggaggggaatgggggctccgctggcgctagagccatccagaagtggcagtgcccaacagctttgggatgggttcgtaccttttgtttctgcctcctgctatttttcttttgactgaggatatttaaaattcatttgaaaactgagccaaggtgttgactcagactctcacttaggctctgctgtttctcacccttggatgatggagccaaagaggggatgctttgagattctggatcttgacatgcccatcttagaagccagtcaagctatggaactaatgcggaggctgcttgctgtgctggctttgcaacaagacagactgtccccaagagttcctgctgctgctgggggctgggcttccctagatgtcactggacagctgccccccatcctactcaggtctctggagctcctctcttcacccctggaaaaacaaatgatctgttaacaaaggactgcccacctccggaacttctgacctctgtttcctccgtcctgataagacgtccaccccccagggccaggtcccagctatgtagacccccgcccccacctccaacactgcacccttctgccctgcccccctcgtctcaccccctttacactcacatttttatcaaataaagcatgttttgttagtgcaaaaaaaaaaaaaaaaaaaa

SEQ ID NO: 4401 - protein, 220 aa, Homo sapiens
MASAGMQILGVVLTLLGWVNGLVSCALPMWKVTAFIGNSIVVAQVVWEGLWMSCVVQSTGQMQCKVYDSLLALPQDLQAARALCVIALLVALFGLLVYLAGAKCTTCVEEKDSKARLVLTSGIVFVISGVLTLIPVCWTAHAVIRDFYNPLVAEAQKRELGASLYLGWAASGLLLLGGGLLCCTCPSGGSQGPSHYMARYSTSAPAISRGPSEYPTKNYV

SEQ ID NO: 4402 - DNA, 1976 bp, Homo sapiens
caggactcccgtgagggggaacggcccgtgaacgcgcgcggagctgctcgcgccccgcccagtcgccccagggcttccccacacccacggagtgaagtcagccgcggccctgcctgggaggaacttaccgtctaccgggaaaggtggccagcagatgtgtcgggcctggtgagagggtgaggcgagacggcccgatcgcccagggccccggaagctgcggaggtcacccccgcctggccttagctcagggacaccctggattcacgtgggagcccctgctcctgcctcccccgtcccaccactgaagctgttgggccaggccagtcatgctagaacggcctcctgcactggccatgcccatgcccacggagggcaccccgccacctctgagtggcacccccatcccagtcccagcctacttccgccacgcagaacctggattctccctcaagaggcccagggggctcagccggagcctcccacctccgccccctgccaagggcagcattcccatcagccgcctcttccctcctcggaccccaggctggcaccagctgcagccccggcgggtgtcattccggggcgaggcctcagagactctgcagagccctgggtatgacccaagccggccagagtccttcttccagcagagcttccagaggctcagccgcctgggccatggctcctacggagaggtcttcaaggtgcgctccaaggaggacggccggctctatgcggtaaagcgttccatgtcaccattccggggccccaaggaccgggcccgcaagttggccgaggtgggcagccacgagaaggtggggcagcacccatgctgcgtgcggctggagcaggcctgggaggagggcggcatcctgtacctgcagacggagctgtgcgggcccagcctgcagcaacactgtgaagcctggggtgccagcctgcctgaggcccaggtctggggctacctgcgggacacgctgcttgccctggcccatctgcacagccagggcctggtgcaccttgatgtcaagcctgccaacatcttcctggggccccggggccgctgcaagctgggtgacttcggactgctggtggagctgggtacagcaggagctggtgaggtccaggagggagacccccgctacatggcccccgagctgctgcagggctcctatgggacagcagcggatgtgttcagtctgggcctcaccatcctggaagtggcatgcaacatggagctgccccacggtggggagggctggcagcagctgcgccagggctacctgccccctgagttcactgccggtctgtcttccgagctgcgttctgtccttgtcatgatgctggagccagaccccaagctgcgggccacggccgaggccctgctggcactgcctgtgttgaggcagccgcgggcctggggtgtgctgtggtgcatggcagcggaggccctgagccgagggtgggccctgtggcaggccctgcttgccctgctctgctggctctggcatgggctggctcaccctgccagctggctacagcccctgggcccgccagccaccccgcctgactcaccaccctgcagtttgctcctggacagcagcttctccagcaactgggatgacgacagcctagggccttcactctcccctgaggctgtcctggcccggactgtggggagcacctccaccccccggagcaggtgcacacccagggatgccctggacctaagtgacatcaactcagagcctcctcggggctccttcccctcctttgagcctcggaacctcctcagcatgtttgaggacaccctagacccaacctgagccccagattctgcctctgcacttttaaccttttatcctgtgtctctcccgtcgcccttgaaagctggggcccctcgggaactcccatggtcttctctgcctggccgtgtctaataaaaagtatttgaaccttgaaaaaaaaaaaagaag

SEQ ID NO: 4403 - protein, 499 aa, Homo sapiens [sequence omitted]

SEQ ID NO: 4404 - DNA, 2671 bp, Homo sapiens
ggccaccgccgccgccgccgccgcgagctgtccctgcggcgcgtctgccttggcggagccgaccgcagtgcgctcaggcgtccggtgcgtccccagcctccgccccggcgcgggggcgacggactcgcgcgtgcgcagcgccggaggggcgcgggctgggaccccctagccagcgcgtgcgccgatcgagcgcagggcgatgggtgggcgccgggcgccgggcgccaggcagtgatgggccttcccgcgctgcggccccactgaggaggaggctcggggacagcaggagcacgggctgcccgcgcggtgcggaccatggcgttcctggccgggccgcgcctgctggactgggccagctcgccgccgcacctgcagttcaataagttcgtgctgaccgggtaccggcccgccagcagcggctcgggctgcctgcgcagcctcttctacctgcacaacgaactgggcaacatctacacgcacgggctggccctgctgggcttcctggtgctggtgccaatgaccatgccctggggtcagctgggcaaggatggctggctgggaggcacacattgcgtggcctgccttgcaccccctgcaggctccgtgctctatcacctctttatgtgccaccaagggggcagcgctgtgtacgcccggctcctcgccctggacatgtgtggggtctgccttgtcaacacccttggggccctgcccatcatccactgcaccctggcctgcaggccctggctgcgcccggctgccctggtgggctacactgtgttgtcgggtgtggccggctggcgtgctctcaccgccccctccaccagtgctcggctccgggcatttggatggcaggctgctgcccgcctactggtatttggggcccggggagtgggtctgggttcaggggctccaggctccctgccctgctacctgcgcatggacgcactggcgctgcttgggggactggtaaatgtagcccgtctgcccgagcgctggggacctggccgctttgactactggggcaactcccaccagatcatgcacctgctgagcgtgggctccatcctgcagctgcacgccggcgtcgtgcccgacctgctctgggctgcccaccacgcctgtccccgggactgagctgccatgccagcctgcccacagcagcctcctagagttagcaacaccaggtgttcctcccaactcgtctgcaaggggctggctccttggatgcttccagctcatgagatgtctcagcaggagccctgttcacccgttcttccctgtggactgacctcttccacccacgccgtggcgctccaacttccttccctgccttttccctccaagctcctattttactgtgtcagctggaaggaaacctttccctcttgggacctctttaccctctgtgacctgtggggttagaccagagagggactctggggtcacgtcttgctctgagagttcaagtcctgccaggccgccagcccagagcctcctcaccctatcctgttcctcccaccaggcctgtggccagtcttcctgatctccatctttctgccctgcataccagccctcccagcagccacaagcttgcccgccctggctccctctgcccagagactatggagtaaggcattcaggacaaaaggaccaagggggcgtggacccgtcttgtaccagctggccacaggcacaagggctgcagctgcttcttccaggaaactgacacagggagctcagcggcctcagatcctgggacccctgggccgtgcctgccctccaccttgagtgccatactcccaacagctccaggtacccaccgggggatgtgcctgctcaggaaacctctttgctccacacagcatggggcttcagctgctggcccaaggccaggagcgctgggttctgcagcagggctcagcctcaggggcgttaagaccctggatgacatcaataaagggacaggaagggccatgttgccacatgagcaagcttgggtgctcccaaggttcaaatactttttattagacacggccaggcagagaagaccatgggagttcccgaggggccccagctttcaagggcgacgggagagacacaggataaaaggttaaaagtgcagaggcagagtctggggctcaggttgggtctagggtgtcctcaaacaggctgaggaggttccgaggctcaaaggaggggaaggagccccgaggaggctctgagttgatgtcacttaggtccagggcatccctgggaggagagagtagtgacactcaggatccaaaagctagccctgcccaccccagcccctggacctgcttacctgggtgtgcacctgctccggggggtggaggtgctccccacagtccgggccaggacagcctcaggggagagtgaaggcctgcaggagggcaggcgagacaaggagggtgtccagggctagggagtgccggatgaaaccagctctgtccctgtgcaggctccaggctcccgcctgacaaacaggcagggagccacagtcagggacaataaaaacttggtgcactctgaaagcagcacttggacagccttcaaagtccttccatctggctgcactccaaggccccctctgtccttttcagaacacatggacttggaggcagatttgaaataaacttttagtaaatgt

SEQ ID NO: 4405 - protein, 273 aa, Homo sapiens
MAFLAGPRLLDWASSPPHLQFNKFVLTGYRPASSGSGCLRSLFYLHNELGNIYTHGLALLGFLVLVPMTMPWGQLGKDGWLGGTHCVACLAPPAGSVLYHLFMCHQGGSAVYARLLALDMCGVCLVNTLGALPIIHCTLACRPWLRPAALVGYTVLSGVAGWRALTAPSTSARLRAFGWQAAARLLVFGARGVGLGSGAPGSLPCYLRMDALALLGGLVNVARLPERWGPGRFDYWGNSHQIMHLLSVGSILQLHAGVVPDLLWAAHHACPRD

SEQ ID NO: 4406 - DNA, 1799 bp, Homo sapiens
gggagactgtcagaggacaacgccccctaggtctcctgggagaccccgaagcgaccccgggggcagcccgggccgtgtccgggcgagggtgacctatccttggttgagagcgatggggacacaagccctgcagggcttcctctttctcctcttcctcccgctgctgcagccgcgtggggcctcggctgggagcctgcacagtccaggcctgtccgaatgcttccaggtgaatggggctgactaccgcggccaccagaaccgcactggcccgcgcggggcgggccgcccgtgcctcttctgggaccagacgcagcaacacagctacagcagcgccagcgacccccacggccgctgggggctgggcgcgcacaacttctgccgtaacccagacggtgacgtgcagccgtggtgctacgtggctgagacagaggagggcatctactggcgctactgcgacatcccctcctgtcacatgccaggctacctgggatgctttgtggactcaggggcacccccagccctcagcggccccagcggcacctccacgaagctcacggtccaggtgtgcctacgcttctgccgcatgaaggggtaccagctggcgggcgtggaggccggttacgcctgcttctgtggctctgaaagcgacctggcccggggacgcctggcccccgccaccgactgtgaccagatctgtttcggccaccctggacagctgtgtggcggcgatgggcggctgggcgtctatgaagtgtcggtgggctcctgccaggggaactggacagcgcctcagggcgtcatctactccccggacttcccggacgagtacgggccggaccggaactgcagctgggccctgggcccgccaggcgccgcgctggagctcaccttccgcctcttcgagctggccgacccgcgcgaccggctggagctgcgcgacgcggcttcgggcagcctgctccgcgccttcgatggcgcccgcccaccgccgtccgggccgctgcgcctgggcactgccgcgctgctgctcaccttccgaagcgacgcgcgcggccacgcgcaaggcttcgcgctcacctaccgcgggctgcaggacgccgctgaggacccagaggcccccgagggctcggcccagacccccgcggcgcccctcgacggggccaacgtgagctgcagccccaggcctggggctccgccggccgcgattgggggagctgtctgctggctccgggaaaagggcccccggcgctgggggcttccaggggccccaggagaagctgggctgtgtggtaccaacagccccgaggggtggccttgccctgctcccccggggacccccaggctgagggttctgccgcgggctaccggcctctgagtgcctccagccagagctccctgcgctcgctcatctccgctctctgactctgggccccgagggtccgctgggcccgccgccggcgagatggacacctgagatgctgtgctgcgccctgcctcggccttgcgcctgtgtaggggcagctcggcctctggtcgccttggggagaccaaaagtcggacaggaaacatctggtgctattatctgggacttggcctgaccgtgggggtccagatggtccaggccctctccatggacctgtatgtgggggtggtctctggtttcggaggtctttgaacccctctgggggtggtcctggactgccgtcctcagtgagaggtcacaggtcagcaaaaacagtcaaaaaacccccacagattttgaataaaggatctactttggtaaaaaaaaaaaaaaaaaa

SEQ ID NO: 4407 - protein, 420 aa, Homo sapiens
MGTQALQGFLFLLFLPLLQPRGASAGSLHSPGLSECFQVNGADYRGHQNRTGPRGAGRPCLFWDQTQQHSYSSASDPHGRWGLGAHNFCRNPDGDVQPWCYVAETEEGIYWRYCDIPSCHMPGYLGCFVDSGAPPALSGPSGTSTKLTVQVCLRFCRMKGYQLAGVEAGYACFCGSESDLARGRLAPATDCDQICFGHPGQLCGGDGRLGVYEVSVGSCQGNWTAPQGVIYSPDFPDEYGPDRNCSWALGPPGAALELTFRLFELADPRDRLELRDAASGSLLRAFDGARPPPSGPLRLGTAALLLTFRSDARGHAQGFALTYRGLQDAAEDPEAPEGSAQTPAAPLDGANVSCSPRPGAPPAAIGGAVCWLREKGPRRWGLPGAPGEAGLCGTNSPEGWPCPAPPGTPRLRVLPRATGL

SEQ ID NO: 4408 - DNA, 1165 bp, Homo sapiens
gctgggagtagagggcagagctcccaccccgccccgcccccagggggcgccccgggcccggcgcgagaggaggcagagggggcgtcaggccgcgggagaggaggccatgggcgcgcgcggggcgctgctgctggcgctgctgctggctcgggctggactcaggaagccggagtcgcaggaggcggcgccgttatcaggaccatgcggccgacgggtcatcacgtcgcgcatcgtgggtggagaggacgccgaactcgggcgttggccgtggcaggggagcctgcgcctgtgggattcccacgtatgcggagtgagcctgctcagccaccgctgggcactcacggcggcgcactgctttgaaacctatagtgaccttagtgatccctccgggtggatggtccagtttggccagctgacttccatgccatccttctggagcctgcaggcctactacacccgttacttcgtatcgaatatctatctgagccctcgctacctggggaattcaccctatgacattgccttggtgaagctgtctgcacctgtcacctacactaaacacatccagcccatctgtctccaggcctccacatttgagtttgagaaccggacagactgctgggtgactggctgggggtacatcaaagaggatgaggcactgccatctccccacaccctccaggaagttcaggtcgccatcataaacaactctatgtgcaaccacctcttcctcaagtacagtttccgcaaggacatctttggagacatggtttgtgctggcaatgcccaaggcgggaaggatgcctgcttcggtgactcaggtggacccttggcctgtaacaagaatggactgtggtatcagattggagtcgtgagctggggagtgggctgtggtcggcccaatcggcccggtgtctacaccaatatcagccaccactttgagtggatccagaagctgatggcccagagtggcatgtcccagccagacccctcctggccgctactctttttccctcttctctgggctctcccactcctggggccggtctgagcctacctgagcccatgcagcctggggccactgccaagtcaggccctggttctcttctgtcttgtttggtaataaacacattccagttgatgccttgcagggcattcttcaaaa

SEQ ID NO: 4409 - protein, 314 aa, Homo sapiens
MGARGALLLALLLARAGLRKPESQEAAPLSGPCGRRVITSRIVGGEDAELGRWPWQGSLRLWDSHVCGVSLLSHRWALTAAHCFETYSDLSDPSGWMVQFGQLTSMPSFWSLQAYYTRYFVSNIYLSPRYLGNSPYDIALVKLSAPVTYTKHIQPICLQASTFEFENRTDCWVTGWGYIKEDEALPSPHTLQEVQVAIINNSMCNHLFLKYSFRKDIFGDMVCAGNAQGGKDACFGDSGGPLACNKNGLWYQIGVVSWGVGCGRPNRPGVYTNISHHFEWIQKLMAQSGMSQPDPSWPLLFFPLLWALPLLGPV

SEQ ID NO: 4410 - DNA, 7778 bp, Homo sapiens
gcagcgcggcccaggcggggtgcgagtggcgcagttggagcccgttgcggcccctgaggaagcgaggaggcgtcggcgtcggctgaggcgggcggaccggcgaggcgaggcggcggccccaggcccgagggactcgggagctcgagcagcggcggcggcaagacctctccccctcggaggcggcgggcggaggcggcgggagcggtggtgccccccccgggcacggggccatgtacaacgggatcgggctgccgacgccccggggcagcggcaccaacggctacgtccagcgcaacctgtccctggtgcggggccgccggggtgagcggcctgactacaagggagaggaggaactgcggcgcctggaggctgccctggtgaagcggcctaatcctgacatcctggaccacgagcgcaagcggcgcgtcgagctgcgatgcctcgagctggaggagatgatggaagagcaggggtacgaggaacagcaaattcaggaaaaagtggcgacctttcgactcatgttgctggagaaggatgtgaaccctgggggcaaggaggagaccccagggcagaggccagcggtcacggagactcaccagttggcagaattaaatgagaagaagaatgaaagactccgtgctgcctttggcatcagtgattcttacgtagatggcagctcttttgatcctcagcgtcgtgcccgagaagctaaacaaccagctcctgagcctcccaaaccttacagccttgttcgggagtctagcagttctcgctcaccaaccccaaagcagaagaagaagaaaaagaagaaagatagaggacgcaggtcagagagcagctctcctcgacgggagagaaagaaaagctcaaagaagaagaagcacaggtcagaatctgagtccaagaaacgtaagcataggtctcccactccaaagagcaaacgtaaatctaaggacaaaaagcgaaagcggtctcgaagtacaacaccagcccccaagagccgccgggcccaccgttcaacttctgctgactctgcttcctcctccgatacttcccgcagtcggtctcgaagtgctgcagctaaaactcatacaactgccttggctgggcgaagtccttcccctgcttcagggcgacgcggggagggagatgcgcctttcagtgaaccaggtactaccagcacacaacggcctagtagcccggagactgctacgaaacagcctagcagcccttatgaagacaaagataaagacaagaaggagaaatctgcaactcgacctagcccctctccggaaaggagcagcacaggcccagaaccacctgctcccactccgctccttgctgagcgacatggcggctccccacaaccccttgcaaccacccccttaagccaggagccagtgaaccccccatctgaggcctctccaactcgggaccgttcaccacctaagtctcccgagaaacttccccagtcttcttcctcagagagcagcccaccatcccctcaacctaccaaagtttctcggcatgccagctcttccccagaaagtcctaaacctgctccagctccagggtcccaccgagagatttcttcttctcccacatctaagaatcgctcacatggccgagcaaaacgggataaatcacattctcataccccctcccgtaggatggggaggtcccgtagccctgccaccgctaagagagggcgatctcggtctcgaacccctaccaagagaggtcattctcgatcccgatctccccagtggcgtaggtccaggtctgcacagaggtggggaagatctagaagcccccagcgacgtggccgctctaggtctcctcagcgaccaggctggtctaggagcagaaatacccagagaagaggcaggtctaggtcagcaaggcgagggaggtcccactctagatccccagccactaggggtagatctcgttctagaacaccagcccgccggggcaggtcccgctctagaacacctgccaggcggagatcacgatccagaactcccaccaggcgtaggtctcggtctagaacaccagcccggaggggcaggtctcggtctagaacacctgctaggcgcagatctaggacccgatcaccagtacgacgcaggtctcgtagtagatcaccagccaggagaagtggcaggtcacgctctagaaccccagctagacgtggccgctcacgctccagaaccccagccagacgtggccgctcacgctctagaaccccagctagacgcagtggtcgctcacgctccagaacaccagccaggagagggaggtctcggtctaggacaccaagacgaggaagatcccgcagtagaagcttagttagacgtggaagatctcactctagaacacctcaaagaagaggcagatctggctcatcttcagagcggaaaaacaaatccagaacatctcaaagaagaagcaggtccaattcaagcccagaaatgaagaaatctcgcatttcttcaaggcggagcaggtctctctcttcaccacggtccaaagcaaaatctcgcttgtctttgaggcgcagcctttcagggtcttccccatgccctaaacaaaagtcacagacaccacccaggcgcagtcgctctggatcctcccaacctaaagctaaatctagaacgccacccagacgcagtcgctccagttcttctccgccacctaaacagaaatctaagacaccatcaagacaaagtcattccagttcatctcctcatcctaaagtgaaatctggaacaccaccgaggcaagggtccataacaagtccccaggccaatgagcaatctgtaacgccacagagacggagctgttttgaatcatcacctgaccctgagttgaaatctaggaccccttctagacatagctgctcagggtcctctcctcctagagtgaaatctagcacacctcccagacagagcccatctaggtcatcatctccacaacccaaagtgaaggcaataatatcaccaagacaaagaagccattctggctcctcttctccaagtcctagtagggtgacgtcgagaacaactccacggcgaagcagatcagtatctccctgctccaatgtggaatccagattgttgccaagatacagtcattctgggtcctcctcaccagataccaaagtgaaacctgaaacaccgccaagacaaagtcactcagggtctatttcaccataccccaaagtaaaggcccaaactccaccggggccaagtctttctggatcaaagtcaccatgtccccaagagaagtctaaagactcactagttcaaagttgccctggatccctctctctctgtgcaggagtaaaatctagcacaccaccaggcgagagctattttggtgtctcatctctgcaactgaaaggacaatctcaaacttcaccagaccacagatctgatacttcaagtccagaagtgagacagagtcattcagaatcaccatctctgcagagcaaatctcaaacatcacctaagggaggtcggtccaggtcttcatctccagtcactgagctggcatccagatctccaataagacaagatagaggtgagttctcagcgagtcctatgttgaaatctggaatgtctcctgagcagagcaggttccagtctgactcttcttcatatcctacagtggactcgaattctctcttggggcagagtagattggagactgctgaatcaaaagagaaaatggccttaccccctcaggaggatgctactgcatcacctcctagacagaaagacaaatttagtccctttccagtacaggataggcctgagtcttcactggtattcaaagacacacttagaaccccgccaagggaaagaagtggtgctgggtcatctccagaaacaaaagagcaaaatagtgcattgcctacgtcaagccaagatgaagagttaatggaggtggtagagaagtctgaagaacccgcaggccaaatcctgtctcatttgtcttcagaacttaaagaaatgtccacaagtaactttgaatcatctcctgaagtagaagaaaggcctgctgtgtctttgactcttgatcagagccagtcacaggcttctttggaagcagtagaagtcccttcaatggcctcatcttggggtgggccacatttttctccagaacataaagaactgtctaactccccactcagggagaacagctttggatcacctttagaatttagaaactcaggcccacttggtacagaaatgaatactggattttcttctgaggttaaagaagatttgaatggaccgtttcttaatcagctggaaacagatccatctctagacatgaaagaacaatcgacaagatcctctggacacagcagttctgagttatccccagatgcagtggaaaaggcagggatgtcttcaaatcagagcatctcttcacctgtgcttgatgctgtacccagaacaccctcgagagaaagaagtagttctgcatcttctcctgaaatgaaagatggtttacccagaactccatcaaggagaagcaggtctgggtcttctccaggacttagagatgggtctgggactccctcgaggcacagcctgtctgggtcctctcctggaatgaaagatatacctagaacgccatctagagggagaagcgaatgtgattcttccccagaaccgaaagctttgcctcagactcctaggccgaggagtcgttctccatcatccccagagctcaacaacaagtgtcttaccccccagagagaaagaagcgggtcagaatcatcagttgatcagaaaactgtggctcggactcccctggggcagagaagtcgttcgggatcctctcaagaacttgatgtgaaacccagtgcatcccctcaggaaagaagtgagtcagactcttctccagattctaaagccaagacaagaaccccacttcggcagaggagtcggtctggatcatctccagaggttgacagcaaatctcgactatcccctcggcgcagtaggtctggttcctcccctgaagtgaaagataagccaagagcagcacccagggcacagagtggttctgattcctctcctgaacctaaagctccagcccctcgggcccttcccagacgaagcagatcaggttcatcaagcaaaggcagaggcccttctcctgaaggaagcagcagtaccgagtcctctcctgaacatccgcccaaatccagaactgctcgcagaggttccaggtcatcaccagagcccaagaccaagtctcgtacaccacctcgacgtcgcagctctcgatcatctccggagctaacaaggaaggccagactgtcccgtagaagccgctctgcctcatcctcaccagaaactcgctctagaactcccccaaggcaccggagaagtccctcagtgtcttccccggagccagccgaaaaatcgaggtcttcacgccgacggcgctcagcttcatctccacgcactaagacaacctcaaggagaggccgctctccttcgccaaagcctcgtggactccagaggtcccgttcccgctcaaggagagagaaaacaagaacaacccgacgtcgagataggtctggatcttctcagtcaacctctcggcgaagacagcggagccggtcaaggtcgcgggttactcggcggcggaggggaggctctggttatcactcaaggtcacctgcccggcaggaaagttcccggacctcctctcgacgccgaagaggccgctctcggacacccccaaccagtcggaagcgttctcgctcacgcacatcaccagccccgtggaaacgctctagatctcgagcctctccagccactcaccggcgatccaggtccagaacccccctgataagccgacgtaggtccagatctcgaacttcaccagtcagccggagacggtcaaggtccaggacttcagtgactcgacgaagatcccggtcaagagcatccccagtgagcagaaggcgatccagatccagaacgccaccagtaacccgccgtcgttcaaggtctagaacgccaacaacacgccgccgctcccgttctagaactccaccagtgactcgcagaaggtccagatccaggactccaccagtaaccaggaggcgatctcgaagcagaacttcgcctatcactcgcagaagatcaagatccagaacatctccggtcacccgaaggagatctcgatctcgcacatctccagtaactcgaagaaggtcccgctctcgaacctcaccagtgacacgccgccgctctaggtcccggacacctccagcacaggatcagccgaggtctcctgtgccttctgctttttcagaccaatcccgttgtttgattgcccagaccacccctgtagcagggtctcagtccctttcctctggggcagtggcaacgaccacgtcctctgctggtgatcacaatggcatgctctctgtccctgcccctggggtgccccactctgatgtgggggagccacctgcctctactggggcccagcagccttctgcattagccgccctgcagccagcaaaggagcggcggagttcctcctcgtcgtcgtcgtcctctagctcctcctcctcttcatcatcgtcgtcgtcgtcctcctcctcctctggctccagttctagtgactcagagggctctagccttcctgtgcaacctgaggtggcactgaagagggtccccagccccaccccagccccaaaggaggctgttcgagagggacgtcctccggagccaaccccagccaaacggaagaggcgctctagcagttccagttccagctcctcctcttcatcttcctcctcctcctcctcctcctcttcttcctcctcctcttcctcttcttcttcttcctcctcatcttcctcctcctcgtcgtcttcctccccttcccctgctaagcctggccctcaggccttgcccaaacctgcaagccccaagaagccaccccctggcgagcggaggtcccgcagcccccggaagccaatagactccctcagggactctcggtccctcagctactcgcctgtggagcgtcgccgtccctcgccccagccctcaccacgggaccagcagagcagcagcagtgagcggggttcccggagaggccagcgtggggacagccgctcccccagccacaagcgcaggagggagacacctagccctcggcccatgagacaccgctcctccaggtctccataaattgtctttgggggattccaccacacccaatgctctggagccacaaggagtgtcccttcttccccagcagagccgtgggagggtccttgtctgctctcctttgaaccttggcagcccttggatggagggctccctttccctccccttttttttttctttgttcctgtgaaatgttaatctccgtgagttcttcctggttcatgtgttctggggggtttggggtgggagggaatgcagatgggagttgggggaggggaggatacagttcaggataccccagcctggagtcagggccagggaggcatggccccacttgtatccagaagttcccaggggtgattgtgatggtggttgggactggaggttgtataaggtgttcttggaaggaaggggcaggagttggaattagttggtccctactgtcccccatgaggttgtgaacccctccccccaacttttcatgtttcttaaaggcattttggttttttaaaatctgtacagcaagagcaactttttctgtcaaataaaaatgagaaatgcagg

SEQ ID NO: 4411 - DNA, 1708 bp, Homo sapiens
atgctgccggcgggctgctcgcgccggtgaggcctgcgcggcaggagggggtgggaggatgcgggcgggccggtagccaggcgcggggcccgaggcccgacgctggccgaggtgctgagccgccggtgcgtcccccaggctggtggccgagctgcagggcgccctggacgcctgcgcacagcgacaattgcaattggagcagagcctgcgcgtttgccgtcggctgctgcatgcctgggaaccaactgggacccgggctttgaagccacctccagggccagaaactaatggagaggacccccttccagcatgcacacccagtccacaagacctcaaagagttggagtttctgacccaggcactggagaaggctgtacgagttcgaagaggcatcactaaggccggagagagagacaaggcccccagcctgaaatctaggtccattgtcacctcttctggcacgacagcctccgccccaccgcattccccaggccaagctggtggccatgcttcagacacgagacccaccaagggcctccgccagaccacggtgcctgccaagggccaccctgagcgccggctgctgtcagtgggggatgggacccgtgttgggatgggagcccgaacccccaggcctggggcgggcctcagggaccagcaaatggccccatccgctgctcctcaggccccagaagccttcacactcaaggagaaggggcacctgctgcggctgcctgcggcattcaggaaagcagcttcccagaactcgagcctgtgggcccagctcagttccacacagaccagtgattccacggatgccgccgctgccaaaacccagttcctccagaacatgcagacagcttcaggcgggccccagcccaggctcagtgctgtggaggtggaggcggaggcggggcgcctgcggaaggcctgctcgctgctgagactgcgcatgagggaggagctctcagcagcccccatggactggatgcaggagtaccgctgcctgctcacgctggaggggctgcaggccatggtgggccagtgtctgcacaggctgcaggagctgcgtgcagcggtggcggaacagccaccaagaccatgtcctgtggggaggccccccggagcctcgccgtcctgtgggggtagagcggagcctgcatggagcccccagctgcttgtctactccagcacccaggagctgcagaccctggcggccctcaagctgcgagtggctgtgctggaccagcagatccacttggaaaaggtcctgatggctgaactcctccccctggtaagcgctgcacagccgcaggggccgccctggctggccctgtgccgggctgtgcacagcctgctctgcgagggaggagcacgtgtccttaccatcctgcgggatgaacctgcagtctgagcctttcccatgctgccctcggcctgttcagatggggattgggggtgtcttccctggcactgtgctcggggacccagagatgcctgtgcttccctgggaaacctggtgaactggaccaggtggcctcactggctcttctcaggacaactaagcctgctggtcagggctggctttcagccttcctaaggctcctggactccagaggccagcggggagcctttcctggctccctctgttttctctcactgtagaccaaagagccgcttgtgtgatattaaagccactttagaaagc

SEQ ID NO: 4412 - protein, 266 aa, Homo sapiens
MGARTPRPGAGLRDQQMAPSAAPQAPEAFTLKEKGHLLRLPAAFRKAASQNSSLWAQLSSTQTSDSTDAAAAKTQFLQNMQTASGGPQPRLSAVEVEAEAGRLRKACSLLRLRMREELSAAPMDWMQEYRCLLTLEGLQAMVGQCLHRLQELRAAVAEQPPRPCPVGRPPGASPSCGGRAEPAWSPQLLVYSSTQELQTLAALKLRVAVLDQQIHLEKVLMAELLPLVSAAQPQGPPWLALCRAVHSLLCEGGARVLTILRDEPAV

SEQ ID NO: 4413 - DNA, 7779 bp, Homo sapiens
gcagcgcggcccaggcggggtgcgagtggcgcagttggagcccgttgcggcccctgaggaagcgaggaggcgtcggcgtcggctgaggcgggcggaccggcgaggcgaggcggcggccccaggcccgagggacctcgggagctcgagcagcggcggcggcaagacctctccccctcggaggcggcgggcggaggcggcgggagcggtggtgccccccccgggcacggggccatgtacaacgggatcgggctgccgacgccccggggcagcggcaccaacggctacgtccagcgcaacctgtccctggtgcggggccgccggggtgagcggcctgactacaagggagaggaggaactgcggcgcctggaggctgccctggtgaagcggcctaatcctgacatcctggaccacgagcgcaagcggcgcgtcgagctgcgatgcctcgagctggaggagatgatggaagagcaggggtacgaggaacagcaaattcaggaaaaagtggcgacctttcgactcatgttgctggagaaggatgtgaaccctgggggcaaggaggagaccccagggcagaggccagcggtcacggagactcaccagttggcagaattaaatgagaagaagaatgaaagactccgtgctgcctttggcatcagtgattcttacgtagatggcagctcttttgatcctcagcgtcgtgcccgagaagctaaacaaccagctcctgagcctcccaaaccttacagccttgttcgggagtctagcagttctcgctcaccaaccccaaagcagaagaagaagaaaaagaagaaagatagaggacgcaggtcagagagcagctctcctcgacgggagagaaagaaaagctcaaagaagaagaagcacaggtcagaatctgagtccaagaaacgtaagcataggtctcccactccaaagagcaaacgtaaatctaaggacaaaaagcgaaagcggtctcgaagtacaacaccagcccccaagagccgccgggcccaccgttcaacttctgctgactctgcttcctcctccgatacttcccgcagtcggtctcgaagtgctgcagctaaaactcatacaactgccttggctgggcgaagtccttcccctgcttcagggcgacgcggggagggagatgcgcctttcagtgaaccaggtactaccagcacacaacggcctagtagcccggagactgctacgaaacagcctagcagcccttatgaagacaaagataaagacaagaaggagaaatctgcaactcgacctagcccctctccggaaaggagcagcacaggcccagaaccacctgctcccactccgctccttgctgagcgacatggcggctccccacaaccccttgcaaccacccccttaagccaggagccagtgaaccccccatctgaggcctctccaactcgggaccgttcaccacctaagtctcccgagaaacttccccagtcttcttcctcagagagcagcccaccatcccctcaacctaccaaagtttctcggcatgccagctcttccccagaaagtcctaaacctgctccagctccagggtcccaccgagagatttcttcttctcccacatctaagaatcgctcacatggccgagcaaaacgggataaatcacattctcataccccctcccgtaggatggggaggtcccgtagccctgccaccgctaagagagggcgatctcggtctcgaacccctaccaagagaggtcattctcgatcccgatctccccagtggcgtaggtccaggtctgcacagaggtggggaagatctagaagcccccagcgacgtggccgctctaggtctcctcagcgaccaggctggtctaggagcagaaatacccagagaagaggcaggtctaggtcagcaaggcgagggaggtcccactctagatccccagccactaggggtagatctcgttctagaacaccagcccgccggggcaggtcccgctctagaacacctgccaggcggagatcacgatccagaactcccaccaggcgtaggtctcggtctagaacaccagcccggaggggcaggtctcggtctagaacacctgctaggcgcagatctaggacccgatcaccagtacgacgcaggtctcgtagtagatcaccagccaggagaagtggcaggtcacgctctagaaccccagctagacgtggccgctcacgctccagaaccccagccagacgtggccgctcacgctctagaaccccagctagacgcagtggtcgctcacgctccagaacaccagccaggagagggaggtctcggtctaggacaccaagacgaggaagatcccgcagtagaagcttagttagacgtggaagatctcactctagaacacctcaaagaagaggcagatctggctcatcttcagagcggaaaaacaaatccagaacatctcaaagaagaagcaggtccaattcaagcccagaaatgaagaaatctcgcatttcttcaaggcggagcaggtctctctcttcaccacggtccaaagcaaaatctcgcttgtctttgaggcgcagcctttcagggtcttccccatgccctaaacaaaagtcacagacaccacccaggcgcagtcgctctggatcctcccaacctaaagctaaatctagaacgccacccagacgcagtcgctccagttcttctccgccacctaaacagaaatctaagacaccatcaagacaaagtcattccagttcatctcctcatcctaaagtgaaatctggaacaccaccgaggcaagggtccataacaagtccccaggccaatgagcaatctgtaacgccacagagacggagctgttttgaatcatcacctgaccctgagttgaaatctaggaccccttctagacatagctgctcagggtcctctcctcctagagtgaaatctagcacacctcccagacagagcccatctaggtcatcatctccacaacccaaagtgaaggcaataatatcaccaagacaaagaagccattctggctcctcttctccaagtcctagtagggtgacgtcgagaacaactccacggcgaagcagatcagtatctccctgctccaatgtggaatccagattgttgccaagatacagtcattctgggtcctcctcaccagataccaaagtgaaacctgaaacaccgccaagacaaagtcactcagggtctatttcaccataccccaaagtaaaggcccaaactccaccggggccaagtctttctggatcaaagtcaccatgtccccaagagaagtctaaagactcactagttcaaagttgccctggatccctctctctctgtgcaggagtaaaatctagcacaccaccaggcgagagctattttggtgtctcatctctgcaactgaaaggacaatctcaaacttcaccagaccacagatctgatacttcaagtccagaagtgagacagagtcattcagaatcaccatctctgcagagcaaatctcaaacatcacctaagggaggtcggtccaggtcttcatctccagtcactgagctggcatccagatctccaataagacaagatagaggtgagttctcagcgagtcctatgttgaaatctggaatgtctcctgagcagagcaggttccagtctgactcttcttcatatcctacagtggactcgaattctctcttggggcagagtagattggagactgctgaatcaaaagagaaaatggccttaccccctcaggaggatgctactgcatcacctcctagacagaaagacaaatttagtccctttccagtacaggataggcctgagtcttcactggtattcaaagacacacttagaaccccgccaagggaaagaagtggtgctgggtcatctccagaaacaaaagagcaaaatagtgcattgcctacgtcaagccaagatgaagagttaatggaggtggtagagaagtctgaagaacccgcaggccaaatcctgtctcatttgtcttcagaacttaaagaaatgtccacaagtaactttgaatcatctcctgaagtagaagaaaggcctgctgtgtctttgactcttgatcagagccagtcacaggcttctttggaagcagtagaagtcccttcaatggcctcatcttggggtgggccacatttttctccagaacataaagaactgtctaactccccactcagggagaacagctttggatcacctttagaatttagaaactcaggcccacttggtacagaaatgaatactggattttcttctgaggttaaagaagatttgaatggaccgtttcttaatcagctggaaacagatccatctctagacatgaaagaacaatcgacaagatcctctggacacagcagttctgagttatccccagatgcagtggaaaaggcagggatgtcttcaaatcagagcatctcttcacctgtgcttgatgctgtacccagaacaccctcgagagaaagaagtagttctgcatcttctcctgaaatgaaagatggtttacccagaactccatcaaggagaagcaggtctgggtcttctccaggacttagagatgggtctgggactccctcgaggcacagcctgtctgggtcctctcctggaatgaaagatatacctagaacgccatctagagggagaagcgaatgtgattcttccccagaaccgaaagctttgcctcagactcctaggccgaggagtcgttctccatcatccccagagctcaacaacaagtgtcttaccccccagagagaaagaagcgggtcagaatcatcagttgatcagaaaactgtggctcggactcccctggggcagagaagtcgttcgggatcctctcaagaacttgatgtgaaacccagtgcatcccctcaggaaagaagtgagtcagactcttctccagattctaaagccaagacaagaaccccacttcggcagaggagtcggtctggatcatctccagaggttgacagcaaatctcgactatcccctcggcgcagtaggtctggttcctcccctgaagtgaaagataagccaagagcagcacccagggcacagagtggttctgattcctctcctgaacctaaagctccagcccctcgggcccttcccagacgaagcagatcaggttcatcaagcaaaggcagaggcccttctcctgaaggaagcagcagtaccgagtcctctcctgaacatccgcccaaatccagaactgctcgcagaggttccaggtcatcaccagagcccaagaccaagtctcgtacaccacctcgacgtcgcagctctcgatcatctccggagctaacaaggaaggccagactgtcccgtagaagccgctctgcctcatcctcaccagaaactcgctctagaactcccccaaggcaccggagaagtccctcagtgtcttccccggagccagccgaaaaatcgaggtcttcacgccgacggcgctcagcttcatctccacgcactaagacaacctcaaggagaggccgctctccttcgccaaagcctcgtggactccagaggtcccgttcccgctcaaggagagagaaaacaagaacaacccgacgtcgagataggtctggatcttctcagtcaacctctcggcgaagacagcggagccggtcaaggtcgcgggttactcggcggcggaggggaggctctggttatcactcaaggtcacctgcccggcaggaaagttcccggacctcctctcgacgccgaagaggccgctctcggacacccccaaccagtcggaagcgttctcgctcacgcacatcaccagccccgtggaaacgctctagatctcgagcctctccagccactcaccggcgatccaggtccagaacccccctgataagccgacgtaggtccagatctcgaacttcaccagtcagccggagacggtcaaggtccaggacttcagtgactcgacgaagatcccggtcaagagcatccccagtgagcagaaggcgatccagatccagaacgccaccagtaacccgccgtcgttcaaggtctagaacgccaacaacacgccgccgctcccgttctagaactccaccagtgactcgcagaaggtccagatccaggactccaccagtaaccaggaggcgatctcgaagcagaacttcgcctatcactcgcagaagatcaagatccagaacatctccggtcacccgaaggagatctcgatctcgcacatctccagtaactcgaagaaggtcccgctctcgaacctcaccagtgacacgccgccgctctaggtcccggacacctccagcacaggatcagccgaggtctcctgtgccttctgctttttcagaccaatcccgttgtttgattgcccagaccacccctgtagcagggtctcagtccctttcctctggggcagtggcaacgaccacgtcctctgctggtgatcacaatggcatgctctctgtccctgcccctggggtgccccactctgatgtgggggagccacctgcctctactggggcccagcagccttctgcattagccgccctgcagccagcaaaggagcggcggagttcctcctcgtcgtcgtcgtcctctagctcctcctcttcttcatcatcgtcgtcgtcgtcctcctcctcctctggctccagttctagtgactcagagggctctagccttcctgtgcaacctgaggtggcactgaagagggtccccagccccaccccagccccaaaggaggctgttcgagagggacgtcctccggagccaaccccagccaaacggaagaggcgctctagcagttccagttccagctcctcctcttcatcttcctcctcctcctcctcctcctcttcttcctcctcctcttcctcttcttcttcttcctcctcatcttcctcctcctcgtcgtcttcctccccttcccctgctaagcctggccctcaggccttgcccaaacctgcaagccccaagaagccaccccctggcgagcggaggtcccgcagcccccggaagccaatagactccctcagggactctcggtccctcagctactcgcctgtggagcgtcgccgtccctcgccccagccctcaccacgggaccagcagagcagcagcagtgagcggggttcccggagaggccagcgtggggacagccgctcccccagccacaagcgcaggagggagacacctagccctcggcccatgagacaccgctcctccaggtctccataaattgtctttgggggattccaccacacccaatgctctggagccacaaggagtgtcccttcttccccagcagagccgtgggagggtccttgtctgctctcctttgaaccttggcagcccttggatggagggctccctttccctccccttttttttttctttgttcctgtgaaatgttaatctccgtgagttcttcctggttcatgtgttctggggggtttggggtgggagggaatgcagatgggagttgggggaggggaggatacagttcaggataccccagcctggagtcagggccagggaggcatggccccacttgtatccagaagttcccaggggtgattgtgatggtggttgggactggaggttgtataaggtgttcttggaaggaaggggcaggagttggaattagttggtccctactgtcccccatgaggttgtgaacccctccccccaacttttcatgtttcttaaaggcattttggttttttaaaatctgtacagcaagagcaactttttctgtcaaataaaaatgagaaatgcagg

SEQ ID NO: 4414 - DNA, 2225 bp, Homo sapiens
cgacatggcgcgcgagctgcgggcgctgctgctgtggggccgccgcctgcggcctttgctgcgggcgccggcgctggcggccgtgccgggaggaaaaccaattctgtgtcctcggaggaccacagcccagttgggccccaggcgaaacccagcctggagcttgcaggcaggacgactgttcagcacgcagaccgccgaggacaaggaggaacccctgcactcgattatcagcagcacagagagcgtgcagggttccacttccaaacatgagttccaggccgagacaaagaagcttttggacattgttgcccggtccctgtactcagaaaaagaggtgtttatacgggagctgatctccaatgccagcgatgccttggaaaaactgcgtcacaaactggtgtctgacggccaagcactgccagaaatggagattcacttgcagaccaatgccgagaaaggcaccatcaccatccaggatactggtatcgggatgacacaggaagagctggtgtccaacctggggacgattgccagatcggggtcaaaggccttcctggatgctctgcagaaccaggctgaggccagcagcaagatcatcggccagtttggagtgggtttctactcagctttcatggtggctgacagagtggaggtctattcccgctcggcagccccggggagcctgggttaccagtggctttcagatggttctggagtgtttgaaatcgccgaagcttcgggagttagaaccgggacaaaaatcatcatccacctgaaatccgactgcaaggagttttccagcgaggcccgggtgcgagatgtggtaacgaagtacagcaacttcgtcagcttccccttgtacttgaatggaaggcggatgaacaccttgcaggccatctggatgatggaccccaaggatgtcggtgagtggcaacatgaggagttctaccgctacgtcgcgcaggctcacgacaagccccgctacaccctgcactataagacggacgcaccgctcaacatccgcagcatcttctacgtgcccgacatgaaaccgtccatgtttgatgtgagccgggagctgggctccagcgttgcactgtacagccgcaaagtcctcatccagaccaaggccacggacatcctgcccaagtggctgcgcttcatccgaggtgtggtggacagtgaggacattcccctgaacctcagccgggagctgctgcaggagagcgcactcatcaggaaactccgggacgttttacagcagaggctgatcaaattcttcattgaccagagtaaaaaagatgctgagaagtatgcaaagttttttgaagattacggcctgttcatgcgggagggcattgtgaccgccaccgagcaggaggtcaaggaggacatagcaaagctgctgcgctacgagtcctcggcgctgccctccgggcagctaaccagcctctcagaatacgccagccgcatgcgggccggcacccgcaacatctactacctgtgcgcccccaaccgtcacctggcagagcactcaccctactatgaggccatgaagaagaaagacacagaggttctcttctgctttgagcagtttgatgagctcaccctgctgcaccttcgtgagtttgacaagaagaagctgatctctgtggagacggacatagtcgtggatcactacaaggaggagaagtttgaggacaggtccccagccgccgagtgcctatcagagaaggagacggaggagctcatggcctggatgagaaatgtgctggggtcgcgtgtcaccaacgtgaaggtgaccctccgactggacacccaccctgccatggtcaccgtgctggagatgggggctgcccgccacttcctgcgcatgcagcagctggccaagacccaggaggagcgcgcacagctcctgcagcccacgctggagatcaaccccaggcacgcgctcatcaagaagctgaatcagctgcgcgcaagcgagcctggcctggctcagctgctggtggatcagatatacgagaacgccatgattgctgctggacttgttgacgaccctagggccatggtgggccgcttgaatgagctgcttgtcaaggccctggagcgacactgacagccagggggccagaaggactgacaccacagatgacagccccacctccttgagctttatttacctaaatttaaaggtatttcttaacccgaaaaaaaaaaaaaaa

SEQ ID NO: 4415 - protein, 704 aa, Homo sapiens
MARELRALLLWGRRLRPLLRAPALAAVPGGKPILCPRRTTAQLGPRRNPAWSLQAGRLFSTQTAEDKEEPLHSIISSTESVQGSTSKHEFQAETKKLLDIVARSLYSEKEVFIRELISNASDALEKLRHKLVSDGQALPEMEIHLQTNAEKGTITIQDTGIGMTQEELVSNLGTIARSGSKAFLDALQNQAEASSKIIGQFGVGFYSAFMVADRVEVYSRSAAPGSLGYQWLSDGSGVFEIAEASGVRTGTKIIIHLKSDCKEFSSEARVRDVVTKYSNFVSFPLYLNGRRMNTLQAIWMMDPKDVGEWQHEEFYRYVAQAHDKPRYTLHYKTDAPLNIRSIFYVPDMKPSMFDVSRELGSSVALYSRKVLIQTKATDILPKWLRFIRGVVDSEDIPLNLSRELLQESALIRKLRDVLQQRLIKFFIDQSKKDAEKYAKFFEDYGLFMREGIVTATEQEVKEDIAKLLRYESSALPSGQLTSLSEYASRMRAGTRNIYYLCAPNRHLAEHSPYYEAMKKKDTEVLFCFEQFDELTLLHLREFDKKKLISVETDIVVDHYKEEKFEDRSPAAECLSEKETEELMAWMRNVLGSRVTNVKVTLRLDTHPAMVTVLEMGAARHFLRMQQLAKTQEERAQLLQPTLEINPRHALIKKLNQLRASEPGLAQLLVDQIYENAMIAAGLVDDPRAMVGRLNELLVKALERH

SEQ ID NO: 4416 - DNA, 1213 bp, Homo sapiens
cggaatggaggaggtgcctcacgactgtccaggggccgacagcgcccaggcgggcagaggggcttcatgtcagggatgccccaaccagcggctgtgcgcttctggagcgggggccactccggacacggctatagaggaaatcaaagagaaaatgaagactgtaaaacacaaaatcttggtattgtctgggaaaggcggtgttgggaaaagcacattcagcgcccaccttgcccatggcctagcagaggatgaaaacacacagattgctcttctagacatcgatatatgtgggccatcgattcccaagataatgggattggaaggagagcaggttcaccagagtggctcaggctggtctccagtgtacgtggaagacaacctgggggtgatgtcagtgggcttcctgctcagcagtcctgatgatgctgttatctggaggggacccaagaaaaacggcatgatcaagcagttcctccgagatgtggactggggagaggtcgactacctcattgtggacaccccacctgggacgtcggatgaacacctctcggtcgtccggtacctggccacagcacacatcgatggagcagtgatcatcaccactccccaggagctgtcactccaggatgtccggaaagaaatcaacttctgccgcaaggtgaagctgcccatcatcggggtggtggagaacatgagtccgttcatctgtcctaagtgcaagaaagaatctcagatattccctcccacaaccgggggcgcggagctcatgtgccaggacttggaggtccctctcctcggcagagtgcccctggatccgctcataggtaagaattgtgacaaaggccagtcttttttcattgacgccccagattccccagccacgttagcctacagaagtataattcagagaatccaagagttttgtaatctccatcagtcaaaagaagagaacctcatcagttcctgaaacgagagaatgttcaggaccaagcagttaccgagcgaggcactcactgggcagcacatccagccagacccgaccagctccgggatggggtgggtcacagcaaaaggaccagatgctggtgtggtccgaagccactttctcagagacactttaatcattgagtatttgtacacttttctttagaacatatataaagggcattctctacaaatgtgccgttttaagaataaaaccccctcaaatctc

SEQ ID NO: 4417 - protein, 320 aa, Homo sapiens
MEEVPHDCPGADSAQAGRGASCQGCPNQRLCASGAGATPDTAIEEIKEKMKTVKHKILVLSGKGGVGKSTFSAHLAHGLAEDENTQIALLDIDICGPSIPKIMGLEGEQVHQSGSGWSPVYVEDNLGVMSVGFLLSSPDDAVIWRGPKKNGMIKQFLRDVDWGEVDYLIVDTPPGTSDEHLSVVRYLATAHIDGAVIITTPQELSLQDVRKEINFCRKVKLPIIGVVENMSPFICPKCKKESQIFPPTTGGAELMCQDLEVPLLGRVPLDPLIGKNCDKGQSFFIDAPDSPATLAYRSIIQRIQEFCNLHQSKEENLISS

SEQ ID NO: 4418 - DNA, 1155 bp, Homo sapiens
cggtccttctcaacaggcctgtgccccgcggggtccgcctcctctgggacgccttcctcccggcacagaaggcctccccctctcaccagggccctcgcccgctggtccgccaggccccgccttttttgcggcccccattgtgctgctggacccgacgagcagtgttgacagtgaaccccacgtagacgcggccccggtaccgggggttcaggcagtagagcaggtagacgccgaaaaagcgccctggcctcgccgcgacccccgcgggacccatcgggccttggggttcgggaaccacagcagggggttgattgccgtgacctagggtccaggggagggctggatcgctagggctgcagggtgcttgcttcggaacaagctctcggggactatccggaggcagcctgcaggaagccgtagcgccggtacgtgcccctctcctgtctggaggcgggtgtagaagtccgaccgcggaagccagactgctgtccagtcggcgagcgcgtaccattcagcatcggctccgcccgagtcccaccttcctcaggctctgattggctgacacatggcaagcgcgaaaagcctggaccgctggaaagcccggctgcttgagggcggaagtactgcgttgacgtacgccttagtaagggcggaagtgagttttccagcggaagtggctcctgtaaggcagcaaggtagcgtggccggcgcccgagctggggttgtgtccctgctgggctgccgttccagctggactgccgccatggaactcagcgccgaatacctccgcgagaagctgcagcgggacctggaggcggagcatgtggaggtggaggacacgaccctcaaccgttgctcctgtagcttccgagtcctggtggtgtcggccaagttcgaggggaaaccgctgcttcagagacacaggctggtgaacgcgtgcctagcagaagagctcccgcacatccatgcctttgaacagaaaaccctgaccccagaccagtgggcacgtgagcgacagaaatgagggactgggatctgcacagccattaaattataaatctggaccagcttctgtgtcgatgtgtgtgtgggaggggtgctgaggccgagtctaggacctggcctctccctgccctgcctccgtccattgtttta

SEQ ID NO: 4419 - protein, 86 aa, Homo sapiens
MELSAEYLREKLQRDLEAEHVEVEDTTLNRCSCSFRVLVVSAKFEGKPLLQRHRLVNACLAEELPHIHAFEQKTLTPDQWARERQK

SEQ ID NO: 4420 - DNA, 1999 bp, Homo sapiens
ggtaacttcttgatgttgccgtggcatttgtaaactgtcatggtgctggtaggagtgtagcagggaggatgatgggaggtcagtcttgtctctattttggttttggtgggttttggccagctccttcactgcaacctgttttatcagcaaggtctttatgactggtattttgtgctgaccttctatgtcatcctgtgacttagaatgccttaaccatcagggaatgcagcccagtagtttcagcctcatttttcctggctcctatttaagatggagttgctctggttcacacacctctgacatgatcattgcccactgcggcttccacctcccgggttcaagagatcctcctgcctcaccctcccaaggtgctgggactacaggtgtgtgccaccacgctcagctaatttttgtattttttgtagagatggtgtttttccatgttgcccaggctggtctcaaactcctgggctcaagcaatccttctgtctcagcctcccaaagtactgggattacaggcatgtcccaccatgcccagactaatatttacttttaatcagactaagatagggttactacttgagttgctatggctccagctgaaagaaagcccgtgcagtcatatcacgcgtaaacatttgctttatgctaaaaatatggtggacctggcattacagctattacaaatctcctaagatgtctcgggtagtgtattagttacttttcatactgctatgaagaaatactggaaactgggtaatttataaagaaaaagaggtttaatgtactcacagttccacaaggctggagaggcctcagaatcatggtggaaggcaaggagcaaaaaggtatgtcttccatggcagcaggcaagagagcacgtgcagggaaactgccctttataaaaccatcagatttagtgagatgtattcactatcacgagaacagtatgggaaaaacctgcccccatgattcgattacctcctaccgggtccctcccacgacacatggggattatgggaactacaattcaagatgaaatttgggtggggacgcagccaaaccatatcgggtagcaacaacctagggtcagttttgcaggtggtaaagccatttaccaagatagttgtaggtaaagaagggcagatttattagagaaattgtgaaaatatgttgcagtgggcagctcagcagagaaggggctacctgcaaagaggcaagggctggaggaaagttttatagggtcctgctgaagggtgctacgtgtggaatgaggtcattgtgcccgcaggttgtttgtgattagctgtttctaacaattgttcatacaataattgttcattattgttctcaacttggggctctccccaacctggggacccttccttattgttgcttacttatcaggtctccacataaaggtgtggaaacttcattcattcatatcttcaacacaaattgtaggtagcctgttttttaaaacatttattcaacaaatatttagtccaagccactattacttattaccttctctactattgtatggacttttaactatctctgacactattcactattcttccacattctctattatttatacctatggtaaaatttgccagtttgaccatacaactaatactcacagggaatatatagagtctagaagaaaatatacaggtccttaaaggctgccctgccaacaaaaccataacgcaggaacaaacatcacaactatgccaaataatcaatcctacaatgtccaaaattttactttaaaactggaatttccagacttcctttctgcattaaccagtttaactagacagtaacgaaatattcctactttatgctgtgatagtttgtttatttatttatttatttatttatttatttgagacagagtttcgctcttgttgcagtgagccaggatcatgccattgcactccagcctggtcaacggagcgagactccgcctcattaaaaaaaaaaaaaaaaa

SEQ ID NO: 4421 - DNA, 1588 bp, Homo sapiens
atcttgctttcctttaatccggcagtgaccgtgtgtcagaacaatcttgaatcatgaagctactaaccagagccggctctttctcgagattttattccctcaaagttgcccccaaagttaaagccacagctgcgcctgcaggagcaccgccacaacctcaggaccttgagtttaccaagttaccaaatggcttggtgattgcttctttggaaaactattctcctgtatcaagaattggtttgttcattaaagcaggcagtagatatgaggacttcagcaatttaggaaccacccatttgctgcgtcttacatccagtctgacgacaaaaggagcttcatctttcaagataacccgtggaattgaagcagttggtggcaaattaagtgtgaccgcaacaagggaaaacatggcttatactgtggaatgcctgcggggtgatgttgatattctaatggagttcctgctcaatgtcaccacagcaccagaatttcgtcgttgggaagtagctgaccttcagcctcagctaaagattgacaaagctgtggcctttcagaatccgcagactcatgtcattgaaaatttgcatgcagcagcttaccagaatgccttggctaatcccttgtattgtcctgactataggattggaaaagtgacatcagaggagttacattacttcgttcagaaccatttcacaagtgcaagaatggctttgattggacttggtgtgagtcatcctgttctaaagcaagttgctgaacagtttctcaacatgaggggtgggcttggtttatctggtgcaaaggccaactaccgtggaggtgaaatccgagaacagaatggagacagtcttgtccatgctgcttttgtagcagaaagtgctgtcgcgggaagtgcagaggcaaatgcatttagtgttcttcagcatgtcctcggtgctgggccacatgtcaagaggggcagcaacaccaccagccatctgcaccaggctgttgccaaggcaactcagcagccatttgatgtttctgcatttaatgccagttactcagattctggactctttgggatttatactatctcccaggccacagctgctggagatgttatcaaggctgcctataatcaagtaaaaagaatagctcaaggaaacctttccaacacagatgtccaagctgccaagaacaagctgaaagctggatacctaatgtcagtggagtcttctgagtgtttcctggaagaagtcgggtcccaggctctagttgctggttcttacatgccaccatccacagtccttcagcagattgattcagtggctaatgctgatatcataaatgcggcaaagaagtttgtttctggccagaagtcaatggcagcaagtggaaatttgggacatacaccttttgttgatgagttgtaatactgatgcacacattacaggagagagctgaacgttctctcacccagagcagcaaacacatgaaagtcagaagtctctaatatatcatttgtcttttttccagtgaggtaaaataaggcataaatgcaggtaattattcccagctgacctaaagtcaataaaacattctgttt

SEQ ID NO: 4422 - protein, 453 aa, Homo sapiens
MKLLTRAGSFSRFYSLKVAPKVKATAAPAGAPPQPQDLEFTKLPNGLVIASLENYSPVSRIGLFIKAGSRYEDFSNLGTTHLLRLTSSLTTKGASSFKITRGIEAVGGKLSVTATRENMAYTVECLRGDVDILMEFLLNVTTAPEFRRWEVADLQPQLKIDKAVAFQNPQTHVIENLHAAAYQNALANPLYCPDYRIGKVTSEELHYFVQNHFTSARMALIGLGVSHPVLKQVAEQFLNMRGGLGLSGAKANYRGGEIREQNGDSLVHAAFVAESAVAGSAEANAFSVLQHVLGAGPHVKRGSNTTSHLHQAVAKATQQPFDVSAFNASYSDSGLFGIYTISQATAAGDVIKAAYNQVKRIAQGNLSNTDVQAAKNKLKAGYLMSVESSECFLEEVGSQALVAGSYMPPSTVLQQIDSVANADIINAAKKFVSGQKSMAASGNLGHTPFVDEL

SEQ ID NO: 4423 - DNA, 1299 bp, Homo sapiens
agtcctcttccgggtgatggcggcgggtgccccggatgtagccctggcgcaagcatctcttcttttttccacctcgccttccgcggattcccagcttgagaaacacctctttgccccgtcatgccaaagaggaaagtgaccttccaaggcgtgggagatgaggaggatgaggatgaaatcattgtccccaagaagaagctggtggaccctgtggctgggtcagggggtcctgggagccgctttaaaggcaaacactctttggatagcgatgaggaggaggatgatgatgatggggggtccagcaaatatgacatcttggcctcagaggatgtagaaggtcaggaggcagccacactccccagcgaggggggtgttcggatcacaccctttaacctgcaggaggagatggaggaaggccactttgatgccgatggcaactacttcctgaaccgggatgctcagatccgagacagctggctggacaacattgactgggtgaagatccgggagcggccacctggccagcgccaggcctcagactcggaggaggaggacagcttgggccagacctcaatgagtgcccaagccctcttggagggacttttggagctcctattgcctagagagacagtggctggggcactgaggcgtctgggggcccgaggaggaggcaaagggagaaaggggcctgggcaacccagttcccctcagcgcctggaccggctctccgggttggccgaccagatggtggcccggggcaaccttggtgtgtaccaggaaacaagggaacggttggctatgcgtctgaagggtttggggtgtcagaccctaggaccccacaatcccacacccccaccctccctggacatgttcgctgaggagttggcggaggaggaactggagaccccaacccctacccagagaggagaagcagagtcgcggggagatggtctggtggatgtgatgtgggaatataagtgggagaacacgggggatgccgagctgtatgggcccttcaccagcgcccagatgcagacctgggtgagtgaaggctacttcccggacggtgtttattgccggaagctggacccccctggtggtcagttctacaactccaaacgcattgactttgacctctacacctgagcctgctgggggcccagtttggtgggcccttctttcctggactttgtggaggaggcaccaagtgtctcaggcagcgaggaaattggaggccatttttcagtcaatttccctttcccaataaaagcctttagttgtgtaaaaaaaaaaaaaaaa

SEQ ID NO: 4424 - protein, 341 aa, Homo sapiens
MPKRKVTFQGVGDEEDEDEIIVPKKKLVDPVAGSGGPGSRFKGKHSLDSDEEEDDDDGGSSKYDILASEDVEGQEAATLPSEGGVRITPFNLQEEMEEGHFDADGNYFLNRDAQIRDSWLDNIDWVKIRERPPGQRQASDSEEEDSLGQTSMSAQALLEGLLELLLPRETVAGALRRLGARGGGKGRKGPGQPSSPQRLDRLSGLADQMVARGNLGVYQETRERLAMRLKGLGCQTLGPHNPTPPPSLDMFAEELAEEELETPTPTQRGEAESRGDGLVDVMWEYKWENTGDAELYGPFTSAQMQTWVSEGYFPDGVYCRKLDPPGGQFYNSKRIDFDLYT

SEQ ID NO: 4425 - DNA, 1634 bp, Homo sapiens
aaacaggccattgttgctgagcgaggatgaagaagataccaagagagttgtccgcagtgccaaggacaagaggtttgaggagctgaccaaccttatccggaccatccgtaatgccatgaagattcgtgatgtcaccaagtgcctggaagagtttgagctcctgggaaaagcatatgggaaggccaaaagcattgtggacaaagaaggtgtcccccggttctatatccgcatcctggctgacctagaggactatcttaatgagctttgggaagataaggaagggaagaagaagatgaacaagaacaatgccaaggctctgagcaccttgcgtcagaagatccgaaaatacaaccgtgatttcgagtcccatatcacaagctacaagcagaaccccgagcagtctgcggatgaagatgctgagaaaaatgaggaggattcagaaggctcttcagatgaggatgaggatgaggacggagtcagtgctgcaactttcttgaagaagaaatcagaagctccttctggggagagtcgcaagttcctcaaaaagatggatgatgaagatgaggactcagaagattccgaagatgatgaagactgggacacaggttccacatcttccgattccgactcagaggaggaagaagggaaacaaaccgcgctggcctcaagatttcttaaaaaggcacccaccacagatgaggacaagaaggcagccgagaagaaacgggaggacaaagctaagaagaagcacgacaggaaatccaagcgcctggatgaggaggaggaggacaatgaaggcggggagtgggaaagggtccggggcggagtgccgttggttaaggagaagccaaaaatgtttgccaagggaactgagatcacccatgctgttgttatcaagaaactgaatgagatcctacaggcacgaggcaagaagggaactgatcgtgctgcccagattgagctgctgcaactgctggttcagattgcagcggaaaacaacctgggagagggcgtcattgtcaagatcaagttcaatatcatcgcctctctctatgactacaaccccaacctggcaacctacatgaagccagagatgtgggggaagtgcctggactgcatcaatgagctgatggatatcctgtttgcaaatcccaacatttttgttggagagaatattctggaagagagtgagaacctgcacaacgctgaccagccactgcgtgtccgtggctgcatcctaactctggtggaacgaatggatgaagaatttaccaaaataatgcaaaatactgaccctcactcccaagagtacgtggagcacttgaaggatgaggcccaggtgtgtgccatcatcgagcgtgtgcagcgctacctggaggagaagggcactaccgaggaggtctgccgcatctacctgctgcgcatcctgcacacctactacaagtttgattacaaggcccatcagcgacagctgaccccgcctgagggctcctcaaaggtgagcaagaccaggcagaaaatgagggcgaggactcggctgtgttgatggagagactgtgcaagtacatctacgccaaggaccgcacagaccggatccgcacatgtgccatcctctgccacatctaccaccatgc

SEQ ID NO: 4426 - DNA, 3066 bp, Homo sapiens
ggccctgcggtgtgactcgcgggctcagctggttggtattttttgggcctcgtgcttcgtggtgggagacccaggtcgaggtccggccgtagcacctccgcgccgtcgccatgtcgcggtttttcaccaccggttcggacagcgagtccgagtcgtccttgtccggggaggagctcgtcaccaaacctgtcggaggcaactatggcaaacagccattgttgctgagcgaggatgaagaagataccaagagagttgtccgcagtgccaaggacaagaggtttgaggagctgaccaaccttatccggaccatccgtaatgccatgaagattcgtgatgtcaccaagtgcctggaagagtttgagctcctgggaaaagcatatgggaaggccaaaagcattgtggacaaagaaggtgtcccccggttctatatccgcatcctggctgacctagaggactatcttaatgagctttgggaagataaggaagggaagaagaagatgaacaagaacaatgccaaggctctgagcaccttgcgtcagaagatccgaaaatacaaccgtgatttcgagtcccatatcacaagctacaagcagaaccccgagcagtctgcggatgaagatgctgagaaaaatgaggaggattcagaaggctcttcagatgaggatgaggatgaggacggagtcagtgctgcaactttcttgaagaagaaatcagaagctccttctggggagagtcgcaagttcctcaaaaagatggatgatgaagatgaggactcagaagattccgaagatgatgaagactgggacacaggttccacatcttccgattccgactcagaggaggaagaagggaaacaaaccgcgctggcctcaagatttcttaaaaaggcacccaccacagatgaggacaagaaggcagccgagaagaaacgggaggacaaagctaagaagaagcacgacaggaaatccaagcgcctggatgaggaggaggaggacaatgaaggcggggagtgggaaagggtccggggcggagtgccgttggttaaggagaagccaaaaatgtttgccaagggaactgagatcacccatgctgttgttatcaagaaactgaatgagatcctacaggcacgaggcaagaagggaactgatcgtgctgcccagattgagctgctgcaactgctggttcagattgcagcggaaaacaacctgggagagggcgtcattgtcaagatcaagttcaatatcatcgcctctctctatgactacaaccccaacctggcaacctacatgaagccagagatgtgggggaagtgcctggactgcatcaatgagctgatggatatcctgtttgcaaatcccaacatttttgttggagagaatattctggaagagagtgagaacctgcacaacgctgaccagccactgcgtgtccgtggctgcatcctaactctggtggaacgaatggatgaagaatttaccaaaataatgcaaaatactgaccctcactcccaagagtacgtggagcacttgaaggatgaggcccaggtgtgtgccatcatcgagcgtgtgcagcgctacctggaggagaagggcactaccgaggaggtctgccgcatctacctgctgcgcatcctgcacacctactacaagtttgattacaaggcccatcagcgacagctgaccccgcctgagggctcctcaaagtctgagcaagaccaggcagaaaatgagggcgaggactcggctgtgttgatggagagactgtgcaagtacatctacgccaaggaccgcacagaccggatccgcacatgtgccatcctctgccacatctaccaccatgctctgcactcgcgctggtaccaggcccgcgacctcatgctcatgagccacttgcaggacaacattcagcatgcagacccgccagtgcagatcctttacaaccgcaccatggtgcagctgggcatctgtgccttccgccaaggcctgaccaaggacgcacacaacgccctgctggacatccagtcgagtggccgagccaaggagcttctgggccagggcctgctgctgcgcagcctgcaggagcgcaaccaggagcaggagaaggtggagcggcgccgtcaggtccccttccacctgcacatcaacctggagctgctggagtgtgtctacctggtgtctgccatgctcctggagatcccctacatggccgcccatgagagcgatgcccgccgacgcatgatcagcaagcagttccaccaccagctgcgcgtgggcgagcgacagcccctgctgggtccccctgagtccatgcgggaacatgtggtcgctgcctccaaggccatgaagatgggtgactggaagacctgtcacagttttatcatcaatgagaagatgaatgggaaagtgtgggaccttttccccgaggctgacaaagtccgcaccatgctggttaggaagatccaggaagagtcactgaggacctacctcttcacctacagcagtgtctatgactccatcagcatggagacgctgtcagacatgtttgagctggatctgcccactgtgcactccatcatcagcaaaatgatcattaatgaggagctgatggcctccctggaccagccaacacagacagtggtgatgcaccgcactgagcccactgcccagcagaacctggctctgcagctggccgagaagctgggcagcctggtggagaacaacgaacgggtgtttgaccacaagcagggcacctacgggggctacttccgagaccagaaggacggctaccgcaaaaacgagggctacatgcgccgcggtggctaccgccagcagcagtctcagacggcctactgagctctccactctgtttcccgcctgggccatccaaccttgaagtcctaaaccacacctcagtcactaaaggtctgtttaaagttgttctggttgattgcttgttgccacaaaggtgtgttgagcccattcatttgctgattatatttctgagctgctaccacatgacagacacaaggctcagatgaagaggtgaattgaacacgttcctgacctc

SEQ ID NO: 4427 - DNA, 3845 bp, Homo sapiens
agaggagcttcttaataactttgcccagcaaataggagcctggagattctgcctgtactttctctccagcactaggaatgactatgtaatgatgtacagtttaacagtttttgagaatctgatcaataaaatgtggcttggggtcccatctcaggataagatggaaatccgtagctgtctgcccaaactccttttggctcaccataaaaccttaccttactttatccggaacaagctctgcaaagttattgttgatattggacgtcaggattggcccatgttctaccacgacttttttactaacattttacagttgatccagtcccctgtgacaaccccccttgggctgatcatgttgaagacaacttcagaagagctggcttgtccccgtgaggacctcagtgtggctcggaaggaggagttgcggaagctgctactggaccaggtgcagacagtgcttgggctactgacaggtatcttggagactgtctgggacaaacacagtgttactgctgccactccaccaccatccccgacctcaggagaaagtggtgacttactgagtaacctgttgcagagtcccagttcagccaaactgttgaatcagccaattcccatccttgatgtggagagtgagtatatctgttccctggctttggagtgcctggcccatctcttcagttggattcctctgtctgccagcatcaccccatccctccttaccaccatcttccactttgcacgatttggctgtgacatccgggccagaaagatggcgtcagttaacggcagcagccagaactgtgtctcgggtcaggagcgcggccggctgggggtcctggccatgtcctgcatcaatgaactcatgtccaagaactgtgtgcctatggaatttgaggagtatttactgcgtatgttccagcagactttctacctcctgcagaaaatcaccaaggataacaatgcccacacagtgaagagcaggctagaagagctcgatgagagctatatcgagaagtttactgactttcttcggctctttgtgagtgttcacctaagaagaatcgagtcttactcccagttccctgtggtggagtttttgacacttttgttcaagtacacatttcatcagcctactcatgaaggttacttctcttgtttggatatctggacgctgtttttggactatctgacaagtaaaattaaaagtcgtcttggagacaaggaagcagttctcaacaggtacgaagatgccctggtgctcctgctcacagaggtgttgaatcgaatccagttcagatacaaccaagcccagctggaggagttggatgatgagactctggatgacgatcagcagacggagtggcagcggtacttacggcagagcttggaggtggtggccaaagtgatggagctcctgcccacgcacgccttctccacactgttccctgttcttcaggacaatttagaagtttatttgggattacaacagtttatagtcacttcagggtcaggacacaggttgaacatcacggcggagaacgactgccggcggctgcactgctccctgagagacttgagctccctgctgcaggccgtgggccgcctggccgagtactttatcggggatgtgtttgctgcacggttcaatgatgccctcacagtcgtggaaaggttggtcaaagtcactctgtacggatctcagataaaattgtacaacattgaaactgctgtgccatcagtattgaaacctgacctcattgatgtgcatgctcagtccctggctgcgctgcaggcttactctcactggttagcacagtattgcagtgaagttcaccggcagaacacgcagcagttcgtgacactcatctctactaccatggatgcaatcacacctctaatcagcaccaaggtccaagacaagctgctgctatctgcgtgccacttactggtctcactggccaccaccgtgcggcccgtctttctgatcagcatccctgcagtgcagaaagtattcaacagaatcactgatgcctctgccctgcgacttgtcgataaggcccaggtgttggtgtgccgagccctctctaacatcttgctgcttccgtggccaaaccttccagagaatgagcagcagtggcccgtgcgctccatcaaccacgccagcctcatctctgcactctcccgggactatcgcaacctgaagcccagtgctgttgccccacagagaaagatgccactggatgacaccaaactgattatccaccagacactcagcgtcttagaagatattgtggagaatatctcgggggagtccaccaagtctcgacagatttgctaccagtcgctgcaggaatctgttcaggtctccctggccctctttccagcttttatccatcagtcagatgtgactgatgagatgctgagcttcttcctcactctgtttcgaggccttagagtacagatgggtgtgcctttcactgagcaaatcatacagactttcctcaacatgtttaccagagagcagttagccgagagcatcctccacgagggcagcacaggctgccgggtggtggagaagtttctgaagatcctgcaggtggtggtccaggagccaggccaggtgttcaagcccttcctccccagcatcatcgccctgtgcatggagcaagtgtatcccatcattgccgagcgtccctcccctgatgtgaaggccgagctgtttgagctccttttccggacgctccatcacaactggaggtacttcttcaagtccaccgtgctggccagtgtccagagggggatcgctgaggagcagatggagaatgagccccagttcagtgccatcatgcaggctttcggacagtcctttctccagcccgacatccacctttttaaacaaaatctcttctacttggagactctcaacaccaagcagaagctgtaccacaagaagatcttccggactgccatgctgttccagtttgtgaacgtgctgctccaggtcctggtccacaagtcccatgatcttctgcaggaggagattggcatcgccatctacaacatggcctcagtcgactttgatggcttctttgccgccttcctcccagagttcctgaccagctgtgatggtgtggatgccaaccagaaaagtgtgctggggcggaatttcaagatggatcgggacctgccctcattcacccagaatgtgcacaggctggtcaacgacctgcgctactacagactctgcaacgacagcctgccccctggcactgtgaagctctaggcctgctactgcctggggacacggacttctgctgctgccacctgcgccagccctaccttccaccacagatgtctcccagatgggccttggtcacactccttggcttctcccaccgcaagcaacgctgcctgcctctgccgctcctccacatcttgccgctgcccagcagagctggcttctgggtccacctgagcactggacggtgctcccagggcgttggagcaggcggaggggtgtgtggccaggtactaggaggcaccaggaaatcccgcggggtggcccatgcagaccaggcgcacgtggctcatggggcagaattgccaaggacagctcacgacagtgccaccttctcaccattccagccaaggagagatgtgacgttggaactgctctggcacttctgtcaagcctcccccgccccaattgccttgagatctctgctctttgtcagagatttgcaaagactcacgtttttgttgttttctcatcattccattgtgatactaagaaactaagaagcttaatgaaaagaaataaaatgcctatgttgttgttctag

SEQ ID NO: 4428 - protein, 1065 aa, Homo sapiens
MMYSLTVFENLINKMWLGVPSQDKMEIRSCLPKLLLAHHKTLPYFIRNKLCKVIVDIGRQDWPMFYHDFFTNILQLIQSPVTTPLGLIMLKTTSEELACPREDLSVARKEELRKLLLDQVQTVLGLLTGILETVWDKHSVTAATPPPSPTSGESGDLLSNLLQSPSSAKLLNQPIPILDVESEYICSLALECLAHLFSWIPLSASITPSLLTTIFHFARFGCDIRARKMASVNGSSQNCVSGQERGRLGVLAMSCINELMSKNCVPMEFEEYLLRMFQQTFYLLQKITKDNNAHTVKSRLEELDESYIEKFTDFLRLFVSVHLRRIESYSQFPVVEFLTLLFKYTFHQPTHEGYFSCLDIWTLFLDYLTSKIKSRLGDKEAVLNRYEDALVLLLTEVLNRIQFRYNQAQLEELDDETLDDDQQTEWQRYLRQSLEVVAKVMELLPTHAFSTLFPVLQDNLEVYLGLQQFIVTSGSGHRLNITAENDCRRLHCSLRDLSSLLQAVGRLAEYFIGDVFAARFNDALTVVERLVKVTLYGSQIKLYNIETAVPSVLKPDLIDVHAQSLAALQAYSHWLAQYCSEVHRQNTQQFVTLISTTMDAITPLISTKVQDKLLLSACHLLVSLATTVRPVFLISIPAVQKVFNRITDASALRLVDKAQVLVCRALSNILLLPWPNLPENEQQWPVRSINHASLISALSRDYRNLKPSAVAPQRKMPLDDTKLIIHQTLSVLEDIVENISGESTKSRQICYQSLQESVQVSLALFPAFIHQSDVTDEMLSFFLTLFRGLRVQMGVPFTEQIIQTFLNMFTREQLAESILHEGSTGCRVVEKFLKILQVVVQEPGQVFKPFLPSIIALCMEQVYPIIAERPSPDVKAELFELLFRTLHHNWRYFFKSTVLASVQRGIAEEQMENEPQFSAIMQAFGQSFLQPDIHLFKQNLFYLETLNTKQKLYHKKIFRTAMLFQFVNVLLQVLVHKSHDLLQEEIGIAIYNMASVDFDGFFAAFLPEFLTSCDGVDANQKSVLGRNFKMDRDLPSFTQNVHRLVNDLRYYRLCNDSLPPGTVKL

SEQ ID NO: 4429 - DNA, 3027 bp, Homo sapiens
tctctctcggcgtttccgctgtcagggcctgcggtgtgactcgcgggctcagctggtccggccgtagcacctccgcgccgtcgccatgtcgcggtttttcaccaccggttcggacagcgagtccgagtcgtccttgtccggggaggagctcgtcaccaaacctgtcggaggcaactatggcaaacagccattgttgctgagcgaggatgaagaagataccaagagagttgtccgcagtgccaaggacaagaggtttgaggagctgaccaaccttatccggaccatccgtaatgccatgaagattcgtgatgtcaccaagtgcctggaagagtttgagctcctgggaaaagcatatgggaaggccaaaagcattgtggacaaagaaggtgtcccccggttctatatccgcatcctggctgacctagaggactatcttaatgagctttgggaagataaggaagggaagaagaagatgaacaagaacaatgccaaggctctgagcaccttgcgtcagaagatccgaaaatacaaccgtgatttcgagtcccatatcacaagctacaagcagaaccccgagcagtctgcggatgaagatgctgagaaaaatgaggaggattcagaaggctcttcagatgaggatgaggatgaggacggagtcagtgctgcaactttcttgaagaagaaatcagaagctccttctggggagagtcgcaagttcctcaaaaagatggatgatgaagatgaggactcagaagattccgaagatgatgaagactgggacacaggttccacatcttccgattccgactcagaggaggaagaagggaaacaaaccgcgctggcctcaagatttcttaaaaaggcacccaccacagatgaggacaagaaggcagccgagaagaaacgggaggacaaagctaagaagaagcacgacaggaaatccaagcgcctggatgaggaggaggaggacaatgaaggcggggagtgggaaagggtccggggcggagtgccgttggttaaggagaagccaaaaatgtttgccaagggaactgagatcacccatgctgttgttatcaagaaactgaatgagatcctacaggcacgaggcaagaagggaactgatcgtgctgcccagattgagctgctgcaactgctggttcagattgcagcggaaaacaacctgggagagggcgtcattgtcaagatcaagttcaatatcatcgcctctctctatgactacaaccccaacctggcaacctacatgaagccagagatgtgggggaagtgcctggactgcatcaatgagctgatggatatcctgtttgcaaatcccaacatttttgttggagagaatattctggaagagagtgagaacctgcacaacgctgaccagccactgcgtgtccgtggctgcatcctaactctggtggaacgaatggatgaagaatttaccaaaataatgcaaaatactgaccctcactcccaagagtacgtggagcacttgaaggatgaggcccaggtgtgtgccatcatcgagcgtgtgcagcgctacctggaggagaagggcactaccgaggaggtctgccgcatctacctgctgcgcatcctgcacacctactacaagtttgattacaaggcccatcagcgacagctgaccccgcctgagggctcctcaaagtctgagcaagaccaggcagaaaatgagggcgaggactcggctgtgttgatggagagactgtgcaagtacatctacgccaaggaccgcacagaccggatccgcacatgtgccatcctctgccacatctaccaccatgctctgcactcgcgctggtaccaggcccgcgacctcatgctcatgagccacttgcaggacaacattcagcatgcagacccgccagtgcagatcctttacaaccgcaccatggtgcagctgggcatctgtgccttccgccaaggcctgaccaaggacgcacacaacgccctgctggacatccagtcgagtggccgagccaaggagcttctgggccagggcctgctgctgcgcagcctgcaggagcgcaaccaggagcaggagaaggtggagcggcgccgtcaggtccccttccacctgcacatcaacctggagctgctggagtgtgtctacctggtgtctgccatgctcctggagatcccctacatggccgcccatgagagcgatgcccgccgacgcatgatcagcaagcagttccaccaccagctgcgcgtgggcgagcgacagcccctgctgggtccccctgagtccatgcgggaacatgtggtcgctgcctccaaggccatgaagatgggtgactggaagacctgtcacagttttatcatcaatgagaagatgaatgggaaagtgtgggaccttttccccgaggctgacaaagtccgcaccatgctggttaggaagatccaggaagagtcactgaggacctacctcttcacctacagcagtgtctatgactccatcagcatggagacgctgtcagacatgtttgagctggatctgcccactgtgcactccatcatcagcaaaatgatcattaatgaggagctgatggcctccctggaccagccaacacagacagtggtgatgcaccgcactgagcccactgcccagcagaacctggctctgcagctggccgagaagctgggcagcctggtggagaacaacgaacgggtgtttgaccacaagcagggcacctacgggggctacttccgagaccagaaggacggctaccgcaaaaacgagggctacatgcgccgcggtggctaccgccagcagcagtctcagacggcctactgagctctccactctgtttcccgcctgggccatccaaccttgaagtcctaaaccacacctcagtcactaaaggtctgtttaaagttgttctggttgattgcttgttgccacaaaggtgtgttgagcccattcatttgctgattatatttctgagctgctaccacatgacagacacaaggctcagatgaagaggtgaattgaac

SEQ ID NO: 4430 - DNA, 6995 bp, Homo sapiens
atggaccaaggcccttggcggtgcgttgcgcatgcgccccgggcgccgccgactgaagtagcaatggacgcgctggagtcgttgttggacgaagtcgctctggaggggctcgatggcctgtgtctgccagcgctgtggagccggctggagacgcgagtgccgcccttcccgctgcctttggaaccctgcacgcaggagtttctctggcgggccctcgccacgcacccgggcatcagcttctatgaggagcctcgggagcgacccgacctacagctccaggaccggtatgaagaaattgatttggaaactggaattttggagtctaggagggacccggtggctttggaggatgtctaccccattcatatgatcttagagaataaggatggcatccagggctcatgccgctactttaaggagaggaaaaacattaccaatgacatcagaaccaagtccttgcagcctcgctgtacaatggtggaagcctttgacaggtgggggaagaaactgatcatcgttgcctcccaggccatgcggtacagggccttgataggccaggagggggatcccgacctgaagctgcccgacttctcctactgcatcctggaacggctaggccggtccaggtggcaaggggagctccagcgagaccttcacaccactgctttcaaggttgatgctgggaagctgcactatcacagaaaaattttgaacaaaaacgggctgattacaatgcagtcccatgtgatccgattacccactggagcccagcaacactcaatcctcctcctactgaaccggtttcatgtggacaggaggagcaaatacgacatcctcatggagaagctttcggtcatgctgagcacacggactaaccacatagagacgctgggaaagctgagggaagagctggggctgtgcgaaaggacgtttaagcgtctgtaccagtatatgctgaacgccgggctagccaaggtggtgtctcttcgcttgcaagagatccaccctgaatgtggaccttgtaagacaaagaaagggaccgacgtcatggttcggtgcctcaagctgctgaaggaatttaaacggaatgaccatgatgatgacgaggacgaggaggtcatctccaagacagtgcctccagtggacattgtgttcgagcgggatatgctcacacagacctacgacctcattgagcgcagaggcacgaaaggaatttcccaagctgaaatccgagtggctatgaatgtgggaaaactagaagcaagaatgctgtgccgacttcttcaaagattcaaagttgtcaagggattcatggaagacgaaggtcggcagcgaaccaccaagtacatttcctgcgtgtttgcagaggagagcgacctaagccggcagtaccaaagagagaaggcccgcagcgagctcttgaccaccgtgagcctggcgtctatgcaggaggagtcgcttctgcctgaaggcgaggacaccttcctctctgagtcggacagtgaggaggagaggagcagcagcaagcggagaggcagagggtcccagaaagacacaagagcctctgcaaacctccggcccaagacccagcctcatcactccaccccaaccaagggtgggtggaaagttgtaaacctacacccattgaaaaagcagccgccctccttcccaggagctgctgaagagagagcctgccagagccttgccagcagggacagcctcttagataccagcagcgtctcagaacccaacgtgtcctttgtctcccactgtgcggacagcaacagtggtgacatagctgtgatcgaggaggtccggatggaaaacccaaaggagagtagcagttccctgaagactgggaggcacagctcaggccaagacaaaccacacgaaacttaccgactgctgaaacgcaggaatctgatcatagaagctgtcaccaatcttcgcttaatcgagagtttattcacgattcagaagatgatcatggatcaggagaagcaggaaggcgtgtccaccaagtgctgcaagaagtccattgtccgcttggtgcggaacctgtctgaggaaggtctcttgcgattgtatcggaccactgtcattcaagatggcatcaagaagaaggtggatctggtggtgcacccgtccatggaccagaacgaccctctagtgagaagtgccatcgagcaggtccgcttccggatctccaattcaagcacagccaacagggttaaaacttcccagcctccagtgccccaaggggaggcagaagaagacagtcaaggaaaagagggcccaagtggatcaggggactctcagctgagtgcttcctctagatcagaaagtggacggatgaaaaaaagtgataataaaatgggcataaccccgcttagaaattatcaccccattgtagttcccggactggggcgttctctaggatttctgcccaaaatgcctcgcctgcgggtggtccacatgtttctgtggtacctcatctacgggcaccctgccagcaacaccgtggagaagccaagcttcatcagtgaacggagaacgataaagcaggagtcaggcagggcaggcgtccggccgtcctcctctggaagtgcctgggaggcctgctctgaagccccatctaaaggcagccaagatggtgtcacctgggaggctgaagtggagcttgccacggagacagtgtatgtcgacgatgcctcgtggatgcgctacatccccccaatcccagtccacagggacttcggctttggctgggctctcgtcagcgacatcctcctctgccttcccctctccatcttcatccagattgtgcaagtcagctacaaggtggacaacctggaggaatttctgaacgacccgctgaagaagcacacgctgatccgctttctccccaggcccattcggcagcagcttctgtacaagaggcgttacattttttcggtggtggagaaccttcagaggctgtgctacatggggctgctacagtttggtcccacggaaaagtttcaggataaagatcaggtctttatcttcttgaagaagaatgcagtcattgttgacactaccatctgcgacccacattacaacctggcccgcagcagccggcccttcgagaggcgcctctatgtcctgaactcaatgcaggatgtggaaaactactggtttgacctgcagtgcgtctgcctcaacaccccactaggcgtggtgcgctgcccgcgcgtcaggaagaacagcagcacagaccagggcagcgacgaggagggcagcctgcagaaggagcaggagagcgccatggacaagcacaacctggagcgcaagtgcgccatgctggagtacaccactggaagccgtgaggtggtggatgaaggcttgatccctggagatgggctgggtgccgcagggctcgattccagcttctacggacacctcaagcgcaactggatctggaccagctacatcatcaaccaggccaaaaaggagaacactgccgcagagaatggactcacagtgaggctccagacatttctgtccaagcgcccaatgcccctcagtgccagaggcaacagcaggttgaatatttggggggaagcaagagtaggctccgagctctgtgctggctgggaagagcagtttgaggtggaccgagagccctcgctggaccgaaaccggagagtgaggggtgggaaaagccagaagcggaagcggctgaagaaggaccctgggaagaagatcaagagaaagaagaaaggagagttcccaggagaaaaaagcaaaaggctgcgctaccatgatgaagccgaccagagtgccctgcagcggatgacgcggcttcgtgtcacctggtctatgcaggaggatgggctgcttgtgctgtgccgcattgccagcaatgtcctcaacaccaaggtgaagggcccatttgtcacctggcaggtggtacgggacattttgcatgccacgtttgaagagtctttggataaaacatctcattccgttggacgaagagctcgctacatagtcaaaaacccacaggcctatctcaactataaagtgtgcctggccgaggtgtaccaggataaagcacttgttggagatttcatgaatcgaagaggtgactatgatgacccaaaggtttgtgccaacgagtttaaagaatttgtggagaagcttaaagaaaagttcagttcagccctaaggaattctaaccttgaaatcccagacacactccaggagctgttcgccaggtaccgagttttggcaattggggatgaaaaagatcaaaccaggaaagaggatgaacttaacagcgtggatgacatccactttctggtgcttcagaacctgatccagagcacgctggccctctcagacagtcagatgaagtcctaccagtcattccagactttccgcctctatcgggagtacaaggaccacgttcttgtgaaggccttcatggagtgccagaagaggagcttggtcaaccggcgccgggtcaaccacacgctgggccccaagaagaaccgggccctccccttcgtgccaatgtcctaccagctatcccagacctactacaggatttttacgtggcgatttccaagcaccatctgcacggagtcattccagtttttggacagaatgcgggctgccggcaagttggaccagcctgatcgtttctctttcaaagaccaggataataacgagcccacaaacgacatggtggccttttcactggacggccctggaggaaattgtgtggccgtcctgaccctcttctctctgggcctcatttctgtggatgtcaggatcccggagcagatcatcgtggtagacagctcaatggtggagaatgaggtcatcaaaagcttggggaaggacggcagcctggaggatgacgaggatgaagaggatgacttggacgaaggtgtagggggcaagcgccggagcatggaggtgaaacctgcgcaagcctcccacaccaactacctgctgatgaggggctactactcccccggcatcgtcagcacccgcaacctcaaccccaacgacagcattgtggtcaactcctgccagatgaagttccagctccgctgcacccctgtgcccgcccggctcaggcccgctgccgctcctctggaagagctaacaatgggaacctcctgcctccctgatacgttcaccaagctgataaacccccaggaaaacacctgcagcttggaggagtttgtcctccagctggagctgtctgggtatagtcccgaagacctgactgctgccttggagatcttggaagccattatagccacgggttgttttgggattgacaaggaggagctgcgcagacggttctcggccttggagaaggcaggtggtgggcgcaccaggacattcgcagattgcatccaggccctcctggagcagcatcaggtgctggaggtcggtggcaacactgcgcgcctggtagccatgggctctgcctggccttggctcctgcactccgtgcggctgaaagacagagaagacgccgacatccagagagaagacccccaggccagacccctggaggggtcttccagtgaggacagcccccccgaggggcaggcacctccttctcacagcccccggggcaccaagaggcgcgccagctgggccagtgagaatggggagaccgacgccgagggcacccagatgacccctgccaagaggccagcgctccaggactcaaatttggcccccagccttgggcccggagctgaagatggggcagaagcccaggccccatctccacccccagctcttgaagacaccgctgcagcgggagcagcacaggaagaccaagagggtgtcggtgagttcagttccccaggccaagagcagctgagcggccaggcgcagcctccagagggctctgaagaccccagagggttcacagagagtttcggagctgccaacatctcccaggcagcacgggaaagggactgtgagagtgtctgcttcatcggccggccgtggcgtgtcgtggatggccacctgaaccttcctgtatgcaagggtatgatggaggccatgctgtaccacatcatgaccaggcctggcatccccgagagctccctgctgcgccactaccagggggtcctgcagcccgtcgccgtgctggagttgctccagggcctggagtccctcggctgcatccggaagcgctggctgagaaagccaaggcctgtctcgctcttctctacacccgtggtggaagaggtggaagtgccctccagcctggacgagagccccatggctttctatgagcccaccttggactgtaccctccggctgggccgtgtgttcccccacgaggtcaactggaacaagtggatccacctctaggacccctgtgggcgtcccctccctcccagccaccgcctgccacaccactcctgcctggtgctcggcagaccccactgtgccctggccttgggtctgccgagcctcctgcagcaggggacgggtgctttggccagagtcacagactgacacgtttcccactgtactggaactctggaaagaggggctccccgacctgcccatcccccaggctcttctgggccttccccttgggaactggcctcatcacactgggagttggtgcttcttgtctctgggtctccagagtttgccccgcctgtgcacacctcacattccagactctagccatctcggcaggatctcctggctccttgagtgcccaggtgccaccaagaggaagggccttgtgggatacaccttgcagaatagggatcggtgtgccccgctgcgaggggccccccatgggggctgtggcccctccgcaggcaggacatcccaacccctggctgggactgaaccacccagagcggagcggctcccttttcagccttgtgagtcacctggcaggccccagctgggctggctgtccgtgtccctcagcctggctggtgattccttgcagg

SEQ ID NO: 4431 - DNA, 1005 bp, Homo sapiens
cgtatccgctagcgcggcctgggatgcgcttgggctccctgttcgttcccacatgcagggcagcacaaggagaatgggcgtcatgactgatgtccaccggcgcttcctccagttgctgatgacccatggcgtgctagaggaatgggacgtgaagcgcttgcagacgcactgctacaaggtccatgaccgcaatgccaccgtagataagttggaggacttcatcaacaacattaacagtgtcttggagtccttgtatattgagataaagagaggagtcacggaagatgatgggagacccatttatgcgttggtgaatcttgctacaacttcaatttccaaaatggctacggattttgcagagaatgaactggatttgtttagaaaggctctggaactgattattgactcagaaaccggctttgcgtcttccacaaacatattgaacctggttgatcaacttaaaggcaagaagatgaggaagaaggaagcggagcaggtgctgcagaagtttgttcaaaacaagtggctgattgagaaggaaggggagttcaccctgcacggccgggccatcctggagatggagcaatacatccgggagacgtaccccgacgcggtgaagatctgcaatatctgtcacagcctcctcatccagggtcaaagctgcgaaacctgtgggatcaggatgcacttaccctgcgtggccaagtacttccagtcgaatgctgaaccgcgctgcccccactgcaacgactactggccccacgagatcccaaaagtcttcgaccctgagaaggagagggagtctggtgtcttgaaatcgaacaaaaagtccctgcggtccaggcagcattagccatcgtgccctgctgaggggctggctgccttgagtggcctgatcgccacagcccttcttggaagaaaggcgtccgtgtttcaggttccacgcgagtcacctctttcgtcttaatgttcaccgtccacagctttggaataaaccatcctggg

SEQ ID NO: 4432 - DNA, 2416 bp, Homo sapiens
gtcgtgatcagacgagcggtgagcgatcgatactcctatgctagcctctggctcctcaggggacacagccgagtggtcggaccaaacgcaacgagtcttcgccagcccaaaggcgactcgacaccgtcccagctgaagagaggcacgggactgaaccagctggtggtggcccgatggctggagacacccactgccccgcagagcccctggccagagaaggcactttatgggaggccctcagggcgctcctgccgcacagtaaagaagacctgaagttggacctcggggagaaagtggagaggagcgtggtgacattgttgcagcgagccactgagctcttctacgagggcaggagggacgagtgtctgcagagcagcgaggtgatcctggactactcctgggagaagctcaacacgggcacatggcaggacgtagacaaagactggcgccgggtctacgccatcggctgcctcctgaaagccctgtgtctgtgccaggcacctgaggatgccaacactgtggccgcagccctgcgggtctgtgacatgggcctgctgatgggggcagccatcctgggggacatccttcttaaagtcgctgccatcctccagacacacctccctggaaagaggcctgcccgtggctccctcccagagcaaccctgcacaaagaaagcaagggcggaccatggtttgattccagatgtgaagttagaaaaaacagtcccccggctgcaccgtccgtccctccagcatttcagggagcagtttttggttccagggaggcccgtgatcctgaaaggcgtggctgaccactggccgtgcatgcagaagtggagtttggagtatatccaggagatcgctggctgccgaactgtcccagtggaagttggttcgaggtacacagatgaggaatggtcccagaccctcatgacggtcaacgagttcatcagcaaatacatcgtgaatgagccaagggacgtcgggtaccttgctcagcaccagctctttgaccagatcccggagttgaagcaggacatcagcatccccgactactgcagcctgggcgatggggaggaggaggaaatcaccatcaatgcctggtttggtccccagggaaccatctccccactacatcaggatccccagcaaaacttcctagtgcaggtgatggggaggaagtacatccggctgtattccccgcaggagtcaggggctctgtaccctcatgacacgcaccttctccataacacgagccaggttgacgtggagaatcccgacctggaaaagttccccaagtttgccaaggccccattcctgtcctgcatcctgtctcctggagagatcctgttcatcccggtgaaatactggcattacgtgcgggctctggatttgagcttctcggtcagcttctggtggtcgtagccaggataggagctgaaagggcctgacatgcagacagcattcatctgttcactaatttcctgggtcctggaatctatagagacaagcaggactgaacctgtgtcctgaagagccttcactgcccagtggcagccctggggggctgagctccagcactggacaggcacagagcaggggctgcccaggaaggagcacactccaggccaggggtgcatggcagaggaaggtggggagagcccagaaggacattgcagacagacagcctgcatggggactctggcatcagaaagccgaatgtttttgggaaacgggtgggtcacacaggcaggggtgaaacatgggctctgaggttggctacctgattcaaacccggccgcgctgtgcacctgctgggtgacttggccaggatcccccacttcgctgtgcccatatggaaaagagggcaaggccagtcctcactgccgagggccgagaaggcggtgccgagcccctgctgctgcatgaaccttagccgctgtcactgatcccaattactctgatccttttgcccttccttcccataacggcctgctggacgccacagcctgaatactggagagagctgggcattgcccaggtcacaggagagagtccgtagagacctgcgcaggagccgggacccctgctgagcagtgggagctttctgtcatccccatggctcaaggataacctacctgcctgcagagaagtgcgaaggtcttgctggatgacttttcacccgcactcacccaggagcaggctcccaagtgaagaaaccaccgaaccatcaccagctcctagaagcctccctcctaccaccttctagtcaccatcccccagaagtaatgactctcaaacctgggggatttgaggccagggggagagccaggctctatgctttctgtaattgtgtctcgtttgtgtgcacgcaggtttgttttatgttttggccattaagattttccccagccctc

SEQ ID NO: 4433 - protein, 416 aa, Homo sapiens
MAGDTHCPAEPLAREGTLWEALRALLPHSKEDLKLDLGEKVERSVVTLLQRATELFYEGRRDECLQSSEVILDYSWEKLNTGTWQDVDKDWRRVYAIGCLLKALCLCQAPEDANTVAAALRVCDMGLLMGAAILGDILLKVAAILQTHLPGKRPARGSLPEQPCTKKARADHGLIPDVKLEKTVPRLHRPSLQHFREQFLVPGRPVILKGVADHWPCMQKWSLEYIQEIAGCRTVPVEVGSRYTDEEWSQTLMTVNEFISKYIVNEPRDVGYLAQHQLFDQIPELKQDISIPDYCSLGDGEEEEITINAWFGPQGTISPLHQDPQQNFLVQVMGRKYIRLYSPQESGALYPHDTHLLHNTSQVDVENPDLEKFPKFAKAPFLSCILSPGEILFIPVKYWHYVRALDLSFSVSFWWS

SEQ ID NO: 4434 - DNA, 1023 bp, Homo sapiens
gagcagtgtgaagaagaggcgagaacgacccccagaccgaccaaagcccgcgcgccactgcatcccgcgtccagcacctacgtcctgctgccgtcgccgccaccaccatgcccaactaaaaaggcccctgcaaagaagggagagaaggtacccaaagggaaaaagggaaaagctgatgctggcaaggaggggaataaccctgcagaaaatggagatgccaaaacagaccaggcacagaaagctgaaggtgctggagatgccaagtgaagtgtgtgcatttttgataactgtgtacttctggtgactgtacagtttggaatactattttttatcaagttttataaaaatgtggaattttgttttacttttttttttttttaaagctatgttgttagcacacagaacacttcattgttgtttttgggggaaggggcatatgtcactaatagaatgtctccaaagctggattgatgtggagaaaacacctttcccttctagttttgagagacttcctcttggctcccaggaggagggattccctgactttgacacacatggccaccttggcacaaaagccttgtggtatagaaagacaaatttgtttttatgtcctcttctccctttccatctttcagcatagacttaactcccttaagcccagacatctgttgggacctgacccctagtcattggttaccagtgtgtcaggcaatctggactttccagtgatgccactgagatggcacctgtcaaaagagcagtggttccatttctagattgtggatcttcagataaattctgccattttcatttcacttcctgaaagtcagagatggcttgtgtccctgttcagagcatcagatgaagacttcattgggttttatagtggctttctgatttttggtagtccattgaagaagggagtttgaaagttgttgtatactgttaacgattgtctgcccatgtcctgcctgaaataccatgattgtttatggaaagtatctttaataaagctggatacag

SEQ ID NO: 4435 - DNA, 645 bp, Homo sapiens
gaagaggcgagaacgacccccagaccgaccaaagcccgcgcgccactgcatcccgcgtccagcacctacgtcctgctgccgtcgccgccaccaccatgcccaagagaaaggctgaaggggatgctaagggagataaagccaaggtgaaggacgaaccacagagaagatccgcgaggttgtctgctaaacctgctcctccaaagccagagcccaagactaaaaaggcccctgcaaagaagggagagaaggtacccaaagggaaaaagggaaaagctgatgctggcaaggaggggaataaccctgcagaaaatggagatgccaaaacagaccaggcacagaaagctgaaggtgctggagatgccaagtgaagtgtgtgcatttttgataactgtgtacttctggtgactgtacagtttggaatactattttttatcaagttttataaaaatgtggaattttgttttacttttttttttttttaaagctatgttgttagcacacagaacacttcattgttgtttttgggggaaggggcatatgtcactaatagaatgtctccaaagctggattgatgtggaggattccctgactttgacacacatggccaccttggcacaaaagccttgtggtatagaaagacaaatt

SEQ ID NO: 4436 - DNA, 3219 bp, Homo sapiens
gtagtagctgccaggctgtcccccgccctgcccggcccgagccccgcgggccgccgccgccaccgccgccatgaagaagcagttcaaccgcatgaagcagctggctaaccagaccgtgggcagagctgagaaaacagaagtccttagtgaagatctattacagattgagagacgcctggacacggtgcggtcaatatgccaccattcccataagcgcttggtggcatgtttccagggccagcatggcaccgatgccgagaggagacacaaaaaactgcctctgacagctcttgctcaaaatatgcaagaagcatcgactcagctggaagactctctcctggggaagatgctggagacgtgtggagatgctgagaatcagctggctctcgagctctcccagcacgaagtctttgttgagaaggagatcgtggaccctctgtacggcatagctgaggtggagattcccaacatccagaagcagagggagcagcttgcaagattggtgttagactgggattcagtcagagccaggtggaaccaagctcacaaatcctcaggaaccaactttcaggggcttccatcaaaaatagatactctaaaggaagagatggatgaagctggaaataaagtagaacagtgcaaggatcaacttgcagcagacatgtacaactttatggccaaagaaggggagtatggcaaattctttgttacgttattagaagcccaagcagattaccatagaaaagcattagcagtcttagaaaagaccctccccgaaatgcgagcccatcaagataagtgggcggaaaaaccagcctttgggactcccctagaagaacacctgaagaggagcgggcgcgagattgcgctgcccattgaagcctgtgtcatgctgcttctggagacaggcatgaaggaggagggccttttccgaattggggctggggcctccaagttaaagaagctgaaagctgctttggactgttctacttctcacctggatgagttctattcagacccccatgctgtagcaggtgctttaaaatcctatttacgggaattgcctgaacctttgatgacttttaatctgtatgaagaatggacacaagttgcaagtgtgcaggatcaagacaaaaaacttcaagacttgtggagaacatgtcagaagttgccaccacaaaattttgttaactttagatatttgatcaagttccttgcaaagcttgctcagaccagcgatgtgaataaaatgactcccagcaacattgcgattgtgttagcccctaacttgttatgggccagaaacgaaggaacacttgctgaaatggcagcagccacatccgtccatgtggttgcagtgattgaacccatcattcagcatgccgactggttcttccctgaagaggtggaatttaatgtatcagaagcatttgtacctctcaccaccccgagttctaatcactcattccacactggaaacgactctgactcggggaccctggagaggaagcggcctgctagcatggcggtgatggaaggagacttggtgaagaaggaaagtcctcccaaaccgaaggaccctgtatctgcagctgtgccagcaccagggagaaacaacagtcagatagcatctggccaaaatcagccccaggcagctgctggctcccaccagctctccatgggccaacctcacaatgctgcagggcccagcccgcatacactgcgccgagctgttaaaaaacccgctccagcacccccgaaaccgggcaacccacctcctggccaccccgggggccagagttcttcaggaacatctcagcatccacccagtctgtcaccaaagccacccacccgaagcccctctcctcccacccagcacacgggccagcctccaggccagccctccgccccctcccagctctcagcaccccggaggtactccagcagcttgtctccaatccaagctcccaatcacccaccgccgcagccccctacgcaggccacgccactgatgcacaccaaacccaatagccagggccctcccaaccccatggcattgcccagtgagcatggacttgagcagccatctcacacccctccccagactccaacgccccccagtactccgcccctaggaaaacagaaccccagtctgccagctcctcagaccctggcagggggtaaccctgaaactgcacagccacatgctggaaccttaccgagaccgagaccagtaccaaagccaaggaaccggcccagcgtgcccccacccccccaacctcctggtgtccactcagctggggacagcagcctcaccaacacagcaccaacagcttccaagatagtaacagactccaattccagggtctcagaaccgcatcgcagcatctttcctgaagtgcactcagactcagccagcaaagacgtgcctggccgcatcctgctggatatagacaatgataccgagagcactgccctgtgaagaaagccctttcccagccctccaccacttccaccctggcgagtggagcaggggcaggcgaacctctttctttgcagaccgaacagtgaaaagctttcagtggaggacaaaggagggcctcactgtgtgggacctggccttctgcacggcccaaggagaacctggaggccaccactaaagctgaatgacctgtgtcttgaagaagttggctttctttacatgggaaggaaatcatgccaaaaaaatccaaaacaaagaagtacctggagtggagagagtattcctgctgaaacgcgcataggaagcttttgtccctgctgttaatgcgggcagcacctacagcaacttggaatgagtaagaagcagtgcgttaactatctatttaataaaatgcgctcattatgcaagtcgcctactctctgctacctggacgttcattcttatgtattaggagggaggctgcgctccttcagacttgctgcagaatcattttgtatcatgtatggtctgtgtctccccagtcccctcagaaccatgcccatggatggtgactgctggctctgtcacctcatcaaactggatgtgacccatgccgcctcgttggattgtcggaatgtagacagaaatgtactgttcttttttttttttttaaacaatgtaattgctacttgataaggaccgaacattattctagtttcatgtttaatttgaattaaatatattctgtggtttatatg

SEQ ID NO: 4437 - protein, 803 aa, Homo sapiens
MKKQFNRMKQLANQTVGRAEKTEVLSEDLLQIERRLDTVRSICHHSHKRLVACFQGQHGTDAERRHKKLPLTALAQNMQEASTQLEDSLLGKMLETCGDAENQLALELSQHEVFVEKEIVDPLYGIAEVEIPNIQKQREQLARLVLDWDSVRARWNQAHKSSGTNFQGLPSKIDTLKEEMDEAGNKVEQCKDQLAADMYNFMAKEGEYGKFFVTLLEAQADYHRKALAVLEKTLPEMRAHQDKWAEKPAFGTPLEEHLKRSGREIALPIEACVMLLLETGMKEEGLFRIGAGASKLKKLKAALDCSTSHLDEFYSDPHAVAGALKSYLRELPEPLMTFNLYEEWTQVASVQDQDKKLQDLWRTCQKLPPQNFVNFRYLIKFLAKLAQTSDVNKMTPSNIAIVLAPNLLWARNEGTLAEMAAATSVHVVAVIEPIIQHADWFFPEEVEFNVSEAFVPLTTPSSNHSFHTGNDSDSGTLERKRPASMAVMEGDLVKKESPPKPKDPVSAAVPAPGRNNSQIASGQNQPQAAAGSHQLSMGQPHNAAGPSPHTLRRAVKKPAPAPPKPGNPPPGHPGGQSSSGTSQHPPSLSPKPPTRSPSPPTQHTGQPPGQPSAPSQLSAPRRYSSSLSPIQAPNHPPPQPPTQATPLMHTKPNSQGPPNPMALPSEHGLEQPSHTPPQTPTPPSTPPLGKQNPSLPAPQTLAGGNPETAQPHAGTLPRPRPVPKPRNRPSVPPPPQPPGVHSAGDSSLTNTAPTASKIVTDSNSRVSEPHRSIFPEVHSDSASKDVPGRILLDIDNDTESTAL

SEQ ID NO: 4438 - DNA, 5246 bp, Homo sapiens
gaaacctctaggtccaccacctccatcttacacgtgtttccgttgtggtaaacctggacattatattaagaattgcccaacaaatggggataaaaactttgaatctggtcctaggattaaaaagagcactggaattcccagaagtttcatgatggaagtgaaagatcctaatatgaaaggtgcaatgcttaccaacactggaaaatatgcaataccaactatagatgcagaagcatatgcaattgggaagaaagagaaacctcccttcttaccagaggagccatcttcttcctcagaagaagatgatcctatcccagatgaattgttgtgtctcatctgcaaggatattatgactgatgctgttgtgattccctgctgtggaaacagttactgtgatgaatgtataagaacagcactcctggaatcagatgagcacacatgtccgacgtgtcatcaaaatgatgtttctcctgatgctttaattgccaataaatttttacgacaggctgtaaataacttcaaaaatgaaactggctatacaaaaagactacgaaaacagttacctcctccaccacccccaataccacctccgagaccactgattcagaggaacctacaacctctgatgagatctccgatatcaagacaacaagatcctcttatgattccagtgacatcttcatcaactcacccagctccgtctatatcttcattaacttctaatcagtcttccttggcccctcctgtgtctggaaatccgtcttctgctccagctcctgtacctgatataactgcaacagtatccatatcagttcattcagaaaaatcagatggaccttttcgggattctgataataaaatattgccagctgcagctcttgcatcagagcactcaaagggaacctcctcaattgcaattaccgctcttatggaagagaagggttaccaggtgcctgttcttggaaccccatctttgcttggacagtcattattgcatggacagttgatccccacaactggtccagtaagaataaatactgctcgtccaggtggtggtcgaccaggctgggaacattccaacaaacttggctatctggtttctccaccacaacaaattagaagaggggagaggagctgctacagaagtataaaccgtgggcgacaccacagcgaaagatcacagaggactcaaggcccgtcactaccagcaactccagtctttgtacctgttccaccacctcctttgtatccgcctcctccccatacacttcctctccctccgggtgttcctcctccacagttttctcctcagtttcctcctggccagccaccacccgctgggtatagtgtccctcctccagggtttcctccagctcctgccaatttatcaacaccttgggtatcatcaggagtgcagacagctcattcaaataccatcccaacaacacaagcaccacctttgtccagggaagaattctatagagagcagcgacgactaaaagaagagtctaaatctccctatagtggttcttcgtattcaagaagttcatatacttattctaaatcaagatctggttcaacacgttcacgctcttattctcgatcattcagccgctcacattctcgttcctattcacggtcacctccataccccagaagaggcagaggcaagagccgcaattaccgttcacggtctagatctcatggatatcatcgatctaggtcaaggtcacccccttacagacgctatcattcacgatcaagatctcctcaagcgtttaggggacagtctcctaataaacgtaatgtacctcaaggggaaacagaacgtgaatattttaatagatacagagaagttccaccaccatatgacatgaaagcatattatgggagaagtgttgactttagagacccatttgaaaaagaacgctaccgagaatgggagagaaaatatagagagtggtatgaaaaatattataaaggttatgctgctggagcacagcctagaccctcagcaaatagagagaacttttctccagagagatttttgccacttaacatcaggaattctcccttcacaagaggccgcagagaagactatgttggtgggcaaagtcatagaagtcgaaacataggtagcaactatccagaaaagctttcagcaagagatggtcacaatcagaaggataatacaaagtcaaaagagaaggagagtgaaaacgctccaggagatggtaaaggaaataagcataagaaacacagaaaaagaagaaaaggggaggaaagtgagggttttctgaacccagagttattagagacttctaggaaatcaagagaacctacaggtgttgaagaaaataaaacagactcattgtttgttctcccaagtagagatgatgccacacctgttagagatgaaccaatggatgcagaatcaatcacttttaaatcagtgtctgaaaaagacaagagagaaagggataaaccaaaagcaaagggtgataaaaccaaacggaagaatgatggatctgctgtgtccaaaaaagaaaatattgtaaaacctgctaaaggaccccaagaaaaagtagatggagaacgtgagagatctcctcgatctgaacctccaattaaaaaagccaaagaggagactccgaagactgacaatactaaatcatcatcttcctctcagaaggatgaaaaaatcactggaacccccagaaaagctcactctaaatcagcaaaagaacaccaagaaacaaaaccagtcaaagaggaaaaagtgaagaaggactattccaaagatgtcaaatcagaaaagctaacaactaaggaagaaaaggccaagaagcctaatgagaaaaacaaaccacttgataataagggagaaaaaagaaaaagaaaaactgaagaaaaaggcgtagataaagattttgagtcttcttcaatgaaaatctcgaaactagaagtgactgaaatagtgaaaccatcaccaaagcgcaaaatggaacctgatactgaaaaaatggataggacccctgaaaaggacaaaatttctttaagtgcgccagccaaaaaaatcaaactcaacagagaaactgggaagaaaattggaagtacagaaaatatatcaaacacaaaagaaccctctgaaaaattggagtcaacatctagcaaagttaaacaagaaaaagtcaaaggaaaggtcagacgaaaagtgactggaactgaaggatccagctcaactctggtggattacaccagtacgagctcaactggaggcagtcctgtgcggaaatctgaagaaaaaacagatacaaagcgaactgtgattaaaacgatggaagaatataataatgacaataccgcgccagctgaagatgttatcattatgattcaggttcctcaatccaaatgggataaagatgactttgaatctgaagaagaagatgttaaatccacacagcctatatcaagtgtaggaaaacctgctagtgttataaaaaatgttagtacaaagccatcaaatatagtcaagtatcctgagaaagaaagtgagccatccgagaaaattcagaaattcaccaaggacgtgagccatgaaatcatacaacatgaggttaaaagttcaaaaaactctgcatctagtgaaaaagggaaaaccaaagatcgagattattcagtgttggaaaaggagaaccctgaaaagaggaagaacagcactcagccagagaaagagagtaatttggaccgtctgaatgaacaaggaaattttaaaagtctgtctcaatcttccaaagaggctagaacgtcagataaacatgattccactcgtgcttcctcaaataaagacttcactcccaatagagacaaaaaaactgactatgacaccagagagtattcaagttccaaacgtagagatgaaaagaatgaattaacaagacgaaaagactctccttctcggaataaagattctgcatctggacagaaaaataaaccaagggaagagagagatttgcctaaaaaaggaacaggagattccaaaaaaagtaattctagtccctcaagagacagaaaacctcatgatcacaaagccacttatgatactaaacggccaaatgaagagacaaaatctgtagataaaaatccttgtaaggatcgtgagaagcatgtattagaagcaaggaacaataaagagtcaagtggcaataaactactttatatacttaacccaccagagacacaggttgaaaaagagcaaattactgggcaaattgacaagagtactgtcaagcctaaaccccagttaagtcattcctctagactttcctctgacttaactagagaaactgatgaagctgcttttgaaccagactataatgaaagtgacagtgaaagtaatgtttctgtaaaagaagaggaatcttcaggaaacatttctaaggacctgaaagataaaatagtggagaaagcaaaagagagcctggacacagcagcagttgtccaggtgggcataagcaggaatcagagccacagcagccccagcgtcagccccagcagaagccacagtccttctggaagccagacccgaagccacagtagcagtgccagctcagcagaaagtcaggacagcaagaagaagaagaaaaagaaggaaaagaaaaaacacaagaaacataaaaagcataagaagcataagaaacatgcaggcactgaagtggaattggaaaaaagccaaaaacacaaacacaagaaaaagaagtcaaagaagaacaaagataaagagaaggagaaggagaaagatgaccaaaaagtgaaatctgtcactgtgtaaaaagacagattttttaaattgacttaattactaagtcatctgtattaaattttgttataatgtaaagagattcaagccttgtaaataatgacatggaagaccctgtgctgcacttaaaatattgctgcttgattatttgatttttacatcagagctttataacacgaacttttgtacagaattgtgagttgtgaccatgtaacatgagaggttttgctagggcctattatttttaaccaccattaattagttggggtggagtttactgtaatgtgaaattttcacatttgaattttttaattgcctggcaaaagctgatataagttctaaaatatcagcagaatgatttgctgaattcattacaaccctgttatgtcactttttgattacaataaaagttttcagtaaacttttc

SEQ ID NO: 4439 - protein, 1663 aa, Homo sapiens
MATTKAIDDSSASISLAQLTKTANLAEANASEEDKIKAMMSQSGHEYDPINYMKKPLGPPPPSYTCFRCGKPGHYIKNCPTNGDKNFESGPRIKKSTGIPRSFMMEVKDPNMKGAMLTNTGKYAIPTIDAEAYAIGKKEKPPFLPEEPSSSSEEDDPIPDELLCLICKDIMTDAVVIPCCGNSYCDECIRTALLESDEHTCPTCHQNDVSPDALIANKFLRQAVNNFKNETGYTKRLRKQLPPPPPPIPPPRPLIQRNLQPLMRSPISRQQDPLMIPVTSSSTHPAPSISSLTSNQSSLAPPVSGNPSSAPAPVPDITATVSISVHSEKSDGPFRDSDNKILPAAALASEHSKGTSSIAITALMEEKGYQVPVLGTPSLLGQSLLHGQLIPTTGPVRINTARPGGGRPGWEHSNKLGYLVSPPQQIRRGERSCYRSINRGRHHSERSQRTQGPSLPATPVFVPVPPPPLYPPPPHTLPLPPGVPPPQFSPQFPPGQPPPAGYSVPPPGFPPAPANLSTPWVSSGVQTAHSNTIPTTQAPPLSREEFYREQRRLKEESKSPYSGSSYSRSSYTYSKSRSGSTRSRSYSRSFSRSHSRSYSRSPPYPRRGRGKSRNYRSRSRSHGYHRSRSRSPPYRRYHSRSRSPQAFRGQSPNKRNVPQGETEREYFNRYREVPPPYDMKAYYGRSVDFRDPFEKERYREWERKYREWYEKYYKGYAAGAQPRPSANRENFSPERFLPLNIRNSPFTRGRREDYVGGQSHRSRNIGSNYPEKLSARDGHNQKDNTKSKEKESENAPGDGKGNKHKKHRKRRKGEESEGFLNPELLETSRKSREPTGVEENKTDSLFVLPSRDDATPVRDEPMDAESITFKSVSEKDKRERDKPKAKGDKTKRKNDGSAVSKKENIVKPAKGPQEKVDGERERSPRSEPPIKKAKEETPKTDNTKSSSSSQKDEKITGTPRKAHSKSAKEHQETKPVKEEKVKKDYSKDVKSEKLTTKEEKAKKPNEKNKPLDNKGEKRKRKTEEKGVDKDFESSSMKISKLEVTEIVKPSPKRKMEPDTEKMDRTPEKDKISLSAPAKKIKLNRETGKKIGSTENISNTKEPSEKLESTSSKVKQEKVKGKVRRKVTGTEGSSSTLVDYTSTSSTGGSPVRKSEEKTDTKRTVIKTMEEYNNDNTAPAEDVIIMIQVPQSKWDKDDFESEEEDVKSTQPISSVGKPASVIKNVSTKPSNIVKYPEKESEPSEKIQKFTKDVSHEIIQHEVKSSKNSASSEKGKTKDRDYSVLEKENPEKRKNSTQPEKESNLDRLNEQGNFKSLSQSSKEARTSDKHDSTRASSNKDFTPNRDKKTDYDTREYSSSKRRDEKNELTRRKDSPSRNKDSASGQKNKPREERDLPKKGTGDSKKSNSSPSRDRKPHDHKATYDTKRPNEETKSVDKNPCKDREKHVLEARNNKESSGNKLLYILNPPETQVEKEQITGQIDKSTVKPKPQLSHSSRLSSDLTRETDEAAFEPDYNESDSESNVSVKEEESSGNISKDLKDKIVEKAKESLDTAAVVQVGISRNQSHSSPSVSPSRSHSPSGSQTRSHSSSASSAESQDSKKKKKKKEKKKHKKHKKHKKHKKHAGTEVELEKSQKHKHKKKKSKKNKDKEKEKEKDDQKVKSVTV

SEQ ID NO: 4440 - DNA, 830 bp, Homo sapiens
tgacattgtgcccgttggcggattctcgatttcccctcttccccgtcctcgtcctcctcctcccccatgaagtgattctgagtatcggggggtctctggattattgttctgacgaacccctgcttgtggttggggggtatttaatctgaggccttagggtccttcggtgtctttgagtgtgttgtgtgtacatattttactcttaaagtttataaatatacgtatattgagagtgtccacgtctcctcgctgaaccttaggaatcccttggcaccatgtcctgtgtgcattataaattttcctctaaactcaactatgataccgtcacctttgatgggctccacatctccctctgcgacttaaagaagcagattatggggagagagaagctgaaagctgccgactgcgacctgcagatcaccaatgcgcagacgaaagaaggtaagggccgcttggtcttaagatatttggtggctggagagagatactagctagaaggtgcctggcaggaagctaaccgccattatgtctctagtggggactgttcgttctagtactttggatacaactttcattgatagccaaggtttgcagcagttggccttggagtttcactggtttattttatttctgcatacttgggtcatctgtaacaggctaacccaaaacgtggaagcctgattattcttctcgctgttttttaaaatgagggagggaggagagggggatagctatctagactctttgagtgcttgtcttagggcgttttctaacttattttccatcaggagggcaggagagcctgtgcaaagcttgtttgttcaatcagc

SEQ ID NO: 4441 - protein, 71 aa, Homo sapiens
MSCVHYKFSSKLNYDTVTFDGLHISLCDLKKQIMGREKLKAADCDLQITNAQTKEGKGRLVLRYLVAGERY

SEQ ID NO: 4442 - DNA, 2213 bp, Homo sapiens
ggcacgagggagcggtgcggaggctctgctcggatcgaggtctgcagcgcagcttcgggagcatgagtgctgcagtgactgcagggaagctggcacgggcaccggccgaccctgggaaagccggggtccccggagttgcagctcccggagctccggcggcggctccaccggcgaaagagatcccggaggtcctagtggacccacgcagccggcggcgctatgtgcggggccgctttttgggcaagggcggctttgccaagtgcttcgagatctcggacgcggacaccaaggaggtgttcgcgggcaagattgtgcctaagtctctgctgctcaagccgcaccagagggagaagatgtccatggaaatatccattcaccgcagcctcgcccaccagcacgtcgtaggattccacggctttttcgaggacaacgacttcgtgttcgtggtgttggagctctgccgccggaggtctctcctggagctgcacaagaggaggaaagccctgactgagcctgaggcccgatactacctacggcaaattgtgcttggctgccagtacctgcaccgaaaccgagttattcatcgagacctcaagctgggcaaccttttcctgaatgaagatctggaggtgaaaataggggattttggactggcaaccaaagtcgaatatgacggggagaggaagaagaccctgtgtgggactcctaattacatagctcccgaggtgctgagcaagaaagggcacagtttcgaggtggatgtgtggtccattgggtgtatcatgtataccttgttagtgggcaaaccaccttttgagacttcttgcctaaaagagacctacctccggatcaagaagaatgaatacagtattcccaagcacatcaaccccgtggccgcctccctcatccagaagatgcttcagacagatcccactgcccgcccaaccattaacgagctgcttaatgacgagttctttacttctggctatatccctgcccgtctccccatcacctgcctgaccattccaccaaggttttcgattgctcccagcagcctggaccccagcaaccggaagcccctcacagtcctcaataaaggcttggagaaccccctgcctgagcgtccccgggaaaaagaagaaccagtggttcgagagacaggtgaggtggtcgactgccacctcagtgacatgctgcagcagctgcacagtgtcaatgcctccaagccctcggagcgtgggctggtcaggcaagaggaggctgaggatcctgcctgcatccccatcttctgggtcagcaagtgggtggactattcggacaagtacggccttgggtatcagctctgtgataacagcgtgggggtgctcttcaatgactcaacacgcctcatcctctacaatgatggtgacagcctgcagtacatagagcgtgacggcactgagtcctacctcaccgtgagttcccatcccaactccttgatgaagaagatcaccctccttaaatatttccgcaattacatgagcgagcacttgctgaaggcaggtgccaacatcacgccgcgcgaaggtgatgagctcgcccggctgccctacctacggacctggttccgcacccgcagcgccatcatcctgcacctcagcaacggcagcgtgcagatcaacttcttccaggatcacaccaagctcatcttgtgcccactgatggcagccgtgacctacatcgacgagaagcgggacttccgcacataccgcctgagtctcctggaggagtacggctgctgcaaggagctggccagccggctccgctacgcccgcactatggtggacaagctgctgagctcacgctcggccagcaaccgtctcaaggcctcctaatagctgccctcccctccggactggtgccctcctcactcccacctgcatctggggcccatactggttggctcccgcggtgccatgtctgcagtgtgccccccagccccggtggctgggcagagctgcatcatccttgcaggtgggggttgctgtgtaagttatttttgtacatgttcgggtgtgggttctacagccttgtccccctccccctcaaccccaccatatgaattgtacagaatatttctattgaattcggaactgtcctttccttggctttatgcacattaaacagatgtgaatattcaaaaaaaaaaaaaaaaaaaaaaaaaaaaaaaaaaa

SEQ ID NO: 4443 - protein, 603 aa, Homo sapiens
MSAAVTAGKLARAPADPGKAGVPGVAAPGAPAAAPPAKEIPEVLVDPRSRRRYVRGRFLGKGGFAKCFEISDADTKEVFAGKIVPKSLLLKPHQREKMSMEISIHRSLAHQHVVGFHGFFEDNDFVFVVLELCRRRSLLELHKRRKALTEPEARYYLRQIVLGCQYLHRNRVIHRDLKLGNLFLNEDLEVKIGDFGLATKVEYDGERKKTLCGTPNYIAPEVLSKKGHSFEVDVWSIGCIMYTLLVGKPPFETSCLKETYLRIKKNEYSIPKHINPVAASLIQKMLQTDPTARPTINELLNDEFFTSGYIPARLPITCLTIPPRFSIAPSSLDPSNRKPLTVLNKGLENPLPERPREKEEPVVRETGEVVDCHLSDMLQQLHSVNASKPSERGLVRQEEAEDPACIPIFWVSKWVDYSDKYGLGYQLCDNSVGVLFNDSTRLILYNDGDSLQYIERDGTESYLTVSSHPNSLMKKITLLKYFRNYMSEHLLKAGANITPREGDELARLPYLRTWFRTRSAIILHLSNGSVQINFFQDHTKLILCPLMAAVTYIDEKRDFRTYRLSLLEEYGCCKELASRLRYARTMVDKLLSSRSASNRLKAS

SEQ ID NO: 4444 - DNA, 3386 bp, Homo sapiens
ggcacgaggaaagactgaccgactgactctgacaggatccggggctgagggaaggaggcggcggccatggagttgggcgagctgctctacaacaagtctgagtacatcgagacggcatctgggaacaaagtcagtcgccagtcagtgttgtgtggaagccagaacatcgttctcaatggcaagaccattgtgatgaatgactgtattatccgaggggatctggcaaatgtaagagttggacgtcattgtgttgtgaaaagtcgtagtgtcataaggccaccattcaagaagttcagcaaaggtgttgcattctttcctttacatattggagaccatgtctttattgaggaagattgtgtggtcaacgcagcacagattggttcctatgttcatgttgggaagaactgtgtgattgggcgccgatgtgtgttgaaagactgctgcaaaattcttgacaacacagtattacctccagaaactgtggttccaccattcactgtcttctcaggctgcccaggactcttctcaggggagctcccggagtgcactcaggagctgatgattgacgtcaccaagagctactaccagaagtttttgcccctgacgcaagtctagcatctctgcctcatgtcttgaatctgcttgagctctaagatgaacctggggacaaagtgagccagtcagcacctacaaagagcttttgtgtctttgacatctaccaccctcctccttttaaaaaatttctttagaatttctcaatcttcaaggctctaagtgcttaagaattcactaacagacagaccatctggaggagctgtcttcaaatgctgtgcttacaccttatctatgaacagtcactttgtaccattatctgtggaacacagaatcatctgttcccaacactccagccccttggtcctgtggatggctggatcccgcctgaaacggacctgcagagcagcagcacccttccggtgtggaggctatgtagctggtgcgctgctcacggccattcactgcccatgctgagcgcctctcacacaggtaatgcccagcttttctgctgctaacacatttggccagttgttgcagttgctcatcatcttgggaaaggtgtttgtgacttttcagagcccagattcctgttgtctattaaaacttgaagggaggggtgaatagtgtttctctcttcttcccaaaatgaccttagctgtcctaggatagttagtaaaagactttttagcattttgacctagggcctttggctttcactaaaagtggggacctcagtatcccagattgtaattttgccaagtgttagatttgagtctctcatgtggatgcattagtcaggtggttactccttgcttcaaggtacttaccttatttcattgaagacaccgcatttgtgaactcttgcttcctggcctagaaccattcagcctaccctgtatttgccataaactccacaattcacaccaaaatgtctgtacttagagctaattcgcatatatacaggaagggctcttagaatcagtttgtgggcacagagcctcaggagtaaatgaagttactagggctgttcttaccatctccttctggccaaatagcacaacatttcctcgttctgctctgacctcttagcttagaaggaagattcagaagtgaggggctaagaaggttgtccttgcctaatgctctgatctgtaagtgaatagggcagaacagttcagccttgaggttagaatttagcaggagctatcctgacttaatatccagttgtggggtttgcaaaacaaaacagctgtatgtaatcattgccactagttccatctagaactcctttctagtttgttatttttaaaatgtttatacataaaaccaccaaaatacatagcttcgacaagatggaagtttatttctctctcccataacagtgcagtgatagtcagctggtccaggccaggcaaggggctggtccatgatgtcatcaggcacccaggttcctactgtcttgccatgtggccacagttagcaacaaaggaggctgtaaatttagtttctacttgggcagccaaaactctgaggaaggagattctgctagtaaaaaggagtgggggaagaatggccattgggagacaacaagcagactcaaccaggcctctttgttggcttcctttcctcctgctgcacatgagccttcgccttgcatttggagccatgacagctgatagctccagacctgcatcctcctagcttgggggctctgaatgaaaggtttcttcccttccagttcgaatttggaaactcccaaagttctcaatggtttgttgtgagttccatgtcctcttggatcagtcactgtggccatgcatgtttggccacatgattaatccagtctgggtcatgaccttttcttcatccaaaacaaggtgatgggaagacaaaaacaatagctactacaaacaataggagtttataattatgtgctgatgtattcgaagatgtgttgacagtcgtgagtgtgtatcctaggaaaggcgagctggactctgtctccatggtggctctcaccccagggacctaggaacagcctgtcaccacacaattacttttataaccctggagatgaaaatctccttgtcctcaaaatacttccagaagaacaaccagatgggaaggaccttggttgggactctttccagttcacttggggcagagggaatttaatggctcacgtagctgaaaaggatgggctagattgggcttcaggctgcatcccaggactccaaacagggatctgtctctttggctctcagctctgctttcatttgagttggctttattcttgggcttcacagtgtggccccacagcaccagttattgataaaaagagctcccctttgctgacagaactgctggatttggttctcattggtccagacgaggaaggtatccagcctcaagtcatcattgtggccaggaagatggaatacaccaaatggacaggcctggcatgtacccacagagactgagagttggtgctggtggttgtggtggcagatgatattacctgaagaagggacgaatgggtgctgggcaggacaaagcatcagctgtccagttcaggcctctcctctttccctggtgtcttcattttcctccgtctccctgctgtcccttaccctctgcccaatctctcattactcctggtcttgggagttgccttctgaggatactccactgggggtacctgagcctggattagagggcagggggaggatattgcctagccaaagtgggtgttcaataaagaaccatttggagatggtaaaaaaaaaaaaaaaaaaaaaaaaaaaaaaaaaaaaaaaaaaaaaaaaaaaaaa

SEQ ID NO: 4445 - protein, 182 aa, Homo sapiens
MELGELLYNKSEYIETASGNKVSRQSVLCGSQNIVLNGKTIVMNDCIIRGDLANVRVGRHCVVKSRSVIRPPFKKFSKGVAFFPLHIGDHVFIEEDCVVNAAQIGSYVHVGKNCVIGRRCVLKDCCKILDNTVLPPETVVPPFTVFSGCPGLFSGELPECTQELMIDVTKSYYQKFLPLTQV

SEQ ID NO: 4446 - DNA, 663 bp, Homo sapiens
agtgcatcctgggttggcgtagccatggcgtctcgtgtcctttcagcctatgtcagccgcctgcccgcggcctttgcgccgctgccccgggtccggatgctggccgtggcccggcctctcagcactgctctctgctccgcggggacccagacgaggctcgggactttgcagccggccttagtgctcgcgcaggttcctggtagagttacacagttgtgccgccagtatagcgacatgcctcctttgacgttagagggcatccaggaccgtgttctttacgtattgaaactctatgacaagattgacccagagaagctttcagtaaattctcattttatgaaagacctgggcttagacagtttggaccaagtggagattatcatggccatggaagacgaatttgggtttgaaattcctgatatagatgctgaaaagttaatgtgtccacaagaaattgtagattacattgcagataagaaagatgtatatgaataaagtatcagaccctttggctttgctgagagaggactcagatgatagtgacgaatgtctggcagtgaggacacattttggcattcttgctgactctgacagagtgattctgatggacttgtatttaaattgtatgtgttttactctttgaaaataaatctataaaaccaa

SEQ ID NO: 4447 - protein, 156 aa, Homo sapiens
MASRVLSAYVSRLPAAFAPLPRVRMLAVARPLSTALCSAGTQTRLGTLQPALVLAQVPGRVTQLCRQYSDMPPLTLEGIQDRVLYVLKLYDKIDPEKLSVNSHFMKDLGLDSLDQVEIIMAMEDEFGFEIPDIDAEKLMCPQEIVDYIADKKDVYE

SEQ ID NO: 4448 - DNA, 1492 bp, Homo sapiens
gtttttccatgttgcccaggctggtctcaaactcctgggctcaagcaatccttctgtctcagcctccccaagtactgggattacaggcatgtcccaccatgcccagactaatatttacttttaatcagactaagatagggttactacttgagttgctatggctccagctgaaagcctgtgcagtcatatcatgggtaaacatttgctttatgctaaaaatatggtggacctggcattacagctattacaaatctcctaaggtgtctcaggtagtgtattagttacttttcatactgctatgaagaaatactcgagactgggtaatttataaaggaaaagaggtttaatgtactcacagttccacaaggctggggaggcctcagaatcatggtggaaggcaaagaaggagcaaaggtacgtcttacatggctgcaggaaagagagcacgtgcagggaaactgccctttataaaaccatcagatttagtgagatgtattcactatcacaagaacagtatgggaaaaacctgcccccatgatttgattacctcctaccaggtccctcccacgacacatggggattatgggaactacaattcaagatgaaatttgggtggggacgcagccaaaccatatcgggtagcaacaacctagggtcagttttgcaggtggtaaagccatttaccaagatagttgtaggtaaagaagggcagatttattagagaaattatgaaaatatgttgcagtgggcagctcagcagagaaggggctacctgcaaagaggcaggggctggaggaaagttttatagggtcctgctgaagggtgctacgtgtggaatgaggtcattgtgcccgcaggttgtttgtgattagctgtctctaacaattgttcatacagtaattgttcattattgttctcaacttggggctctccccaacctggggacccttccttattgttgcttacttatcaggactccacataagggtgtggaaacttcattcattcatatcttcaacacaaattgtaggtagcctgttttttaaaaaatttattcaacaaatatttagtccaagccactgttacttattaccctctctacttctgtatggacttttaactatctctgacactattcactattcttccacattctctattatttatacctatggtaaaatttgccagtttgaccatgcaactaatactcacagggaatatatagagtctagaagaaaatatacaggtccttagaggctgctctgccaacaaaaccataatgcaggaacaaacatcacaactatgccaaataatcaatcctacaatgtccaaaattttactttaaaactggaatttccagacttcctttctgcattaaccagtttaactagatagtaatgaaatatccctctactttatgctgtgatagtttatttatttatttgagagtttatttatttattttgagacaacagagcgagactccgtctca

SEQ ID NO: 4449 - DNA, 3027 bp, Homo sapiens
tctctctcggcgtttccgctgtcagggcctgcggtgtgactcgcgggctcagctggtccggccgtagcacctccgcgccgtcgccatgtcgcggtttttcaccaccggttcggacagcgagtccgagtcgtccttgtccggggaggagctcgtcaccaaacctgtcggaggcaactatggcaaacagccattgttgctgagcgaggatgaagaagataccaagagagttgtccgcagtgccaaggacaagaggtttgaggagctgaccaaccttatccggaccatccgtaatgccatgaagattcgtgatgtcaccaagtgcctggaagagtttgagctcctgggaaaagcatatgggaaggccaaaagcattgtggacaaagaaggtgtcccccggttctatatccgcatcctggctgacctagaggactatcttaatgagctttgggaagataaggaagggaagaagaagatgaacaagaacaatgccaaggctctgagcaccttgcgtcagaagatccgaaaatacaaccgtgatttcgagtcccatatcacaagctacaagcagaaccccgagcagtctgcggatgaagatgctgagaaaaatgaggaggattcagaaggctcttcagatgaggatgaggatgaggacggagtcagtgctgcaactttcttgaagaagaaatcagaagctccttctggggagagtcgcaagttcctcaaaaagatggatgatgaagatgaggactcagaagattccgaagatgatgaagactgggacacaggttccacatcttccgattccgactcagaggaggaagaagggaaacaaaccgcgctggcctcaagatttcttaaaaaggcacccaccacagatgaggacaagaaggcagccgagaagaaacgggaggacaaagctaagaagaagcacgacaggaaatccaagcgcctggatgaggaggaggaggacaatgaaggcggggagtgggaaagggtccggggcggagtgccgttggttaaggagaagccaaaaatgtttgccaagggaactgagatcacccatgctgttgttatcaagaaactgaatgagatcctacaggcacgaggcaagaagggaactgatcgtgctgcccagattgagctgctgcaactgctggttcagattgcagcggaaaacaacctgggagagggcgtcattgtcaagatcaagttcaatatcatcgcctctctctatgactacaaccccaacctggcaacctacatgaagccagagatgtgggggaagtgcctggactgcatcaatgagctgatggatatcctgtttgcaaatcccaacatttttgttggagagaatattctggaagagagtgagaacctgcacaacgctgaccagccactgcgtgtccgtggctgcatcctaactctggtggaacgaatggatgaagaatttaccaaaataatgcaaaatactgaccctcactcccaagagtacgtggagcacttgaaggatgaggcccaggtgtgtgccatcatcgagcgtgtgcagcgctacctggaggagaagggcactaccgaggaggtctgccgcatctacctgctgcgcatcctgcacacctactacaagtttgattacaaggcccatcagcgacagctgaccccgcctgagggctcctcaaagtctgagcaagaccaggcagaaaatgagggcgaggactcggctgtgttgatggagagactgtgcaagtacatctacgccaaggaccgcacagaccggatccgcacatgtgccatcctctgccacatctaccaccatgctctgcactcgcgctggtaccaggcccgcgacctcatgctcatgagccacttgcaggacaacattcagcatgcagacccgccagtgcagatcctttacaaccgcaccatggtgcagctgggcatctgtgccttccgccaaggcctgaccaaggacgcacacaacgccctgctggacatccagtcgagtggccgagccaaggagcttctgggccagggcctgctgctgcgcagcctgcaggagcgcaaccaggagcaggagaaggtggagcggcgccgtcaggtccccttccacctgcacatcaacctggagctgctggagtgtgtctacctggtgtctgccatgctcctggagatcccctacatggccgcccatgagagcgatgcccgccgacgcatgatcagcaagcagttccaccaccagctgcgcgtgggcgagcgacagcccctgctgggtccccctgagtccatgcgggaacatgtggtcgctgcctccaaggccatgaagatgggtgactggaagacctgtcacagttttatcatcaatgagaagatgaatgggaaagtgtgggaccttttccccgaggctgacaaagtccgcaccatgctggttaggaagatccaggaagagtcactgaggacctacctcttcacctacagcagtgtctatgactccatcagcatggagacgctgtcagacatgtttgagctggatctgcccactgtgcactccatcatcagcaaaatgatcattaatgaggagctgatggcctccctggaccagccaacacagacagtggtgatgcaccgcactgagcccactgcccagcagaacctggctctgcagctggccgagaagctgggcagcctggtggagaacaacgaacgggtgtttgaccacaagcagggcacctacgggggctacttccgagaccagaaggacggctaccgcaaaaacgagggctacatgcgccgcggtggctaccgccagcagcagtctcagacggcctactgagctctccactctgtttcccgcctgggccatccaaccttgaagtcctaaaccacacctcagtcactaaaggtctgtttaaagttgttctggttgattgcttgttgccacaaaggtgtgttgagcccattcatttgctgattatacttctgagctgctaccacatgacagacacaaggctcagatgaagaggtgaattgaac

SEQ ID NO: 4450 - protein, 913 aa, Homo sapiens
MSRFFTTGSDSESESSLSGEELVTKPVGGNYGKQPLLLSEDEEDTKRVVRSAKDKRFEELTNLIRTIRNAMKIRDVTKCLEEFELLGKAYGKAKSIVDKEGVPRFYIRILADLEDYLNELWEDKEGKKKMNKNNAKALSTLRQKIRKYNRDFESHITSYKQNPEQSADEDAEKNEEDSEGSSDEDEDEDGVSAATFLKKKSEAPSGESRKFLKKMDDEDEDSEDSEDDEDWDTGSTSSDSDSEEEEGKQTALASRFLKKAPTTDEDKKAAEKKREDKAKKKHDRKSKRLDEEEEDNEGGEWERVRGGVPLVKEKPKMFAKGTEITHAVVIKKLNEILQARGKKGTDRAAQIELLQLLVQIAAENNLGEGVIVKIKFNIIASLYDYNPNLATYMKPEMWGKCLDCINELMDILFANPNIFVGENILEESENLHNADQPLRVRGCILTLVERMDEEFTKIMQNTDPHSQEYVEHLKDEAQVCAIIERVQRYLEEKGTTEEVCRIYLLRILHTYYKFDYKAHQRQLTPPEGSSKSEQDQAENEGEDSAVLMERLCKYIYAKDRTDRIRTCAILCHIYHHALHSRWYQARDLMLMSHLQDNIQHADPPVQILYNRTMVQLGICAFRQGLTKDAHNALLDIQSSGRAKELLGQGLLLRSLQERNQEQEKVERRRQVPFHLHINLELLECVYLVSAMLLEIPYMAAHESDARRRMISKQFHHQLRVGERQPLLGPPESMREHVVAASKAMKMGDWKTCHSFIINEKMNGKVWDLFPEADKVRTMLVRKIQEESLRTYLFTYSSVYDSISMETLSDMFELDLPTVHSIISKMIINEELMASLDQPTQTVVMHRTEPTAQQNLALQLAEKLGSLVENNERVFDHKQGTYGGYFRDQKDGYRKNEGYMRRGGYRQQQSQTAY

SEQ ID NO: 4451 - DNA, 2253 bp, Homo sapiens
gtgcatgccgtgggtctgacggcttgagtagcgctagggagaatccctgcaggtaatatttgacttttgcttcatattaatctgagtggaaaataaaagggccctcttctcctctcgcttccctgccgggcaggcgccatggcggaagcctcggcgacgggcgcctgcggagaggcgatggcagcggcggaaggctcctcgggcccggcgggcttgactctgggccggagcttctcgaactaccggcccttcgagccccaggcgttgggcctcagcccgagctggcggctgacgggcttctccggcatgaagggctgaggctgcaaggtcccgcaggaggcgctgctcaaactcctggcgggactgacgcggccggacgtgcggcccccgctgggccggggcctggtgggtggccaggaagaggcgtcccaggaagccggcctgccggcaggagcgggccccagccccacctttccagccctgggcatcgggatggactcctgcgtcatccccctgaggcacgggggcctgtcactggtgcagaccacggacttcttttaccccttggtagaagatccctacatgatggggcgcatagcttgtgccaacgtgctgagtgacctctacgccatggggattactgagtgtgacaacatgttgatgttactcagcgtcagccagagtatgagtgaggaggaacgcgaaaaggtaacgccactcatggtcaaaggctttcgggatgcggctgaggaaggagggacggcagtgaccggtgggcaaacggtggtcaacccttggattataatcggtggagttgccactgtagtatgccaaccaaatgagttcataatgccggacagcgccgtcgttggggacgtgctggtgttaaccaaaccgttaggaacccaggttgctgtcaatgcccaccaatggctggataatcctgaaagatggaataaagtaaagatggtggtctccagagaagaggtggagctggcctatcaggaagccatgttcaatatggctaccctcaacagaactgctgcaggtttaatgcacacatttaatgcccatgcggccacagatatcacaggctttggcattctaggacactcccagaaccttgcaaaacaacaaagaaatgaagtgtcctttgttattcataatctgccaataattgccaagatggctgccgtcagcaaggccagtggacggtttgggcttcttcaaggaacctcagctgaaacctctgggggattactgatttgtctgccaagagaacaggcggctcgcttttgttctgaaatcaaatcctccaagtacggagagggtcaccaagcgtggatcgttggcattgtggaaaagggaaaccgaacggcccggatcattgacaagccgcgagttattgaagtcctgcctcgtggggccacagctgctgttcttgctcctgacagttcaaatgcctcctctgagcctagctcgtgagatgaaagaacagaagttgtttggaccttagagccattgtccacaatcacggatggttctcaagagttgattgtaagaaatttccaaagaaggctgcctgcatagtggttccggctgccctttctaggtgattggaatcagcccatctaaagcagtctttatatgcattccgaggccagagtaacattttgaactttggggggatatttgttcatcacttgggtagaagaggagcaaaaatacttctgttttctcttgccaaagtaagatgaagctattccaggttgagggatttttctttgcacggggttgattaatttctgcacagggagtgagattattaaagtaacacacacacaaagtaaattgcaaaatgaaaaaaattagaagcaaatgagttttggaccaatattgttgataaatctaaattgttaagagagatcttataatgcaacatcaaattctttattcaattttactgaagtactggctctttcctgctctggacaagaattgagcaacttgtctgatgactgggaaaggaggacctgcaaccatctgacttggtctctgttaatgacgtctctccctctaaaccccattaaggactgggagaggcagagcaagcctcagagcccaggcctcagtggtcattaagatgttaagtcttttgcggcagattcctggtgatttgatcaataaagagtaatttcttgctaaataaataaaagaaaccttgttgaaaaactaaaaaaaaaaaaaaaaaaa

SEQ ID NO: 4452 - protein, 448 aa, Homo sapiens
GGSLGDGRLRRGDGSGGRLLGPGGLDSGPELLELPALRAPGVGPQPELAADGLLRHEGLRGCKVPQEALLKLLAGLTRPDVRPPLGRGLVGGQEEASQEAGLPAGAGPSPTFPALGIGMDSCVIPLRHGGLSLVQTTDFFYPLVEDPYMMGRIACANVLSDLYAMGITECDNMLMLLSVSQSMSEEEREKVTPLMVKGFRDAAEEGGTAVTGGQTVVNPWIIIGGVATVVCQPNEFIMPDSAVVGDVLVLTKPLGTQVAVNAHQWLDNPERWNKVKMVVSREEVELAYQEAMFNMATLNRTAAGLMHTFNAHAATDITGFGILGHSQNLAKQQRNEVSFVIHNLPIIAKMAAVSKASGRFGLLQGTSAETSGGLLICLPREQAARFCSEIKSSKYGEGHQAWIVGIVEKGNRTARIIDKPRVIEVLPRGATAAVLAPDSSNASSEPSS

SEQ ID NO: 4453 - DNA, 5120 bp, Homo sapiens
cctctttcaccctgtctaggttgccagcaaatcccacgggcctcctgacgctgcccctggggccacaggtccctcgagtgctggaaggatgaaggattcctgcatcactgtgatggccatggcgctgctgtctgggttctttttcttcgcgccggcctcgagctacaacctggacgtgcggggcgcgcggagcttctccccaccgcgcgccgggaggcactttggataccgcgtcctgcaggtcggaaacggggtcatcgtgggagctccaggggaggggaacagcacaggaagcctctatcagtgccagtcgggcacaggacactgcctgccagtcaccctgagaggttccaactatacctccaagtacttgggaatgaccttggcaacagaccccacagatggaagcattttggcctgtgaccctgggctgtctcgaacgtgtgaccagaacacctatctgagtggcctgtgttacctcttccgccagaatctgcagggtcccatgctgcaggggcgccctggttttcaggaatgtatcaagggcaacgtagacctggtatttctgtttgatggttcgatgagcttgcagccagatgaatttcagaaaattctggacttcatgaaggatgtgatgaagaaactcagcaacacttcgtaccagtttgctgctgttcagttttccacaagctacaaaacagaatttgatttctcagattatgttaaatggaaggaccctgatgctctgctgaagcatgtaaagcacatgttgctgttgaccaatacctttggtgccatcaattatgtcgcgacagaggtgttccgggaggagctgggggcccggccagatgccaccaaagtgcttatcatcatcacggatggggaggccactgacagtggcaacatcgatgcggccaaagacatcatccgctacatcatcgggattggaaagcattttcagaccaaggagagtcaggagaccctccacaaatttgcatcaaaacccgcgagcgagtttgtgaaaattctggacacatttgagaagctgaaagatctattcactgagctgcagaagaagatctatgtcattgagggcacaagcaaacaggacctgacttccttcaacatggagctgtcctccagcggcatcagtgctgacctcagcaggggccatgcagtcgtgggggcagtaggagccaaggactgggctgggggctttcttgacctgaaggcagacctgcaggatgacacatttattgggaatgaaccattgacaccagaagtgagagcaggctatttgggttacaccgtgacctggctgccctcccggcaaaagacttcgttgctggcctcgggagcccctcgataccagcacatgggccgagtgctgctgttccaagagccacagggcggaggacactggagccaggtccagacaatccatgggacccagattggctcttatttcggtggggagctgtgtggcgtcgacgtggaccaagatggggagacagagctgctgctgattggtgccccactgttctatggggagcagagaggaggccgggtgtttatctaccagagaagacagttggggtttgaagaagtctcagagctgcagggggaccccggctacccactcgggcggtttggagaagccatcactgctctgacagacatcaacggcgatgggctggtagacgtggctgtgggggcccctctggaggagcagggggctgtgtacatcttcaatgggaggcacggggggcttagtccccagccaagtcagcggatagaagggacccaagtgctctcaggaattcagtggtttggacgctccatccatggggtgaaggaccttgaaggggatggcttggcagatgtggctgtgggggctgagagccagatgatcgtgctgagctcccggcccgtggtggatatggtcaccctgatgtccttctctccagctgagatcccagtgcatgaagtggagtgctcctattcaaccagtaacaagatgaaagaaggagttaatatcacaatctgtttccagatcaagtctctcatcccccagttccaaggccgcctggttgccaatctcacttacactctgcagctggatggccaccggaccagaagacgggggttgttcccaggagggagacatgaactcagaaggaatatagctgtcaccaccagcatgtcatgcactgacttctcatttcatttcccggtatgtgttcaagacctcatctcccccatcaatgtttccctgaatttctctctttgggaggaggaagggacaccgagggaccaaagggcgcagggcaaggacataccgcccatcctgagaccctccctgcactcggaaacctgggagatcccttttgagaagaactgtggggaggacaagaagtgtgaggcaaacttgagagtgtccttctctcctgcaagatccagagccctgcgtctaactgcttttgccagcctctctgtggagctgagcctgagtaacttggaagaagatgcttactgggtccagctggacctgcacttccccccgggactctccttccgcaaggtggagatgctgaagccccatagccagatacctgtgagctgcgaggagcttcctgaagagtccaggcttctgtccagggcattatcttgcaatgtgagctctcccatcttcaaagcaggccactcggttgctctgcagatgatgtttaatacactggtaaacagctcctggggggactcggttgaattgcacgccaatgtgacctgtaacaatgaggactcagacctcctggaggacaactcagccactaccatcatccccatcctgtaccccatcaacatcctcatccaggaccaagaagactccacactctatgtcagtttcacccccaaaggccccaagatccaccaagtcaagcacatgtaccaggtgaggatccagccttccatccacgaccacaacatacccaccctggaggctgtggttggggtgccacagcctcccagcgaggggcccatcacacaccagtggagcgtgcagatggagcctcccgtgccctgccactatgaggatctggagaggctcccggatgcagctgagccttgtctccccggagccctgttccgctgccctgttgtcttcaggcaggagatcctcgtccaagtgatcgggactctggagctggtgggagagatcgaggcctcttccatgttcagcctctgcagctccctctccatctccttcaacagcagcaagcatttccacctctatggcagcaacgcctccctggcccaggttgtcatgaaggttgacgtggtgtatgagaagcagatgctctacctctacgtgctgagcggcatcggggggctgctgctgctgctgctcattttcatagtgctgtacaaggttggtttcttcaaacggaacctgaaggagaagatggaggctggcagaggtgtcccgaatggaatccctgcagaagactctgagcagctggcatctgggcaagaggctggggatcccggctgcctgaagcccctccatgagaaggactctgagagtggtggtggcaaggactgagtccaggcctgtgaggtgcagagtgcccagaactggactcaggatgcccagggccactctgcctctgcctgcattctgccgtgtgccctcgggcgagtcactgcctctccctggccctcagtttccctatctcgaacatggaactcattcctgcctgtctcctttgcaggctcatagggaagacctgctgagggaccagccaagagggctgcaaaagtgagggcttgtcattaccagacggttcaccagcctctcttggtttccttccttggaagagaatgtctgatctaaatgtggagaaactgtagtctcaggacctagggatgttctggccctcacccctgccctgggatgtccacagatgcctccaccccccagaacctgtccttgcacactcccctgcactggagtccagtctcttctgctggcagaaagcaaatgtgacctgtgtcactacgtgactgtggcacacgccttgttcttggccaaagaccaaattccttggcatgccttccagcaccctgcaaaatgagaccctcgtggccttccccagcctcttctagagccgtgatgcctccctgttgaagctctggtgacaccagcctttctcccaggccaggctccttcctgtcttcctgcattcacccagacagctccctctgcctgaaccttccatctcgccacccctccttccttgaccagcagatcccagctcacgtcacacttggttgggtcctcacatctttcacacttccaccagcctgcactactccctcaaagcacacgtcatgtttcttcatccggcagcctggatgttttttccctgtttaatgattgacgtacttagcagctatctctcagtgaactgtgagggtaaaggctatacttgtcttgttcaccttgggatgatgcctcatgatatgtcagggcgtgggacatctagtaggtgcttgacataatttcactgaattaatgacagagccagtgggaagatacagaaaaagaggggctgggctgggcgcggtggttcacgcctgtaatcccagcactttgggaggccaaggagggtggatcacctgaggtcaggagttagaggccagcctggcgaaaccccatctctactaaaaatacaaaatccaggcgtggtggcacacacctgtagtcccagctactcaggaggttgaggtaggagaattgcttgaacctgggaggtggaggttgcagtgagccaagattgcgccattgcactccagcctgggcaacacagcgagactccgtctcaaggaaaaaataaaaataaaaagcgggcacgggcccgtgacatccccacccttggaggctgtcttctcaggctctgccctgccctagctccacaccctctcccaggacccatcacgcctgtgcagtggcccccacagaaagactgagctcaaggtgggaaccacgtctgctaacttggagccccagtgccaagcacagtgcctgcatgtatttatccaataaatgtgaaattctgtcc

SEQ ID NO: 4454 - DNA, 2324 bp, Homo sapiens
cgcgctggagaggcgcggggtcaagacgtccggcctcgggggcccgggctgggccgccgagtcccctgggcggcgctgagcgggcgggaggcgggggcccgcggctcggggcaaccgaggccgggtcgcgggatcggccgccatcgccgccgccgctgcactgggagcccgcggggatggagcgggaggcgttgccgtggggcctcgagccccaggatgtgcagagttctgacgaaatgaggagccccgaagggtacctcagaggcaacatgagtgagaatgaggaagaggaaatttctcagcaagaaggcagtggggactatgaagtcgaagagataccatttgggcttgaaccccagagccctgggtttgagccacaaagcccagagtttgaaccccaaagccccagatttgagcctgaaagcccggggtttgagtcccgaagccctgggcttgtgcccccaagccctgagtttgcacccagaagccctgaatcagattctcagagccctgagtttgaatcccagagccctaggtatgaaccccaaagccctggctatgaacctcggagccccgggtatgaaccccggagccctggctatgaatctgagagctctagatatgaatcccagaacactgagctcaaaacccaaagcccagaatttgaagctcaaagttccaaattccaggaaggtgcggagatgcttctgaaccccgacgaaaagagtcctttgaatatctccgtaggagttcaccccctggactccttcactcaggggtttggggagcagcccacaggggacctgcccatagggccaccttttgagatgcccacaggggccctgctgtctacaccgcagtttgagatgcttcagaatcccctgggtctcacaggagcccttcgaggtccaggtcggcggggtggccgggccaggggtgggcagggccctcggcctaacatctgcggcatctgcgggaagagcttcgggcggggctccaccctgatccagcaccagcgcatccacaccggtgagaagccctacaaatgtgaggtctgcagcaaggccttctcccagagctctgacctcatcaaacaccagcgcacccacactggcgagcggccctacaaatgtccccgttgcggcaaggccttcgccgacagctcttacctgcttcgccaccagcgcactcactctggccagaagccctacaagtgcccacattgtggcaaggccttcggcgacagctcctacctcctgcgacaccagcgcacccacagccacgagcggccctacagctgcaccgagtgcggcaagtgctatagccagaactcgtccctgcgcagccatcagagggtgcacaccggtcagaggcccttcagctgtggcatctgcggcaagagcttctcccagcggtcggcccttatcccccatgcccgcagccacgcccgggagaagcccttcaagtgccctgagtgcggcaagcgctttggccagagctcggtgctggccatccacgcccgcacccacctgccaggccgcacctacagctgccccgactgcggcaagaccttcaatcgctcctccactctcatccagcaccagcgctcccacacgggcgagcggccctacaggtgcgccgtgtgcggcaagggcttctgccgctcctccacgcttctgcagcatcaccgggtccacagtggcgagcggccttacaagtgcgatgactgcggaaaggccttctcccagagctccgacctcatccgccaccagcggacccacgcggcgggccggcgctgacctggggccccagcaggggtgggaggtgtgggcagaagataaggggccagggagctagaggaacctttagggaggatagtggagaagccgcaggagaatggaggagctgaggatgctggaagaagagaaccagggtggaggaagtgacatgccctggagacttgtgggaagtgggttggagggaggccaggccggcagcgggaggccctgggagaaatggagagaggtcagcggagggctggcctcagccgcggctccttggtgggtgcctggcttggcaactgctagagcagggaggggggagggcaggggattacctaattagagtgggttagcttagattggtagctgctgaaactctcgttgagtcaggagcgggtaaaaggtaggtggggtggggagtggggccccggggtggggcctgggcctctgcgtgcaaaccccagcctccctcttcttcctcaggctttggagcccctgagtttgagttcaataaaaactttatgtggtaaaaaaaaaaaaaaa

SEQ ID NO: 4455 - protein, 520 aa, Homo sapiens
MRSPEGYLRGNMSENEEEEISQQEGSGDYEVEEIPFGLEPQSPGFEPQSPEFEPQSPRFEPESPGFESRSPGLVPPSPEFAPRSPESDSQSPEFESQSPRYEPQSPGYEPRSPGYEPRSPGYESESSRYESQNTELKTQSPEFEAQSSKFQEGAEMLLNPDEKSPLNISVGVHPLDSFTQGFGEQPTGDLPIGPPFEMPTGALLSTPQFEMLQNPLGLTGALRGPGRRGGRARGGQGPRPNICGICGKSFGRGSTLIQHQRIHTGEKPYKCEVCSKAFSQSSDLIKHQRTHTGERPYKCPRCGKAFADSSYLLRHQRTHSGQKPYKCPHCGKAFGDSSYLLRHQRTHSHERPYSCTECGKCYSQNSSLRSHQRVHTGQRPFSCGICGKSFSQRSALIPHARSHAREKPFKCPECGKRFGQSSVLAIHARTHLPGRTYSCPDCGKTFNRSSTLIQHQRSHTGERPYRCAVCGKGFCRSSTLLQHHRVHSGERPYKCDDCGKAFSQSSDLIRHQRTHAAGRR

SEQ ID NO: 4456 - DNA, 2768 bp, Homo sapiens
ggcacgaggctttctcgggcgcaggaggttccgcaggcccaggccaggccaggggaggcagccgatccgtcgtcggggttgacagttaccatggcgccgcctctggccccgctccctccccgggacccaaacggggccggacccgagtggagggagccgggggctgtgagcttcgcggacgtggccgtgtacttctgccgggaggagtggggctgcttgcggccagcgcagagggccctgtaccgggacgtgatgcgggagacctacggccacctgagcgctctcggaatcggaggcaacaagccagctctcatctcctgggtggaggaggaggccgaactgtggggtccggctgcccaggatccggaggtggcgaaatgtcagacacaaacggacccagcagattccagaaacaagaaaaaggaaagacaaagggaagggacgggagccctggagaagcccgaccctgtggccgccgggtctcctgggctgaagtctccccaagccccctcggccgggcccccttatggttgggagcagctgtccaaggcaccgcaccggggacgcccctccctctgtgcccacccccctgtcccccgagctgaccagcgtcatggctgctacgtgtgcgggaagagctttgcctggcgctccacactggtggagcacgtctacagtcacactggcgagaagcccttccactgcactgactgcggcaagggcttcggccacgcttcctccctgagcaaacaccgggccatccatcgtggggagcggccccaccgctgtctggagtgtggccgggccttcacgcagcgctcggcgctgacttcgcacctgcgcgtccacaccggcgagaaaccctatggctgcgccgactgtggccgccgcttcagccagagctctgccctctaccagcaccggcgcgtgcacagcggcgagacccccttcccctgcccggactgtggccgcgccttcgcctacccctcggacctgcggcgccacgtgcgcacccacaccggcgagaagccctacccgtgcccggactgcgggcgctgcttccgccagagctcggagatggcagtccacaggcgcacccacagcggcgagaagccctacccctgcccgcagtgcggccgccgctttggccagaagtcagccgtggccaaacaccagtgggttcatcggcccggggccgggggccacaggggccgggtcgccgggcgtctgtctgtgaccctgacccctggccacggagacctggacccgcccgtgggcttccagctgtacccggagatattccaggagtgtgggtgacggccttaaaagtgactatctagacattacgggaggcccgagatgggctcaggggcccgaacctctgcggcggcctgcagggaggtcccagaatctagggcaagagctggccctggggtgcggacagtctgatcttgggcccttagcagcctcctctgccagcaccttgctccccactgcccagggctctccaaggccccctctactgaggcagggctgagttgagaacccccagacctacataaggggaaccaaaagctgtttctcagcccagaggtgctaagaggactgaggtagaggagaaccttgttttacccattgtctttttaaattttttatcattatttttattcttgtgaccctcccagaacacaatactcattgtctttttatttatttatttatttatttctgagacagcttcctgctctgtcacccaggctggagtgcagtggtgtgaacagggctaactgcagcctcaacctgcagtgctcaaggaatcctctcccatcagccttccaaatatctgagactacaggcgggcaacactacggccagctaatttttaaattttacatagagatgaggttctcactgttgtccaggctggtctcaaactccttggctgaagtgatcctgtcgtctcggcttccgcaagtgctgggattacaggcgtgagctaccaccatgcctggcttccattgtctttgtgtgtgtgtgtgtgtgatggggttttgctcttgttgcccaggctggagtgcaatagcgcaatctcagctcactgcaacctctgcctccagagttcaagcaattctccttcctcagcctcccaagtagctgggactacaggcacccaccacctccattgtctttttactgcccaagttaaaatcctgtgactgtgtactggatctggcctgcggttgtcatatttattgatctgagtccaggcagtgtttttaagtgatatgagttagtagtgaaaattgaaaaggatattttacaaccaaatacaggttttctggtgtcttttgaaaaatccaaagatttggcaactcgacctaggctccgacaaaaccacagttgttgggagctgagccggagccagaactcacaattcaccgtggcccggccacccatccccaccactcccgtgggctcctgaccaagcaccacgtgccattcatcatggcttgcttttagtgtttttggtgtttatcttaaagtacagcgaagaagaaagggaagtatttcttagacccatgtctctgtccaaataggcctttccatctggcatttcccgctcatttatatgacttgctgagttcctatggtcatttgagtttgcaaacagtggtctgtagcactcaggttttctggagttggagagaaagggtggcaagagagaagtaaaagttggttttattttaaaaaaaaaaaaaaaaaaaaaa

SEQ ID NO: 4457 - protein, 408 aa, Homo sapiens
MAPPLAPLPPRDPNGAGPEWREPGAVSFADVAVYFCREEWGCLRPAQRALYRDVMRETYGHLSALGIGGNKPALISWVEEEAELWGPAAQDPEVAKCQTQTDPADSRNKKKERQREGTGALEKPDPVAAGSPGLKSPQAPSAGPPYGWEQLSKAPHRGRPSLCAHPPVPRADQRHGCYVCGKSFAWRSTLVEHVYSHTGEKPFHCTDCGKGFGHASSLSKHRAIHRGERPHRCLECGRAFTQRSALTSHLRVHTGEKPYGCADCGRRFSQSSALYQHRRVHSGETPFPCPDCGRAFAYPSDLRRHVRTHTGEKPYPCPDCGRCFRQSSEMAVHRRTHSGEKPYPCPQCGRRFGQKSAVAKHQWVHRPGAGGHRGRVAGRLSVTLTPGHGDLDPPVGFQLYPEIFQECG

SEQ ID NO: 4458 - DNA, 2063 bp, Homo sapiens
ctggggatctacgctgagttcggagatgctccagctcgggccgcccctgtctgagcggagctttgcggcgctgaagcttacaggggaaggaaaagcctcgcccggcgtctgattggcggaaccgcgctgccgcagcctgggattccccagggacccccccggagccgccgcgtctcccatggacttgcccggggactccagcccgcctggccagccgcgtctgtgccgccagcctctgactcgagcattatggggagccaggagcccgaaacggccgaggctgcagctcccgggggccccttctcccctggaaaaggcctctcggcgggtcctggccgtggtgctagaagatgtcatggctgttcacatggtccccgtggtgccctcaaagcagacctccataccacagcaccacagctaccatcaggatcctgtccacaggcagccgcctgcctcgccaccccggcaggccgggtggtcctcgcaggccaggcctcccgaccctctgtgtttgtgtcgcgagcccttgagccgcatccaccggacctcttccaccctgaggcggcgatcaaggacaacccctggcccagaggagggcccttcacaaaaggtggaccgggccccccagcccaccctggtggtgatgctggaagacatcgccagtcctagaccccccgctgagggcttcattgatgagacccccaacttcatcatcccagcacaaagagctgagcccatgaggatagttcgccagccaacgcctccacctggggacctagaacccccattccagccatctgctctgcctgcagaccctctggagagcccaccaacagccccagatcctgctctggagctcccatccaccccaccaccgtccagccttttacgcccccgcctcagtccctggggcttggccccgctcttccgttccgtccgctccaagctggagagctttgctgacatcttcctcacgcccaacaaaaccccacagcccccacccccgtcccccccaatgaagctggagttgaagatcgccatctcagaggccgagcagtctggggctgctgagggcactgcgtctgtcagcccccggcccccaatccgccagtggcgaactcaggaccacaataccccagcacttctccctaagccctctctgggccgaagctactcctgccctgatctggggccccctggcccaggtacctgcacctggccacctgctccaccccaaccaagccgaccacggccgcggcggcacactgtgggtggtggggaaatggcccgagccccgccaccccctcggccctgtctccggaaagaggtcttccctctcggaggagtgggagcctccccttctctcaccacatcttgctcgtccacggcatccacttccttctccgaaccagcagaacccaggttgggttcaaccaaagggaaggagccaagagcctcaaaggaccaggtgctttcagaacctgagaccaagaccatgggaaaggtttctcgattcagaatacgcagaacaccagcccgtcctcagctaaaccttacaccaatgggactgcctcgaccaatcaggttgaacaagaaggagttcagcttggaagaaatttacaccaacaagaattaccaatcacccacaaccaggaggacctttgagaccatctttgaggaaccccgggagcgcaatgggactctgattttcaccagctcaaggaagctccggcgggctgtggaatttcgggacagcagccttcctcgatcacgaagaccgtcccgtggggtccgggctgcagggggcaggactgttcctcccaatgtggcccccagccctgatgtgggccccctgctccagcagcggctggaggagctagatgccttgctcctggaggaagaaacagtagatcgggagcagccccactggacctaggtgccccatctgttggtcatccatcctgaagggacaggaaacctcccaggcagttattttttttttctctatatttctagtaaagttttcgatatgtttctgaaaaaaaaaaaaaaaaaaaaaaaaa

SEQ ID NO: 4459 - protein, 585 aa, Homo sapiens
MDLPGDSSPPGQPRLCRQPLTRALWGARSPKRPRLQLPGAPSPLEKASRRVLAVVLEDVMAVHMVPVVPSKQTSIPQHHSYHQDPVHRQPPASPPRQAGWSSQARPPDPLCLCREPLSRIHRTSSTLRRRSRTTPGPEEGPSQKVDRAPQPTLVVMLEDIASPRPPAEGFIDETPNFIIPAQRAEPMRIVRQPTPPPGDLEPPFQPSALPADPLESPPTAPDPALELPSTPPPSSLLRPRLSPWGLAPLFRSVRSKLESFADIFLTPNKTPQPPPPSPPMKLELKIAISEAEQSGAAEGTASVSPRPPIRQWRTQDHNTPALLPKPSLGRSYSCPDLGPPGPGTCTWPPAPPQPSRPRPRRHTVGGGEMARAPPPPRPCLRKEVFPLGGVGASPSLTTSCSSTASTSFSEPAEPRLGSTKGKEPRASKDQVLSEPETKTMGKVSRFRIRRTPARPQLNLTPMGLPRPIRLNKKEFSLEEIYTNKNYQSPTTRRTFETIFEEPRERNGTLIFTSSRKLRRAVEFRDSSLPRSRRPSRGVRAAGGRTVPPNVAPSPDVGPLLQQRLEELDALLLEEETVDREQPHWT

SEQ ID NO: 4460 - DNA, 4199 bp, Homo sapiens
gctaggctgaccctcctgcaggtgacggaagtaccgcctcctcccgtttgacgcccctcaggggaccctgcatcgctccagccgccgcggccatgtctgggccaggcaacaaacgcgccgccggcgacgggggctcagggcccccggaaaagaagctgagtcgtgaggagaagaccaccacgactcttatcgagcccattcgtcttggaggcatctcttccacggaggagatggacctgaaggtactacagttcaagaacaagaaactggcagagcggctggaacaacggcaggcttgtgaagatgaactccgagaacgaattgagaagttggagaagcggcaggccacagatgatgccacactcctcatcgtcaatcgctactgggcccagctggatgaaactgtggaagcccttctccgatgccatgagagccagggggagctgtcttcagcgcctgaggcacctgggacccaggaggggccaacatgtgatgggactcctctcccagagccggggacatcagagctgagagaccccttgctgatgcagctgcggccccctctcagtgagccggccttggcttttgtggtggcactgggtgccagcagcagtgaggaggtggagctggagctgcaaggccgaatggagttctccaaggcagctgtgtctcgtgtggtagaggcctcagaccgcctacagcgccgggtggaggaactctgtcagcgagtgtacagccgaggggacagtgagcccctcagtgaggcggctcaggcacacacccgagagctgggccgtgagaaccggcgactgcaggacttggccactcagctgcaggagaaacaccaccgcatctcattggagtactccgagctccaggataaagtgacatcggcagagaccaaggtgctggagatggagacaacagtggaggacttgcagtgggacatcgagaagctgcggaagcgagagcaaaagctcaataagcacctggcagaggccttagagcagcttaactctggctactatgtatctgggagctcctcaggcttccaggggggccagatcacactcagcatgcagaagtttgagatgctgaatgcagagttagaggaaaaccaggaactggccaacagccgtatggcagagctggagaaactgcaggccgaacttcagggggctgtgcggaccaatgagcgcctcaaggtggccctgcggagccttcctgaggaggtagtgcgggagacgggggagtaccgcatgctgcaggcccaattctcactgctctacaacgagtctctgcaagtgaagacccagctagacgaggctcggggcctgctgctggccacaaagaactcccacctgcgacacatcgagcacatggagagcgacgagctggggctgcagaagaagctacgcacagaggtcattcagctggaggacacgctggcccaggtacgcaaggagtatgagatgctgcgcatcgagtttgagcagaatctggcggccaacgagcaggcggggcccatcaaccgtgagatgcgccacctgattagtagtcttcaaaaccacaaccaccagctaaaaggggacgcccagcgatacaagcggaagcttcgagaagtacaagctgagattggcaagctccgggcccaggccagtggctctgcccactccacccccaacctgggccacccagaggattctggcgtcagtgccccagccccagggaaagaggagggtgggccaggccctgtcagtacccccgacaacagaaaggagatggctccagtgcctggcaccaccactactaccacttcagtgaagaaggaggagctggtcccctctgaagaggacttccagggtataacccctggggcccagggcccttcctcccggggccgagaacctgaggccaggcccaagcgggagcttcaggaacgggaaggtcccagcctaggacctccacctgtagcctccgctctctcaagggctgatcgggagaaggccaaggtggaagaaaccaagcggaaggaatcagaactcctcaagggtctccgagcagagctcaagaaggcccaggagagccagaaggagatgaaactgctgctggatatgtacaagtcagcgcccaaggagcagcgggataaggtgcagctcatggcagcggaacgcaaggctaaggccgaggttgatgagctgcggagccgcatccgggaattggaggagagggatcgaagggagagcaagaagatcgcggatgaggatgccctgcggcgcattcggcaggcagaggagcagatagaacacctgcagcgcaagctgggtgccaccaagcaggaggaggaggctctgctctcagagatggatgtgacaggtcaggcttttgaggacatgcaggaacagaacgggcggctgctacagcagttgcgggaaaaggatgatgccaactttaagctaatgtcagagcggatcaaggccaaccagattcacaagctgctgcgggaggagaaggatgagttgggcgagcaggtccttggcctcaagtcccaggtggatgcccagctgctgactgtgcagaagctagaggagaaggagcgagccttgcagggcagcctcgggggtgtggagaaggagctgacgctgcgcagccaagccctggagctcaacaagcggaaggctgtagaagccgcccagctggccgaggacctgaaggtgcagctggagcacgtgcagactcggctgcgggagatccagccctgcctggcagagagccgggctgctcgtgagaaagagagcttcaacctcaagagggctcaggaggacatctcacggctgcggcgcaagctggaaaagcagaggaaggtggaggtctacgcagatgccgacgaaatcctccaggaggagatcaaggagtacaaggcgcggttgacctgcccctgctgtaacacccgcaagaaggatgcagtccttaccaagtgcttccacgttttctgcttcgagtgcgtgcggggccgctatgaggcccgccagaggaagtgccccaagtgcaacgcggcctttggtgcccacgacttccatcgtatctacatcagctgaacctgaaactcaggggactctggaacaccatggaccctgggggctgtgcccccatctcctccccaccccaggtctagtggccccaccctccattccggaccccatgggcccagcccctgcccatctagttggtttggggaccctggtgcatgctagtgggcatgggatcagccaagcttcgttccatcttttcctaaaggtcagagctgcagcctagggggcactgccctacagaaaaggtctgcctgagaggcctgaggagcccagagcacttgactgagcttcccggaaactggccctaacctgtctgtctccgtggatgcatcctaaccctaaggaaaattccccaggctgtgatctaccctagagaaggctcgctccctgcctactggctcacaaatgaggaccagtgagccatgtccttgttccttgtttgagactgggctgcaggccccaggaagactttccttcacccaccatccccctaacctcggcagggcttctgtcctgtggagttccctggacaccttggtctggctcttgtgccaagggctgaaggaggtaccctcttggcagatgggggcatcacttgcttcctttgggaagctctaaggttgctgcagtcaccttcctcatcttgcaggtgctgaaccaacatcatcagtttctattctaatcaggccccttcccaatctccatttctctgccaagcccatttacccccacctcatgcatcccaaggctctactgggtccctggacctaaccctgctttcatcctggtggccttaactacagtggaggtggaacttcccaggaggggaagggacagaccagccccagccgctgggccaacttccaatcattccagctagaagagcttccccctgacaccctgtgactgagcctgtgtcctgtctgcctgcccagccatgctccatcggctgtgagggcagtgcccggagaggccagagggttggagctgcagggacccgtttggacccacagcctctgttctagagatgcttgtataggctgttaattgtgatgaataaacgttcaaccctcggcctgcagccagagtagccaggccgcgcacccc

SEQ ID NO: 4461 - DNA, 788 bp, Homo sapiens
catggggtcctgtcccagcaattcgtggagctcatcaacaagtgcaattcaatgcagtccgaataccgggagaagaacgtggagcggattcggaggcagctgaagatcaccaatgctgggatggtgtctgatgaggagttggagcagatgctggacagtgggcaaagcgaggtgtttgtgtccaatatcctgaaggacacgcaggtgactcgacaggccttaaatgagatctcggcccggcacagtgagatccagcagcttgaacgcagtattcgtgagctgcacgacatattcacttttctggctaccgaagtggagatgcagggggagatgatcaatcggattgagaagaacatcctgagctcagcggactacgtggaacgtgggcaggagcacgtcaagacggccctggagaaccagaagaaggcgaggaagaagaaagtcttgattgccatctgtgtgtccatcaccgtcgtcctcctagcagtcatcattggcgtcacagtggttggataatgtcgcacattgttggcactaggagcaccaggaacccagggcctggccttctctcccagcagcctggggggcagggcagagcctccagtcggaccccttcctcacactggcccctatgcagaagggcagacagttcttctggggttggcagctgctcattcatgatggcctcctccttcaggcctcaatgcctgggggaggcctgcactgtcctgattggccgggacacacggttttgtaaaaaattaaaaaacaaaaaaagagcatagaaa

SEQ ID NO: 4462 - DNA, 810 bp, Homo sapiens
ggttttctccgcgggcgcctcgggcggaacctggagataatgggcagcacctgggggagccctggctgggtgcggctcgctctttgcctgacgggcttagtgctctcgctctacgcgctgcacgtgaaggcggcgcgcgcccgggaccgggattaccgcgcgctctgcgacgtgggcaccgccatcagctgttcgcgcgtcttctcctccaggtggggcaggggtttcgggctggtggagcatgtgctgggacaggacagcatcctcaatcaatccaacagcatattcggttgcatcttctacacactacagctattgttaggttgcctgcggacacgctgggcctctgtcctgatgctgctgagctccctggtgtctctcgctggttctgtctacctggcctggatcctgttcttcgtgctctatgatttctgcattgtttgtatcaccacctatgctatcaacgtgagcctgatgtggctcagtttccggaaggtccaagaaccccagggcaaggctaagaggcactgagccctcaacccaagccaggctgacctcatctgctttgctttggcatgtgagccttgcctaagggggcatatctgggtccctagaaggccctagatgtggggcttctagattaccccctcctcctgccatacccgcacatgacaatggaccaaatgtgccacacgctcgctcttttttacacccagtgcctctgactctgtccccatgggctggtctccaaagctctttccattgcccagggagggaaggttctgagcaataaagtttcttagatcaatc

SEQ ID NO: 4463 - DNA, 1829 bp, Homo sapiens
gggcgcaggcggctgggcgcctggcgagtggactgttcgagcccttccgctgggacccgggccctggctccggccccgcgatgggagctgctctccgcgggctgagcctgtcagcatcctcgacgcaccctggtccctgaagtcggagaagagcccctacccacccacacccccttgccccattttgggtcgcctgggtcctcagtcctagcggatcctcagtcctagcggccaccgggtctgaaaggagcaagacgatgatcctggcgtcggtgctgaggagcggtcccgggggcgggcttccgctccggcccctcctgggacccgcactcgcgctccgggcccgctcgacgtcggccaccgacacacaccacgtggagatggctcgggagcgctccaagaccgtcacctccttttacaaccagtcggccatcgacgcggcagcggagaagccctcagtccgcctaacgcccaccatgatgctctacgctggccgctctcaggacggcagccaccttctgaaaagtgctcggtacctgcagcaagaacttccagtgaggattgctcaccgcatcaagggcttccgctgccttcctttcatcattggctgcaaccccaccatactgcacgtgcatgagctatatatccgtgccttccagaagctgacagacttccctccgatcaaggaccaggcggacgaggcccagtactgccagctggtgcgacagctgctggatgaccacaaggatgtggtgaccctcttggcagagggcctacgtgagagccggaagcacatagaggatgaaaagctcgtccgctacttcttggacaagacgctgacttcgaggcttggaatccgcatgttggccacgcatcacctggcgctgcatgaggacaagcctgactttgtcggcatcatctgtactcgtctctcaccaaagaagattattgagaagtgggtggactttgccagacgcctgtgtgagcacaagtatggcaatgcgccccgtgtccgcatcaatggccatgtggctgcccggttccccttcatccctatgccactggactacatcctgccggagctgctcaagaatgccatgagagccacaatggagagtcacctagacactccctacaatgtcccagatgtggtcatcaccatcgccaacaatgatgtcgatctgatcatcaggatctcagaccgtggtggaggaatcgctcacaaagatctggaccgggtcatggactaccacttcactactgctgaggccagcacacaggacccccggatcagccccctctttggccatctggacatgcatagtggcgcccagtcaggacccatgcacggctttggcttcgggttgcccacgtcacgggcctacgcggagtacctcggtgggtctctgcagctgcagtccctgcagggcattggcacggacgtctacctgcggctccgccacatcgatggccgggaggaaagcttccggatctgaccccacagcctttggcctgctcacccgaccagcctgggccgcattccctgcaggacctcccgggtcaggcagggcggccccctgctccacacactgctgcatcttgggtctcagggacccagacagatggacttacatggagctgggcactgccctgcctcaacagggtccattgcctcctcgcctccagaacttggagcagggaagtgggcaccctgaggcctccagcaccagttccgtcattctcgttcctggggaacccccactctgacctgttattaaagttcacattttgaatgccctctcgggccccgtgtgtggggagggcaggtg

SEQ ID NO: 4464 - protein, 412 aa, Homo sapiens
MILASVLRSGPGGGLPLRPLLGPALALRARSTSATDTHHVEMARERSKTVTSFYNQSAIDAAAEKPSVRLTPTMMLYAGRSQDGSHLLKSARYLQQELPVRIAHRIKGFRCLPFIIGCNPTILHVHELYIRAFQKLTDFPPIKDQADEAQYCQLVRQLLDDHKDVVTLLAEGLRESRKHIEDEKLVRYFLDKTLTSRLGIRMLATHHLALHEDKPDFVGIICTRLSPKKIIEKWVDFARRLCEHKYGNAPRVRINGHVAARFPFIPMPLDYILPELLKNAMRATMESHLDTPYNVPDVVITIANNDVDLIIRISDRGGGIAHKDLDRVMDYHFTTAEASTQDPRISPLFGHLDMHSGAQSGPMHGFGFGLPTSRAYAEYLGGSLQLQSLQGIGTDVYLRLRHIDGREESFRI

SEQ ID NO: 4465 - DNA, 1824 bp, Homo sapiens
atgctcagtcctccaggcgtcggtgctcagcggtgttggaacttcgttgcttgcttgcctgtgcgcgcgtgcgcggacatggcctcaaacgattatacccaacaagcaacccaaagctatggggcctaccccacccagcccgggcagggctattcccagcagagcagtcagccctacggacagcagagttacagtggttatagccagtccacggacacttcaggctatggccagagcagctattcttcttatggccagagccagaacacaggctatggaactcagtcaactccccagggatatggctcgactggcggctatggcagtagccagagctcccaatcgtcttacgggcagcagtcctcctaccctggctatggccagcagccagctcccagcagcacctcgggaagttacggtagcagttctcagagcagcagctatgggcagccccagagtgggagctacagccagcagcctagctatggtggacagcagcaaagctatggacagcagcaaagctataatccccctcagggctatggacagcagaaccagtacaacagcagcagtggtggtggaggtggaggtggaggtggaggtaactatggccaagatcaatcctccatgagtagtggtggtggcagtggtggcggttatggcaatcaagaccagagtggtggaggtggcagcggtggctatggacagcaggaccgtggaggccgcggcaggggtggcagtggtggcggcggcggcggcggcggtggtggttacaaccgcagcagtggtggctatgaacccagaggtcgtggaggtggccgtggaggcagaggtggcatgggcggaagtgaccgtggtggcttcaataaatttggtggccctcgggaccaaggatcacgtcatgactccgaacaggataattcagacaacaacaccatctttgtgcaaggcctgggtgagaatgttacaattgagtctgtggctgattacttcaagcagattggtattattaagacaaacaagaaaacgggacagcccatgattaatttgtacacagacagggaaactggcaagctgaagggagaggcaacggtctcttttgatgacccaccttcagctaaagcagctattgactggtttgatggtaaagaattctccggaaatcctatcaaggtctcatttgctactcgccgggcagactttaatcggggtggtggcaatggtcgtggaggccgagggcgaggaggacccatgggccgtggaggctatggaggtggtggcagtggtggtggtggccgaggaggatttcccagtggaggtggtggcggtggaggacagcagcgagctggtgactggaagtgtcctaatcccacctgtgagaatatgaacttctcttggaggaatgaatgcaaccagtgtaaggcccctaaaccagatggcccaggagggggaccaggtggctctcacatggggggtaactacggggatgatcgtcgtggtggcagaggaggctatgatcgaggcggctaccggggccgcggcggggaccgtggaggcttccgagggggccggggtggtggggacagaggtggctttggccctggcaagatggattccaggggtgagcacagacaggatcgcagggagaggccgtattaattagcctggctccccaggttctggaacagctttttgtcctgtacccagtgttaccctcgttattttgtaaccttccaattcctgatcacccaagggttttttttgtgtcggactatgtaattgtaactatacctctggttcccattaaaagtgaccattttagtt

SEQ ID NO: 4466 - protein, 526 aa, Homo sapiens
MASNDYTQQATQSYGAYPTQPGQGYSQQSSQPYGQQSYSGYSQSTDTSGYGQSSYSSYGQSQNTGYGTQSTPQGYGSTGGYGSSQSSQSSYGQQSSYPGYGQQPAPSSTSGSYGSSSQSSSYGQPQSGSYSQQPSYGGQQQSYGQQQSYNPPQGYGQQNQYNSSSGGGGGGGGGGNYGQDQSSMSSGGGSGGGYGNQDQSGGGGSGGYGQQDRGGRGRGGSGGGGGGGGGGYNRSSGGYEPRGRGGGRGGRGGMGGSDRGGFNKFGGPRDQGSRHDSEQDNSDNNTIFVQGLGENVTIESVADYFKQIGIIKTNKKTGQPMINLYTDRETGKLKGEATVSFDDPPSAKAAIDWFDGKEFSGNPIKVSFATRRADFNRGGGNGRGGRGRGGPMGRGGYGGGGSGGGGRGGFPSGGGGGGGQQRAGDWKCPNPTCENMNFSWRNECNQCKAPKPDGPGGGPGGSHMGGNYGDDRRGGRGGYDRGGYRGRGGDRGGFRGGRGGGDRGGFGPGKMDSRGEHRQDRRERPY

SEQ ID NO: 4467 - DNA, 1335 bp, Homo sapiens
atgccaaggtcaggggctcccaaagagcgccctgcggagcctctcacccctcccccatcctatggccaccagccacagacagggtctggggagtcttcaggagcctcgggggacaaggaccacctgtacagcacggtatgcaagcctcggtccccaaagcctgcagccccggcggcccctccattctcctcttccagcggtgtcttgggtaccgggctctgtgagctagatcggttgcttcaggaacttaatgccactcagttcaacatcacagatgaaatcatgtctcagttcccatctagcaaggtggcttcaggagagcagaaggaggaccagtctgaagataagaaaagacccagcctcccttccagcccgtctcctggcctcccaaaggcttctgccacctcagccactctggagctggatagactgatggcctcactctctgacttccgcgttcaaaaccatcttccagcctctgggccaactcagccaccggtggtgagctccacaaatgagggctccccatccccaccagagccgactggcaagggcagcctagacaccatgctggggctgctgcagtccgacctcagccgccggggtgttcccacccaggccaaaggcctctgtggctcctgcaataaacctattgctgggcaagtggtgacggctctgggccgcgcctggcaccccgagcacttcgtttgcggaggctgttccaccgccctgggaggcagcagcttcttcgagaaggatggagcccccttctgccccgagtgctactttgagcgcttctcgccaagatgtggcttctgcaaccagcccatccgacacaagatggtgaccgccttgggcactcactggcacccagagcatttctgctgcgtcagttgcggggagcccttcggagatgagggtttccacgagcgcgagggccgcccctactgccgccgggacttcctgcagctgttcgccccgcgctgccagggctgccagggccccatcctggataactacatctcggcgctcagcgcgctctggcacccggactgtttcgtctgcagggaatgcttcgcgcccttctcgggaggcagctttttcgagcacgagggccgcccgttgtgcgagaaccacttccacgcacgacgcggctcgctgtgcgccacgtgtggcctccctgtgaccggccgctgcgtgtcggccctgggtcgccgcttccacccggaccacttcacatgcaccttctgcctgcgcccgctcaccaaggggtccttccaggagcgcgccggcaagccctactgccagccctgcttcctgaagctcttcggctga

SEQ ID NO: 4468 - DNA, 2760 bp, Homo sapiens
caaaagctcggcatggctgacgacgcgggtttggagaccccgctgtgttccgagcagttcggctccggggaggcacggggctgccgcgccgccgcggacgggagcctgcagtgggaggtcgggggctggcgctggtgggggctctccagggccttcacggtcaaacctgaaggacgagatgcgggcgaagtgggggcttccggggccccctcaccgcccctctccgggctccaggccgtgttcctgcctcagggcttccctgatagcgtcagcccggactacttgccctaccagctgtgggattccgtgcaggcgtttgcttccagcctctccggctccctagccacccaggcagtcttgctgggcataggggtggggaacgcaaaagccactgtttcagctgccacggccacctggctcgtgaaagattcaactggcatgctgggccgcatcgtctttgcctggtggaaagggagcaaactggactgcaatgccaagcagtggaggctttttgcggacatcctcaatgacgtagccatgttccttgagattatggctcctgtatacccaatctgtttcaccatgaccgtctccaccagcaacctagccaagtgcatcgtgagtgttgctggtggggccactcgggctgccctgaccgtgcaccaggctcggaggaacaacatggctgacgtgtcagccaaggacagcagccaggagacgctggtgaacctggcggggctcttggtcagcctcctgatgctccctctggtgtcaggttgccctggcttcagccttggatgtttcttcttcctcactgccctccacatctacgccaactaccgcgcggtccgagccctggtcatggagaccttgaacgaaggccggctccggctggtcctgaagcactaccttcagaggggagaggtactcgacccaactgcagccaatcgcatggagccgctgtggacaggtttctggccagctccgtctctatccctgggggtccccttacaccgcttggtctccagtgtctttgagctgcagcagctggttgaggggcaccaagaatcctacctcctctgctgggaccagtcacaaaaccaggtacaggtagttctgaaccagaaggcaggccccaagaccatcctaagggccgccacacatgggctgatgcttggggccctgcagggagatggaccccttccagcagagctggaggagctgaggaaccgggtgcgggcaggtcctaagaaagagagctgggtcgtcgtcaaggagacacacgaagtgttggacatgctgttcccaaagttcttgaaaggactgcaggatgccggctggaagaccgagaagcaccagctagaggtgggtgagtggagggccacatggcttctgtctcccgaaaagaaggtcttgtgagcagcccagacggaggcccaagcccagggcaggaacctggagcaaggacactttggccacagcaggacaggggaaaggcagctttatttttccttagggcaactgcagcgggtgggccaggccctcatgggaagtgactgccaatcagatgcagtgggccccaggcagaggaaggccgggagaaggggagccaggaccttctcaccccactgccccttccccttttctggggagcaccgcaggctcctcacccccacttcctgtgaggctgtggcttatggtgtccaacgcagttggtcttaggcatagaagccccagaggaacacggccactgccatcatgagcagggcattgaggttgaccacacgggcccagctcgggtcctcgctgatgtcctccagccgcctggctgctgccgctgcctcctcctgggtaaggggcggaggactgcccaccccacctctgctcattccacaaaaccagagcaggcactggcggaagaggcttggtgccggggcctggggctctgagggaaattgaggccctgcagttagtttgcgggaactcagctcctccagccccacctcccagcatggtgccctaccattcatctccatggcactctctgggcacccattctgtacagggagtgaggagccttgctgctcatcagcatccaggtcctcccgttcctccttgctatgccggagactgaagaccaggcggtggagctggggagggtgggagcacgaacgaggtgggagttctgtccccccatgcctggccctaaagtctcttgcacaccagctcgtcactgcctgccctacccacctctgtccagtctacacacccagcccaggcttaactcatgccaactccaccctacatggctgccctgtgccctcgggataaaccccaagcccctgagcttgtgtttaaagccgttggccttgctcccccagctttgtcagctcaggtctgtctacacccagatggtagcgcttgtgacactggcctggcagtcctgctcacagtgttctgtgcctgtgtgctcccaccctttcctcctgctgctgcagaaacccggccatccttccacacccagatctcttgtcctgtcctcaccccaccctgccaccatcagccctgcctggagccacctgccctttggcaacaaaaccaaacctttttgtgggcgttcaagatggtattgtgcccaccagtcagatcctgtgttttgagtcccaaaggccatgccaaggattggctttgggaggctttaatcaccaacccatcaacatcaagcctcccccaggccggttcaaataaatgtatttaaat

SEQ ID NO: 4469 - protein, 468 aa, Homo sapiens
MADDAGLETPLCSEQFGSGEARGCRAAADGSLQWEVGGWRWWGLSRAFTVKPEGRDAGEVGASGAPSPPLSGLQAVFLPQGFPDSVSPDYLPYQLWDSVQAFASSLSGSLATQAVLLGIGVGNAKATVSAATATWLVKDSTGMLGRIVFAWWKGSKLDCNAKQWRLFADILNDVAMFLEIMAPVYPICFTMTVSTSNLAKCIVSVAGGATRAALTVHQARRNNMADVSAKDSSQETLVNLAGLLVSLLMLPLVSGCPGFSLGCFFFLTALHIYANYRAVRALVMETLNEGRLRLVLKHYLQRGEVLDPTAANRMEPLWTGFWPAPSLSLGVPLHRLVSSVFELQQLVEGHQESYLLCWDQSQNQVQVVLNQKAGPKTILRAATHGLMLGALQGDGPLPAELEELRNRVRAGPKKESWVVVKETHEVLDMLFPKFLKGLQDAGWKTEKHQLEVGEWRATWLLSPEKKVL

SEQ ID NO: 4470 - DNA, 1792 bp, Homo sapiens
gcttccctgcttgatctgtgtaccctgctctttctccttcattccgcagcctcctttgccctgtgacctgcaggtactggacggtccctagagaggataccgggacgctcctgaagccgcgagatgatttcaagcagatgcagcctgaccattagggccaaggccaaattgcaaaaaaaaaaagaagtttgcctttattctactccatccacatctaaactttggaggtcaaggctgtggacagatcagaagacatagttccctccttctggggctccacatccttcattcactgatctctgggaaggaggatgggtggcaggatgggtcttccatgatactgaagggagagccacatgttgatgcccaggaccagctgcctccttggtctgaaaggcctgatcgaggccaggattggctatgagagctgggaaatgggaccatctttgaagccatgggagagggtgagagccaccatcactcatgttcttgaatgggaactgcctggagaccctgaagaagaaggagcctgaaggaggaaggaggaggctgagccatcccgggaacatgggctggatgaggccaagccaggagacgacaccaccagatagaagtcaccattcaggatttggacttttctgtggagatcctggccccgagatcgaacccttctccctgtgggtgttcccgcaggagatggtgctggagatccaccagctgttcatggaccatgaatacccatgtcaccacatcacttctcactgcacctgggtggcagcacactggaccacgtctcagagctgcgcagcatggcagggctgcaggcgggcttgctgctccacgtggtggaagagccctgcacaatgcacaaggcccacggtgatgagtgccacatttgagactgctcaggagcctggacccagctgatgcagctccttgtccttcctgagcgtcttcactgacagtggcctgagagacggcaggagcagaaagacttggagatggaccccaccgactgcacaccacccaagtacatcctgctagggaccctggaacagccactgtgtcccctgcaaccccagaacggtgactaaaagcccctgaaagtgctcaccgtgagcggctggtacctgtcccctgggaactgcaagatgcacaggaccttgtgtacctgtttgtgatcacagccgaggaccagcgaggtagcattaccacatccacacagggcttttaccataaccgccccagtactggaacgaggagctgcagatgatgagggacctacccaacaagaaccaacctgagcagctgcttcaagaaaaagccatgttcaaggtgcctgaatcccctggtaagtgagtgacagcctcacagcctcaggcccacctggctcctgctggaaggttttcttgtgctcgggagagaagtgagggaagccggcagtcccagccctgtcaggtgccctgaaggcccgtcaggtttgccctgcaaggccttctagcattctgcttcctgggagaccatcccccacctttctccggcctctgagactttgagtccttgggaggagaaggccctccttgctatctgggctgagtggccagggccatccagcttcccaccctccactgactgccatggggccctcccctgagcacatggtgcccaactgtagcccttctagggcaggggctcattggcagcacttgcagcttgctggcacttaaaagtcattagtgcggttactgagagaaatgaggaaaaaataattgttaaaaaaaaaaaaaaaaaa

SEQ ID NO: 4471 - protein, 147 aa, Homo sapiens
MFLNGNCLETLKKKEPEGGRRRLSHPGNMGWMRPSQETTPPDRSHHSGFGLFCGDPGPEIEPFSLWVFPQEMVLEIHQLFMDHEYPCHHITSHCTWVAAHWTTSQSCAAWQGCRRACCSTWWKSPAQCTRPTVMSATFETAQEPGPS

SEQ ID NO: 4472 - DNA, 789 bp, Homo sapiens; identical to SEQ ID NO: 4122

SEQ ID NO: 4473 - protein, 116 aa, Homo sapiens [sequence omitted]

SEQ ID NO: 4474 - DNA, 1937 bp, Homo sapiens
ccgctctgtctgcttcgccaccttctccccgagcactgcccggccggccgccatggctaacgtggctgacacgaagctgtacgacatcctgggcgtcccgcccggcgccagcgagaacgagctgaagaaggcatacagaaagttagccaaggaatatcatcctgataagaatccaaatgcaggagacaaatttaaagaaataagttttgcatatgaagtactatcaaatcctgagaagcgtgagttatatgacagatacggagagcaaggtcttcgggaaggcagcggcggaggtggtggcatggatgatattttctctcacatttttggtgggggattgttcggcttcatgggcaatcagagtagaagtcgaaatggcagaagaagaggagaggacatgatgcatccactcaaagtatctttagaagatctgtataatggcaagacaaccaaactacaacttagcaagaatgtgctctgtagtgcatgcagtggccaaggcggaaagtctggagctgtccaaaagtgtagtgcttgtcgaggtcgaggtgtgcgcatcatgatcagacagctggctccagggatggtacaacagatgcagtctgtgtgctctgattgtaatggagaaggagaggtaattaatgaaaaagaccgctgtaaaaaatgtgaagggaagaaggtgattaaagaagtcaagattcttgaagtccacgtagacaaaggcatgaaacatggacagagaattacattcactggggaagcagaccaggccccaggagtggaacccggagacattgttcttttgctacaggagaaagaacatgaggtatttcagagagatgggaatgatttgcacatgacatataaaataggacttgttgaagctctatgtggatttcagttcacatttaagcaccttgatggacgtcagattgtggtgaaatacccccctggcaaagtaattgaaccagggtgtgttcgtgtagttcgaggtgaagggatgccgcagtatcgtaatccctttgaaaaaggtgatctttacataaagtttgatgtgcagtttcctgaaaacaactggatcaacccagacaagctttctgaactagaagatcttctgccatctagaccggaagttcctaacataattggagaaacagaggaggtagagcttcaggaatttgatagcactcgaggctcaggaggtggtcagaggcgtgaagcctataatgatagctctgatgaagaaagcagcagccatcatggacctggagtgcagtgtgcccatcagtaaactctgcaaacaaattgcacaggtggattttctttccacatttgcctgatttgttctcagcaatccagctggagtgtcttatcaatccagatgaactgagggacatctgttggtctatgtataacttttaaaattggtatagtatctacagagtgtataatttaaactaaccacaaagctttacatcttcattttgactgttccatagcagaataaagcacttgaaaggaaacaagactccctttcacacatggattattataagtttcaatcctggtatctgtgcttgatttttatcagttttgtgtagatttttatgtttcatattttaaatttaaatcccacattgtaaagtttgtacaatttgtcctgaagctttgtgtttggctgcacctgcataagctgctacaaatagaataaagaatttcatagcctgtatctatcatttagatgcatggaaaaaaatgggctttgcacacaatgggtttggagctgactgggaacaatggaaaaaattacattagctgtggttgtaaagtttttttgtttttggttttgttttttttttcttttttctttttttttttttttaccatcttgtgaaaggtttctgaaactcgataataaaaagcggttggtgtaaatt

SEQ ID NO: 4475 - protein, 412 aa, Homo sapiens
MANVADTKLYDILGVPPGASENELKKAYRKLAKEYHPDKNPNAGDKFKEISFAYEVLSNPEKRELYDRYGEQGLREGSGGGGGMDDIFSHIFGGGLFGFMGNQSRSRNGRRRGEDMMHPLKVSLEDLYNGKTTKLQLSKNVLCSACSGQGGKSGAVQKCSACRGRGVRIMIRQLAPGMVQQMQSVCSDCNGEGEVINEKDRCKKCEGKKVIKEVKILEVHVDKGMKHGQRITFTGEADQAPGVEPGDIVLLLQEKEHEVFQRDGNDLHMTYKIGLVEALCGFQFTFKHLDGRQIVVKYPPGKVIEPGCVRVVRGEGMPQYRNPFEKGDLYIKFDVQFPENNWINPDKLSELEDLLPSRPEVPNIIGETEEVELQEFDSTRGSGGGQRREAYNDSSDEESSSHHGPGVQCAHQ

SEQ ID NO: 4476 - DNA, 1635 bp, Homo sapiens
ggcacgagcgcggcgttcacgggaattgttcgctttagtgccggcgccatggggtcggagctgatcgggcgcctagccccgcgcctgggcctcgccgagcccgacatgctgaggaaagcagaggagtacttgcgcctgtcccgggtgaagtgtgtcggcctctccgcacgcaccacggagaccagcagtgcagtcatgtgcctggaccttgcagcttcctggatgaagtgccccttggacagggcttatttaattaaactttctggtttgaacaaggagacatatcagagctgtcttaaatcttttgagtgtttactgggcctgaattcaaatattggaataagagacctagctgtacagtttagctgtatagaagcagtgaacatggcttcaaagatactaaaaagctatgagtccagtcttccccagacacagcaagtggatcttgacttatccaggccacttttcacttctgctgcactgctttcagcatgcaagattctaaagctgaaagtggataaaaacaaaatggtagccacatccggtgtaaaaaaagctatatttgatcgactgtgtaaacaactagagaagattggacagcaggtcgacagagaacctggagatgtagctactccaccacggaagagaaagaagatagtggttgaagccccagcaaaggaaatggagaaggtagaggagatgccacataaaccacagaaagatgaagatctgacacaggattatgaagaatggaaaagaaaaattttggaaaatgctgccagtgctcaaaaggctacagcagagtgatttcagcttccaaactggtatacattccaaactgatagtacattgccatctccaggaagacttgacggctttgggattttgtttaaacttttataataaggatcctaagactgttgcctttaaatagcaaagcagcctacctggaggctaagtctgggcagtgggctggcccctggtgtgagcattagaccagccacagtgcctgattggtatagccttatgtgctttcctacaaaatggaattggaggccgggcgcagtggctcacgcctgtaatcccagcactttgggaggccaaggtgggtggatcacctgaggtcaggagctcgagaccagcctggccaacatggtgaaaccccatctctactaaaaatacaaaaattagccaggtgtgatggtgcatgcctgtaatcccagctcctcagtaggctgagacaggagcatcacttgaacgtgggaggcagaggttgcagtgagccgagattgcaccaccgcactccagcctgggtgacagagcgagacttatctcataaataaatagatagatactccagcctgggtgacagagcgagacttatagatagatagatagatagatggatagatagatagatagatagatagatagataaacggaattggagccattttgctttaagtgaatggcagtcccttgtcttattcagaatataaaattcagtctgaatggcatcttacagattttacttcaatttttgtgtacggtattttttatttgactaaatcaatatattgtacagcctaagttaataaatgttatttatatatgcaaaaaaaaaaaaaaaaaaaa

SEQ ID NO: 4477 - protein, 252 aa, Homo sapiens
MGSELIGRLAPRLGLAEPDMLRKAEEYLRLSRVKCVGLSARTTETSSAVMCLDLAASWMKCPLDRAYLIKLSGLNKETYQSCLKSFECLLGLNSNIGIRDLAVQFSCIEAVNMASKILKSYESSLPQTQQVDLDLSRPLFTSAALLSACKILKLKVDKNKMVATSGVKKAIFDRLCKQLEKIGQQVDREPGDVATPPRKRKKIVVEAPAKEMEKVEEMPHKPQKDEDLTQDYEEWKRKILENAASAQKATAE

SEQ ID NO: 4478 - DNA, 2540 bp, Homo sapiens; identical to SEQ ID NO: 1296

SEQ ID NO: 4479 - DNA, 2000 bp, Homo sapiens
gctgcaacaccgagcggaggaggcaggaaccggagcgcgagcagtagctgggtgggcaccacggctgggatcaccaccattgaggcggtgaagcgcaagatccaggttctgcagcagcaggcagatgatgcagaggagcgagctgagcgcctccagcaagaagttgagggagaaaggcgggcccaggagcgcctggccactgccctgcaaaagctggaagaagcagaaaaagctgctggtgagagtgagagaggtatgaaggttattgaaaaccgggctttaaaagatgaagaaaagatggaactccaagaactccaactcaaagaagctaagcacattgcagaagaggcagataggaagtatgaagaggtggctcgtaagttggtgaccattgaaggagacttggaacgcacagaggaacgagctgagctgacagagtcccgttgccgagagatggatgagcagattagactgatggaccagaacctgaagtgtctgagtgctgctgaagaaaagtactctcaaaaagaagacaaatatgaggaagaaatcaagatttttactgataaacccaaggaggcagagacctgtgctgagtttgctgagcgatcggtagccaagctggaaaagacaattgatgacttggaagataaactgaaatgcaccaaagaggagcacctctgtacacaaaggatgctggaccagactctgcttgacctgaatgagatgtagaatgccccagtcccaccctgctgctgctcctccctgtgacccagactccgcctgaggccagcctgccagaagctgacctttaactgagggctgatctttaactggaaggctgctttctcctttcaccgccccctccttccctgtgtctttttcgccaaactgtctctgccttttcccggagaatccagctgggctagaggctgagcacctttggaaacaacatttaagggaatgtgagcacaatgcataatgtctttaaaaagcgtgttgtgatgtacacattttgtaattaccttttttgttgttttgtagcaaacatttgtaaaacattccaaataattccacagccctgaagcagcaatcaaatccctttctcacttttggaaggtgacttttcaccttaatgcatattcccctctccatagaggagaggaaaaggtataggcttgccttgctgagagccaaacagagcccagggagactccactgtgggaaacctcattgctctgtacaaagtactagctaaaccagaaaggtgattccaggaggagttagcccaacaacaacaaaaacaaaaatgtgctgttcaagttttcagctttaagatatctttggataatattatttctattttttatttttttcattagaaatgatcaaattaagatggttaagacctctgagaccaaaactttctctcatctctaccccctcccaactgctcacagaacggatcatgtcccccttatgttgaggtgaccacttaattgctttcctgcctccttgaaagaaagaagattgtgttttctccactgatttagccatgtgaaactcatctcattacccttttctgggtttcaagctgctgtctctagaagtgccatctcattgtgcttcgtatcagtcagtgctggagaaatcttgaatagcttatgtacaaaactttttaaattttatattattttaaaactttgcttctttgggtttgtggcaccctggccaccccatgtggctgtgacagcctctgcagtccgtgggctggcagtttgctgatctgttaaaatttctttccctacccagtccccattttctggtaaggtttctaggaggtctgttaggtgtacatcctgcagcttattggcttaaaatgtactctccttttatgtcgtctctttggggctgattgggagaaagagaaatcaatagtgcaactgttttgatactgaatattgacaagtgtctttttgaaataaagaaccagtccctcc

SEQ ID NO: 4480 - DNA, 797 bp, Homo sapiens
ggaggaggcaggaaccggagcgcgagcagtagctgggtgggcaccacggctgggatcaccaccattgaggcggtgaagcgcaagatccaggttctgcagcagcaggcagatgatgcagaggagcgagctgagcgcctccagcaagaagttgagggagaaaggcgggcccggaaacagaggtatgaaggttattgaaaaccgggctttaaaagatgaagaaaagatggaactccaagaactccaactcaaagaagctaagcacattgcagaagaggcagataggaagtatgaagaggtggctcgtaagttggtgaccattgaaggagacttggaacgcacagaggaacgagctgagctgacagagtcccgttgccgagagatggatgagcagattagactgatggaccagaacctgaagtgtctgagtgctgctgaagaaaagtactctcaaaaagaagacaaatatgaggaagaaatcaagatttttactgataaacccaaggaggcagagacctgtgctgagtttgctgagcgatcggtagccaagctggaaaagacaattgatgacttggaagataaactgaaatgcaccaaagaggagcacctctgtacacaaaggatgctggaccagactctgcttgacctgaatgagatgtagaatgccccagtcccaccctgctgctgctcctcccttttcccggagaatccagctgggctagaggctgagcacctttggaaacaacatttaagggaatgtgagcacaatgcataatgtctttaaaaagcgtgttgtgatg

SEQ ID NO: 4481 - protein, 182 aa, Homo sapiens
MMQRSELSASSKKLREKGGPGNRGMKVIENRALKDEEKMELQELQLKEAKHIAEEADRKYEEVARKLVTIEGDLERTEERAELTESRCREMDEQIRLMDQNLKCLSAAEEKYSQKEDKYEEEIKIFTDKPKEAETCAEFAERSVAKLEKTIDDLEDKLKCTKEEHLCTQRMLDQTLLDLNEM

SEQ ID NO: 4482 - DNA, 636 bp, Homo sapiens
ggaggctgcaacaccgagcggaggaggcaggaaccggagcgcgagcagtagctgggtgggcaccacggctgggatcaccaccattgaggcggtgaagcgcaagatccaggttctgcagcagcaggcagatgatgcagaggagcgagctgagcgcctccagcaagaagttgagggagaaaggcgggcccggaaacaggctgaggctgaggtggcctccttgaaccgtaggatccagctggttgaagaagagctggatcgtcctcaggagcgcctggccactgccctgcaaaagctggaagaagcagaaaaagctgctggtgagagtgagagaggtatgaaggttattgaaaaccgggctttaaaagatgaagaaaagatggaactccaagaactccaactcaaagaagctaagcacattgcagaagaggcagataggaagtatgaagaggtggctcgtaagttggtgaccattgaaggagacttggaacgcacagaggaacgagctgagctgacagagtctactctcaaaaagaagacaaatatgaggaagaaatcaagatttttactgataaacccaaggaggcagagacctgtgctgagtttgctgagcgatcggtagccaagctggaaaagaca

SEQ ID NO: 4483 - DNA, 675 bp, Homo sapiens
atgtctaagtcagagtctcctaaagagcccgaacagctgaggaagctcttcattggagggttgagctttgaaacaactgatgagagcctgaggagccattttgagcaatggggaacgctcacggactgtgtggtaatgagagatccaaacacgaagcgctccaggggctttgggtttgtcacatatgccactgtggaggaggtggatgcagctatgaatgcaaggccacacaaggtggatggaagagttgtggaaccaaagagagctgtctccagagaagattctcaaagaccagatgcccacttaactgtgaaaaagatatttgttggtggcattaaagaagacactgaagaacatcacctaagagattattttgaacagtatggaaaaattgaagtgattgaaatcatgactgacagaggcagtggcaagaaaaggggctttgcctttgtaacctttgacgaccatgactccgtggataagattgtcattcagaaataccatactgtgaatggccacaactgtgaagttagaaaagccctgtcaaagcaagagatggctagtgcttcatccagccaaagagggagaatgcaaggacctgagcttctcttcctcaagcccctcacagcgactgggcctttacaactcaatgttcgaagctctggtactgtttaa

SEQ ID NO: 4484 - DNA, 3069 bp, Homo sapiens
tgtttccgctgcatccagacttcctcaggcggtggctggaggctgcgcatctggggctttaaacatacaaagggattgccaggacctgcggcggcggcggcggcggcgggggctggggcgcgggggccggaccatgagccgctgagccgggcaaaccccaggccaccgagccagcggaccctcggagcgcagccctgcgccgcggagcaggctccaaccaggcggcgaggcggccacacgcaccgagccagcgacccccgggcgacgcgcggggccagggagcgctacgatggaggcgctaatggcccggggcgcgctcacgggtcccctgagggcgctctgtctcctgggctgcctgctgagccacgccgccgccgcgccgtcgcccatcatcaagttccccggcgatgtcgcccccaaaacggacaaagagttggcagtgcaatacctgaacaccttctatggctgccccaaggagagctgcaacctgtttgtgctgaaggacacactaaagaagatgcagaagttctttggactgccccagacaggtgatcttgaccagaataccatcgagaccatgcggaagccacgctgcggcaacccagatgtggccaactacaacttcttccctcgcaagcccaagtgggacaagaaccagatcacatacaggatcattggctacacacctgatctggacccagagacagtggatgatgcctttgctcgtgccttccaagtctggagcgatgtgaccccactgcggttttctcgaatccatgatggagaggcagacatcatgatcaactttggccgctgggagcatggcgatggatacccctttgacggtaaggacggactcctggctcatgccttcgccccaggcactggtgttgggggagactcccattttgatgacgatgagctatggaccttgggagaaggccaagtggtccgtgtgaagtatgggaacgccgatggggagtactgcaagttccccttcttgttcaatggcaaggagtacaacagctgcactgataccggccgcagcgatggcttcctctggtgctccaccacctacaactttgagaaggatggcaagtacggcttctgtccccatgaagccctgttcaccatgggcggcaacgctgaaggacagccctgcaagtttccattccgcttccagggcacatcctatgacagctgcaccactgagggccgcacggatggctaccgctggtgcggcaccactgaggactacgaccgcgacaagaagtatggcttctgccctgagaccgccatgtccactgttggtgggaactcagaaggtgccccctgtgtcttccccttcactttcctgggcaacaaatatgagagctgcaccagcgccggccgcagtgacggaaagatgtggtgtgcgaccacagccaactacgatgatgaccgcaagtggggcttctgccctgaccaagggtacagcctgttcctcgtggcagcccacgagtttggccacgccatggggctggagcactcccaagaccctggggccctgatggcacccatttacacctacaccaagaacttccgtctgtcccaggatgacatcaagggcattcaggagctctatggggcctctcctgacattgaccttggcaccggccccacccccacgctgggccctgtcactcctgagatctgcaaacaggacattgtatttgatggcatcgctcagatccgtggtgagatcttcttcttcaaggaccggttcatttggcggactgtgacgccacgtgacaagcccatggggcccctgctggtggccacattctggcctgagctcccggaaaagattgatgcggtatacgaggccccacaggaggagaaggctgtgttctttgcagggaatgaatactggatctactcagccagcaccctggagcgagggtaccccaagccactgaccagcctgggactgccccctgatgtccagcgagtggatgccgcctttaactggagcaaaaacaagaagacatacatctttgctggagacaaattctggagatacaatgaggtgaagaagaaaatggatcctggcttccccaagctcatcgcagatgcctggaatgccatccccgataacctggatgccgtcgtggacctgcagggcggcggtcacagctacttcttcaagggtgcctattacctgaagctggagaaccaaagtctgaagagcgtgaagtttggaagcatcaaatccgactggctaggctgctgagctggccctggctcccacaggcccttcctctccactgccttcgatacaccgggcctggagaactagagaaggacccggaggggcctggcagccgtgccttcagctctacagctaatcagcattctcactcctacctggtaatttaagattccagagagtggctcctcccggtgcccaagaatagatgctgactgtactcctcccaggcgccccttccccctccaatcccaccaaccctcagagccacccctaaagagatactttgatattttcaacgcagccctgctttgggctgccctggtgctgccacacttcaggctcttctcctttcacaaccttctgtggctcacagaacccttggagccaatggagactgtctcaagagggcactggtggcccgacagcctggcacagggcagtgggacagggcatggccaggtggccactccagacccctggcttttcactgctggctgccttagaacctttcttacattagcagtttgctttgtatgcactttgtttttttctttgggtcttgttttttttttccacttagaaattgcatttcctgacagaaggactcaggttgtctgaagtcactgcacagtgcatctcagcccacatagtgatggttcccctgttcactctacttagcatgtccctaccgagtctcttctccactggatggaggaaaaccaagccgtggcttcccgctcagccctccctgcccctcccttcaaccattccccatgggaaatgtcaacaagtatgaataaagacacctactgagtggc

SEQ ID NO: 4485 - DNA, 1040 bp, Homo sapiens
cacatgtaaactacttgaactccatttcatcttttttcataccatctctaagattgctgccgcatttgcttgttaaactgaaagcatgtttcttgcaaaggctctattggaaggagcagatcgaggtcttggagaagctcttggaggcctctttggaggaggtggtcagagaagagaaggaggaggaagaaatattggagggatagttggaggaattgtgaattttatcagtgaggctgcagcagctcagtatactccagaaccgcctcccactcagcagcatttcaccagtgtggaggcctcagaaagtgaggaagttaggcgatttcggcaacaatttacacagctggctggaccagacatggaggtgggtgccactgatctgatgaatattctcaacaaagtcctttctaagcacaaagatcttaagactgacggttttagtcttgacacctgccggagcattgtgtctgtcatggacagtgacacgactggtaagctgggctttgaagaatttaagtatctgtggaacaacatcaagaaatggcagtgtgtttataagcagtatgacagggaccattctgggtctctgggaagttctcagctgcggggagctctgcaggccgcaggcttccagctaaatgaacaactttaccaaatgattgtccgccggtatgctaatgaagatggagatatggattttaacaatttcatcagctgcttggtccgcctggatgccatgtttcgtgccttcaagtctctggatagagatagagatggcctgattcaagtgtctatcaaagaatggctgcagttgaccatgtattcctgaagtgggaactgagaagtcaagatcctccctggaggacaggactgaaaaccttgccaagctgtacacagttgctgataccctgtgcaacagctctcatttcctggcaagctctttcacaaccctacatatttctgatcatgtgctgccttttactgctgaattaaaacagatatttcataaaaaaaaaaaaaaaaaaaaaaaaaaaaaa

SEQ ID NO: 4486 - protein, 248 aa, Homo sapiens
MFLAKALLEGADRGLGEALGGLFGGGGQRREGGGRNIGGIVGGIVNFISEAAAAQYTPEPPPTQQHFTSVEASESEEVRRFRQQFTQLAGPDMEVGATDLMNILNKVLSKHKDLKTDGFSLDTCRSIVSVMDSDTTGKLGFEEFKYLWNNIKKWQCVYKQYDRDHSGSLGSSQLRGALQAAGFQLNEQLYQMIVRRYANEDGDMDFNNFISCLVRLDAMFRAFKSLDRDRDGLIQVSIKEWLQLTMYS

SEQ ID NO: 4487 - DNA, 2136 bp, Homo sapiens
cctcggcgtgcccccaggaccggtaaagttcctctcgccagccgcatccatgcttctggcgcggatgaacccgcaggtgcagcccgagaacaacggggcggacacgggtccagagcagccccttcgggcgcgcaaaactgcggagctgctggtggtgaaggagcgcaacggcgtccagtgcctgctggcgccccgcgacggcgacgcgcagccccgggagacctggggcaagaagatcgacttcctgctgtccgtagtcggcttcgcagtggacctggccaacgtgtggcgcttcccctacctctgctacaagaacggcggcggtgccttcttgatcccgtacacactgttccttatcatcgcggggatgcccctgttctacatggagctggctctgggacagtacaaccgggagggggctgccaccgtttggaaaatctgcccattcttcaaaggcgttggctatgctgtcatcctgatcgccctgtacgttggcttctactacaacgtcatcatcgcctggtcactctactacctcttctcctccttcaccctcaacctgccctggaccgactgtggccacacctggaacagccccaactgtaccgaccccaagctcctcaatggctccgtgcttggcaaccacaccaagtactccaagtacaagttcacgccggcagccgagttttatgagcgtggtgtcctgcaccttcacgagagcagcgggattcatgacatcggcctgccccagtggcagctcttgctctgtctgatggtcgtcgtcatcgtcttgtattttagcctctggaaaggggtgaagacatcaggaaaggtggtgtggatcacagccacgctgccttacttcgtgctgttcgtgctcctggtccatggcgtcacgctgcccggagcctccaatggcatcaatgcctacctgcacatcgacttctaccgcttgaaagaggccacggtatggattgatgccgcaactcagatatttttttccttgggggctggatttggagtattgattgcatttgccagttacaacaaatttgacaacaactgttacagggatgccctgctgaccagcagcatcaactgtatcaccagcttcgtctctgggttcgccatcttctccatccttggttacatggcccatgaacacaaggtcaacattgaggatgtggccacagaaggagctggcctagtgttcatcctgtatccagaggccatttctaccctgtctggatctacattctgggctgttgtgtttttcgtcatgctcctggcgctgggccttgacagctcaatgggaggcatggaggctgtcatcacgggcctggcagatgacttccaggtcctgaagcgacaccggaaactcttcacatttggcgtcaccttcagcactttccttctcgccctgttctgcataaccaagggtggaatttacgtcttgaccctcctggacacctttgctgcgggcacctccatcctttttgctgtcctcatggaagccatcggagtttcctggttttatggagtggacaggttcagcaacgacatccagcagatgatggggttcaggccgggtctatactggagactgtgctggaagttcgtcagtcctgccttcctcctgttcgtggttgtggtcagcatcatcaacttcaagccactcacctacgacgactacatcttcccgccctgggccaactgggtggggtggggcatcgccctgtcctccatggtcctggtgcccatctacgtcatctataagttcctcagcacgcagggctctctttgggagagactggcctatggcatcacgccagagaacgagcaccacctggtggctcagagggacatcagacagttccagttgcaacactggctggccatctgagcctgcctggaggagaaggaggaacccccatgccaatgtccaggtcacaggcatccgctgcgctcccacctcggacaccatcttgggattcctcccctggaagttgtcctttctgatcctctcttcttttcccatttacaaatgatttcgtgactgtagtttttgttcaccttctgtgcatctggcctgggggctgttagctcagaggagaggagcaaacaggaaaatgactt

SEQ ID NO: 4488 - protein, 617 aa, Homo sapiens [sequence omitted]

SEQ ID NO: 4489 - DNA, 1914 bp, Homo sapiens
gaactgtcgcccttccaggatgtggctccctgctcttgtcctggccactctcgctgcttccgcggcttgggggcatccgtcctcgccacctgtggtggacaccgtgcatggcaaagtgctggggaagttcgtcagcttagaaggatttgcacagcctgtggccattttcctgggaatcccttttgccaagccgcctcttggacccctgaggtttactccaccgcagcctgcagaaccatggagctttgtgaagaatgccacctcgtaccctcctatgtgcacccaagatcccaaggcggggcagttactctcagagctatttacaaaccgaaaggagaacattcctctcaagctttctgaagactgtctttacctcaatatttacactcctgctgacttgaccaagaaaaacaggctgccggtgatggtgtggatccacggaggggggctgatggtgggtgcggcatcaacctatgatgggctggcccttgctgcccatgaaaacgtggtggtggtgaccattcaatatcgcctgggcatctggggattcttcagcacaggggatgaacacagccgggggaactggggtcacctggaccaggtggctgccctgcgctgggtccaggacaacattgccagctttggagggaacccaggctctgtgaccatctttggagagtcagcgggaggagaaagtgtctctgttcttgttttgtctccattggccaagaacctcttccaccgggccatttctgagagtggcgtggccctcacttctgttctggtgaagaaaggtgatgtcaagcccttggctgagcaaattgctatcactgctgggtgcaaaaccaccacctctgctgtcatggttcactgcctgcgacagaagacggaagaggagctcttggagacgacattgaaaataaattcttatctctggacttacagggagaccccagagagagtcaaccccttctgggcactgtgattgatgggatgctgctgctgaaaacacctgaagagcttcaagctgaaaggaatttccacactgtcccctacatggtcggaattaacaagcaggagtttggctggttgattccaatgttgatgagctatccactctccgaagggcaactggaccagaagacagccatgtcactcctgtggaagtcctatccccttgtttgcattgctaaggaactgattccagaagccactgagaaatacttaggaggaacagacgacactgtcaaaaagaaagacctgttcctggacttgatagcagatgtgatgtttggtgtcccatctgtgattgtggcccggaaccacagagatgctggagcacccacctacatgtatgagtttcagtaccgtccaagcttctcatcagacatgaaacccaagacggtgataggagaccacggggatgagctcttctccgtctttggggccccatttttaaaagagggtgcctcagaagaggagatcagacttagcaagatggtgatgaaattctgggccaactttgctcgcaatggaaaccccaatggggaagggctgccccactggccagagtacaaccagaaggaagggtatctgcagattggtgccaacacccaggcggcccagaagctgaaggacaaagaagtagctttctggaccaacctctttgccaagaaggcagtggagaagccaccccagacagaacacatagagctgtgaatgaagatccagccggccttgggagcctggaggagcaaagactggggtcttttgcgaaagggattgcaggttcagaaggcatcttaccatggctggggaattgtctggtggtggggggcaggggacagaggccatgaaggagcaagttttgtatttgtgacctcagctttgggaataaaggatcttttgaaggcc

SEQ ID NO: 4490 - DNA, 3178 bp, Homo sapiens
ctccgccaggacccccgagggcgagcgcctggggggcgcggccttgctcgcgggagcgctgctgagggagagtggttctagtaaataccgcttgctgtgttttgatgttggtggctaagctcatccagtgtattgtgtttggccctcttcgagtgagtgagagacagcatctcaaagacaaattttggaattttattttctacaagttcattttcatctttggtgtgctgaatgtccagacagtggaagaggtggtcatgtggtgcctctggtttgccggacttgtctttctgcacctgatggttcagctctgcaaggatcgatttgaatatctttccttctcgcccaccacgccgatgagcagccacggtcgagtcctgtccctgttggttgccatgctgctttcctgctgtggactggcggccgtctgctccatcaccggctacacccacggaatgcacaccttggctttcatggctgcagagtctcttcttgtgacagtgaggactgctcatgtgattttacgatacgtaattcacctctgggacctcaaccacgaagggacgtgggaaggaaaggggacgtatgtctattacacagactttgtcatggagctcactctcctgtccctggacctcatgcaccatattcacatgttgttatttggcaacatctggttatccatggccagcctggtcatctttatgcagctgcgttacctgtttcatgaggtgcaacgtcgaattcgtcggcacaagaactatctacgtgtggttggaaacatggaggccaggtttgcagttgcaactccagaggagctggctgtcaacaatgacgactgtgccatctgttgggactccatgcaggctgcgcggaaactgccctgtggacatcttttccacaactcctgtcttcgttcctggctagaacaagacacctcctgtccaacatgcagaatgtctcttaatattgccgacaataatcgtgtcagggaagaacatcaaggagagaacttggatgagaatttggttcctgtagcagcagccgaagggagacctcgcttaaaccaacacaatcacttcttccatttcgatgggtctcggattgcgagctggctgccgagtttttcggttgaagtgatgcacaccaccaacattcttggcattacgcaggccagcaactcccagctcaatgcaatggctcatcagattcaagagatgtttccccaggttccataccatctggtactgcaggacctccagctgacacgctcagttgaaataacaacagacaatattttagaaggacggattcaagtaccttttcctacacagcggtcagatagcatcagacctgcattgaacagtcctgtggaaaggccaagcagtgaccaggaagagggagaaacttctgctcagaccgagcgtgtgccactggacctcagtcctcgcctggaggagacgctggacttcggcgaggtggaagtggagcccagtgaggtggaagacttcgaggctcgtgggagccgcttctccaagtctgctgatgagagacagcgcatgctggtgcagcgtaaggacgaactcctccagcaagctcgcaaacgtttcttgaacaaaagttctgaagatgatgcggcctcagagagcttcctcccctcggaaggtgcgtcctctgaccccgtgaccctgcgtcgaaggatgctggctgccgccgcggaacggaggcttcagaagcagcagacctcctagcgctcccttgccttcctcagctgcctcctgcgccctgtgcccgactgactggaggaggcctgtcccaattctgcccgctccatggaaaagcgggcttgactgcattgccgctgtataaagcatgtggtcttatagtgtttggacagctgataaatttaatccttctttgtaatactttctatgtgacatttctcttccccttagaaacactgcaaattttaactgtaggtatgatctcttctggtgttgactggactgcttggggtgggggacgatcaggaggaagtgagcagtcgcctgcctgcagcaggcagcttctactcctgcctcatgcgtacgtcccacaaatgcaggtgtcctgagcaccacacccagtgggaagagtgtgggggaggcgcacagtgtgagcccgcccccacgtcgtggggtaacatctgttatcaaactgctgtcgttgttgtggaagcatgtagactgtgccagaggccagacccacgggctcatgcacccctgagccagcagggcatcttggaaaaggaactcttggttcgatacctggagcagaggaggggaaagtccagggctatagggtgtgatgaagtcacccctttctgtcccactacatctgggactgactttccgagcctccagtccaaagccggcttgatttccgtgaactctggtgctcctgcatctcatgagtgtgccccatgggtcccctcccctctcagcatttccttgtcccgtctggacctggggagtggttaggcagcaagctttggtttatggttttcattcattggtgaagtaaattaggcagtgctaaagcctgtgggtttggtccttgaacaagatgtgggccttgcaagatgggagagtaaaccttgaagggctttattaaagaaataaaaaagaacttttgtatcttttatcctgggagcactgcgttttcctagctgtgttattcctggtttaattcagcagagaaggtaaggtgtgaacctacctgccttggagagggcccaggtcccaaatctcttcaaattcttcacatgtttaactttaaggatttgaaccatgaagtcataggttacagacctcagttttatgccccattggattacttttttttttttttttttttttttttttttactctttgaaagctttgttttgtggtagtccttttgggaagaatccagtattatccacaattattggcaaagtttaaatgtattttacataacggaaagtttttagaatgttgaaaagtaattgaaaaaggtgataggtaaatttttaggcaaagataatttatttcaataaatctttcaaaagccttaccttgaaatgctgttagtaaatttctgtgatttttttttttaatttgttttgctgagagcatagctatttgtttttattgtaaa

SEQ ID NO: 4491 - DNA, 719 bp, Homo sapiens
cttgttcgtctcactggtgtgagctccagcatcccctttgctcgaaatggaccccaactgctcttgcgccactggtggctcctgcacgtgcgccggctcctgcaagtgcaaagagtgcaaatgcacctcctgcaagaagagtgagtgcggggccatctccaggaatctggggctgtggctcaggttgggagggaactcaaggctggccctgagtgcatccttctggggaactgggctttctttgccctcattgcccgtgtcattccctctccaggctttctgccctaaattcagatggggcaggacagcatttttctcgtgggacacaaaccccaactgtaccccctatggtttcagaacagagctgtgccagacgaaaaaaagcatcctctgggtctgggttctgagctcgagccaggcttgctattagggcagggaggtgcccggtcaagtctactgccacctctcactctccccttcttccccaggctgctgttcctgctgccccgtgggctgtgccaagtgtgcccagggctgcgtctgcaaaggggcatcggagaagtgcagctgctgtgcctgatgtgggaacagctcttctcccagatgtaaatagaacaacctgcacaacctggatttttttaaaaatacaacactgagccatttgctgcatttctttttatactaaatatgtgactgacaataaaaacaattttgacttt

SEQ ID NO: 4492 - protein, 127 aa, Homo sapiens
MDPNCSCATGGSCTCAGSCKCKECKCTSCKKSECGAISRNLGLWLRLGGNSRLALSASFWGTGLSLPSLPVSFPLQAFCPKFRWGRTAFFSWDTNPNCTPYGFRTELCQTKKSILWVWVLSSSQACY

SEQ ID NO: 4493 - DNA, 384 bp, Homo sapiens
ccgctgcgtgttttcctcttgatcgggaactcctgcttctccttgcctcgaaatggaccccaactgctcctgctcgcctgttggctcctgtgcctgtgccggctcctgcaaatgcaaagagtgcaaatgcacctcctgcaagaagagctgctgctcctgctgccctgtgggctgtgccaagtgtgcccagggctgcatctgcaaagggacgtcagacaagtgcagctgctgtgcctgatgccaggacagctgtgctctcagatgtaaatagagcaacctatataaacctggattttttttttttttttttttgtacaaccctgacccgtttgctacatctttttttctatgaaatatgtgaatggcaataaattcatctagact

SEQ ID NO: 4494 - protein, 61 aa, Homo sapiens
MDPNCSCSPVGSCACAGSCKCKECKCTSCKKSCCSCCPVGCAKCAQGCICKGTSDKCSCCA

SEQ ID NO: 4495 - DNA, 2165 bp, Homo sapiens
ctgagcgacagcaagtgcagcgggctcctaccccgggtgaggggtggcctccgcgtgggatcgtgccctcttcagcccgctcctgtccccgacatcacgtgtattccgcacgtcccctccgcgctgtgtgtctactgagacggggaggcgtgacagggcccgggtcccttctcagtggtgctctgtgcttcagggcaagctccccgtctccgggcgcacttccctcgcctgtgttcggtccatcctcctttctccagcctcctcccctcgcaggtgggatcgtcggtgggaccggagcgcgggcgggcgcggccccccgggaccatggccgggtccgacaccgcgcccttcctcagccaggcggatgacccggacgacgggccagtgcctggcaccccggggttgccagggtccacggggaacccgaagtccgaggagcccgaggtcccggaccaggaggggctgcagcgcatcaccggcctgtctcccggccgttcggctctcatagtggcggtgctgtgctacatcaatctcctgaactacatggaccgcttcaccgtggctggcgtccttcccgacatcgagcagttcttcaacatcggggacagtagctctgggctcatccagaccgtgttcatctccagttacatggtgttggcacctgtgtttggctacctgggtgacaggtacaatcggaagtatctcatgtgcgggggcattgccttctggtccctggtgacactggggtcatccttcatccccggagagcatttctggctgctcctcctgacccggggcctggtgggggtcggggaggccagttattccaccatcgcgcccactctcattgccgacctctttgtggccgaccagcggagccggatgctcagcatcttctactttgccattccggtgggcagtggtctgggctacattgcaggctccaaagtgaaggatatggctggagactggcactgggctctgagggtgacaccgggtctaggagtggtggccgttctgctgctgttcctggtagtgcgggagccgccaaggggagccgtggagcgccactcagatttgccacccctgaaccccacctcgtggtgggcagatctgagggctctggcaagaaatcctagtttcgtcctgtcttccctgggcttcactgctgtggcctttgtcacgggctccctggctctgtgggctccggcattcctgctgcgttcccgcgtggtccttggggagaccccaccctgccttcccggagactcctgctcttcctctgacagtctcatctttggactcatcacctgcctgaccggagtcctgggtgtgggcctgggtgtggagatcagccgccggctccgccactccaacccccgggctgatcccctggtctgtgccactggcctcctgggctctgcacccttcctcttcctgtcccttgcctgcgcccgtggtagcatcgtggccacttatattttcatcttcattggagagaccctcctgtccatgaactgggccatcgtggccgacattctgctgtacgtggtgatccctacccgacgctccaccgccgaggccttccagatcgtgctgtcccacctgctgggtgatgctgggagcccctacctcattggcctgatctctgaccgcctgcgccggaactggcccccctccttcttgtccgagttccgggctctgcagttctcgctcatgctctgcgcgtttgttggggcactgggcggcgcagccttcctgggcaccgccatcttcattgaggccgaccgccggcgggcacagctgcacgtgcagggcctgctgcacgaagcagggtccacagacgaccggattgtggtgccccagcggggccgctccacccgcgtgcccgtggccagtgtgctcatctgagaggctgccgctcacctacctgcacatctgccacagctggccctgggcccaccccacgaagggcctgggcctaaccccttggcctggcccagcttccagagggaccctgggccgtgtgccagctcccagacactacatgggtagctcaggggaggaggtgggggtccaggagggggatccctctccacaggggcagccccaagggctcggtgctatttgtaacggaataaaatttgtgccagaaaaaaaaaaaa

SEQ ID NO: 4496 - protein, 528 aa, Homo sapiens
MAGSDTAPFLSQADDPDDGPVPGTPGLPGSTGNPKSEEPEVPDQEGLQRITGLSPGRSALIVAVLCYINLLNYMDRFTVAGVLPDIEQFFNIGDSSSGLIQTVFISSYMVLAPVFGYLGDRYNRKYLMCGGIAFWSLVTLGSSFIPGEHFWLLLLTRGLVGVGEASYSTIAPTLIADLFVADQRSRMLSIFYFAIPVGSGLGYIAGSKVKDMAGDWHWALRVTPGLGVVAVLLLFLVVREPPRGAVERHSDLPPLNPTSWWADLRALARNPSFVLSSLGFTAVAFVTGSLALWAPAFLLRSRVVLGETPPCLPGDSCSSSDSLIFGLITCLTGVLGVGLGVEISRRLRHSNPRADPLVCATGLLGSAPFLFLSLACARGSIVATYIFIFIGETLLSMNWAIVADILLYVVIPTRRSTAEAFQIVLSHLLGDAGSPYLIGLISDRLRRNWPPSFLSEFRALQFSLMLCAFVGALGGAAFLGTAIFIEADRRRAQLHVQGLLHEAGSTDDRIVVPQRGRSTRVPVASVLI

SEQ ID NO: 4497 - DNA, 1802 bp, Homo sapiens
ggcgcggaggaggaggttcccggaagccacgcgcagctggagcagcggcgaccgcagctggaggcccggagcgcctgcggggctggcagaggcgagggaggttgcgggtaggaagggcggactgcgcgcgccccctgcgtcccgcgcacctcggggccggtccatgctcccgacggctgcgggcttcagcatctggggccaggttggggcggcggggtccagggcgcaggtggtgcggccgatgcgccgggccggaggctgaggccgcgctgcggggctgggacagcactggcatctccagagcaggcccggggcagcaagggaggcgccgcgatgccagacgaaaatatcttcctgttcgtgcccaacctcatcggttatgcccggattgtcttcgccatcatttctttctacttcatgccctgctgccccctcacggcctcctccttctacctgctcagcggcctgctggacgctttcgatggacacgctgctcgcgctcttaatcaaggaacccggtttggggccatgctggacatgctgacggaccgctgctccaccatgtgcctgttggtcaacctggccctgctgtaccctggagccacgctgttcttccaaatcagcatgagtttggatgtggccagtcactggctgcacctccacagttctgtggtccgaggcagtgagagtcacaagatgatcgacttgtccgggaatccggtgcttcggatctactacacctcgaggcctgctctgttcaccttgtgtgctgggaatgagctcttctactgcctcctctacctgttccatttctctgagggacctttagttggctctgtgggactgttccggatgggcctctgggtcactgcccccatcgccttgctgaagtcgctcatcagcgtcatccacctgatcacggccgcccgcaacatggctgccctggacgcagcagaccgcgccaagaagaagtgacgctggagccccgggtcctggctgcccacctgccctgggagtcttgctgtgccacacagctccccaccccctgctaggaggtcccagtctcacgccttcctcatgtgttgttctacctgctgggatgggggtcagcctctctttggtgacgtcacgttctctgggatcctgaggacccgggcctcaaatcagggaggatacgcgggaggccccctccatccaggcggtgctcctggggtgccgggaccgggcagtgtcacaccctgcctgctcagtcctggggtccgagatgctagggacgcttgagtgagggaggtggtgtgagggccaggtttcctgaaaggcgggagtcagacctccgcccccagccagagcaagcttggggcaccatgcccaggagggaagaagccatccacagccttccctgtcaccggctcctctgtcctgcctaccctggtcctggcgggacttcactatttgacttggtttcctttcagatattcttggctcagggcctgggttgagggagcttagggaaggacgtccgtctgggtgcttttcctccagtttgctggctggcttctccgtctacccacagtgacctcacagagaggccctcctgccacccatgctcatgtggtgtccccaccgcccacttgtttgatgtcactgactgtctacatgtatttatattcttgatattttctaccctcactagaatgtaaactccatgaaggcacagacttttcttgttctcttctctatccctagagtaagaccaacttgaacctggcatatagtagctgcttaataaatactcgtctgtc

SEQ ID NO: 4498 - DNA, 2857 bp, Homo sapiens
ttccccatctgaggcgtttgttgcagctacctgcacttctagatgctccccaggttcatcctgtgtcgtctcccccacctaccagtcatcttcttgtgagccctgggcttaggagtcaccatggcaactgaagagttcatcatccgcatccccccataccactatatccatgtgctggaccagaacagcaacgtgtcccgtgtggaggtcgggccaaagacctacatccggcaggacaatgagagggtactgtttgcccccatgcgcatggtgaccgtccccccacgtcactactgcacagtggccaaccctgtgtctcgggatgcccagggcttggtgctgtttgatgtcacagggcaagttcggcttcgccacgctgacctcgagatccggctggcccaggaccccttccccctgtacccaggggaggtgctggaaaaggacatcacacccctgcaggtggttctgcccaacactgccctccatctaaaggcgctgcttgattttgaggataaagatggagacaaggtggtggcaggagatgagtggcttttcgagggacctggcacgtacatcccccggaaggaagtggaggtcgtggagatcattcaggccaccatcatcaggcagaaccaggctctgcggctcagggcccgcaaggagtgctgggaccgggacggcaaggagagggtgacaggggaagaatggctggtcaccacagtaggggcgtacctcccagcggtgtttgaggaggttctggatttggtggacgccgtcatccttacggaaaagacagccctgcacctccgggctcggcggaacttccgggacttcaggggagtgtcccgccgcactggggaggagtggctggtaacagtgcaggacacagaggcccacgtgccagatgtccacgaggaggtgctgggggttgtgcccatcaccaccctgggcccccacaactactgcgtgattctcgaccctgtcggaccggatggcaagaatcagctggggcagaagcgcgtggtcaagggagagaagtcttttttcctccagccaggagagcagctggaacaaggcatccaggatgtgtatgtgctgtcggagcagcaggggctgctgctgagggccctgcagcccctggaggagggggaggatgaggagaaggtctcacaccaggctggggaccactggctcatccgcggacccctggagtatgtgccatctgccaaagtggaggtggtggaggagcgccaggccatccctctagacgagaacgagggcatctatgtgcaggatgtcaagaccggaaaggtgcgcgctgtgattggaagcacctacatgctgacccaggacgaagtcctgtgggagaaagagctgcctcccggggtggaggagctgctgaacaaggggcaggaccctctggcagacaggggtgagaaggacacagctaagagcctccagcccttggcgccccggaacaagacccgtgtggtcagctaccgcgtgccccacaacgctgcggtgcaggtgtacgactaccgagagaagcgagcccgcgtggtcttcgggcctgagctggtgtcgctgggtcctgaggagcagttcacagtgttgtccctctcagctgggcggcccaagcgtccccatgcccgccgtgcgctctgcctgctgctggggcctgacttcttcacagacgtcatcaccatcgaaacggcggatcatgccaggctgcaactgcagctggcctacaactggcactttgaggtgaatgaccggaaggacccccaagagacggccaagctcttttcagtgccagactttgtaggtgatgcctgcaaagccatcgcatcccgggtgcggggggccgtggcctctgtcactttcgatgacttccataagaactcagcccgcatcattcgcactgctgtctttggctttgagacctcggaagcgaagggccccgatggcatggccctgcccaggccccgggaccaggctgtcttcccccaaaacgggctggtggtcagcagtgtggacgtgcagtcagtggagcctgtggatcagaggacccgggacgccctgcaacgcagcgtccagctggccatcgagatcaccaccaactcccaggaagcggcggccaagcatgaggctcagagactggagcaggaagcccgcggccggcttgagcggcagaagatcctggaccagtcagaagccgagaaagctcgcaaggaacttttggagctggaggctctgagcatggccgtggagagcaccgggactgccaaggcggaggccgagtcccgtgcggaggcagcccggattgagggagaagggtccgtgctgcaggccaagctaaaagcacaggccttggccattgaaacggaggctgagctccagagggtccagaaggtccgagagctggaactggtctatgcccgggcccagctggagctggaggtgagcaaggctcagcagctggctgaggtggaggtgaagaagttcaagcagatgacagaggccataggccccagcaccatcagggaccttgctgtggctgggcctgagatgcaggtaaaactgctccagtccctgggcctgaaatcaaccctcatcaccgatggctccactcccatcaacctcttcaacacagcctttgggctgctggggatggggcccgagggtcagcccctgggcagaagggtggccagtgggcccagccctggggaggggatatccccccagtctgctcaggcccctcaagctcctggagacaaccacgtggtgcctgtactgcgctaactcctgattaatacaatggaagtttctgggcaaaaaaaaaaaaaaaaagtttcca

SEQ ID NO: 4499 - protein, 893 aa, Homo sapiens
MATEEFIIRIPPYHYIHVLDQNSNVSRVEVGPKTYIRQDNERVLFAPMRMVTVPPRHYCTVANPVSRDAQGLVLFDVTGQVRLRHADLEIRLAQDPFPLYPGEVLEKDITPLQVVLPNTALHLKALLDFEDKDGDKVVAGDEWLFEGPGTYIPRKEVEVVEIIQATIIRQNQALRLRARKECWDRDGKERVTGEEWLVTTVGAYLPAVFEEVLDLVDAVILTEKTALHLRARRNFRDFRGVSRRTGEEWLVTVQDTEAHVPDVHEEVLGVVPITTLGPHNYCVILDPVGPDGKNQLGQKRVVKGEKSFFLQPGEQLEQGIQDVYVLSEQQGLLLRALQPLEEGEDEEKVSHQAGDHWLIRGPLEYVPSAKVEVVEERQAIPLDENEGIYVQDVKTGKVRAVIGSTYMLTQDEVLWEKELPPGVEELLNKGQDPLADRGEKDTAKSLQPLAPRNKTRVVSYRVPHNAAVQVYDYREKRARVVFGPELVSLGPEEQFTVLSLSAGRPKRPHARRALCLLLGPDFFTDVITIETADHARLQLQLAYNWHFEVNDRKDPQETAKLFSVPDFVGDACKAIASRVRGAVASVTFDDFHKNSARIIRTAVFGFETSEAKGPDGMALPRPRDQAVFPQNGLVVSSVDVQSVEPVDQRTRDALQRSVQLAIEITTNSQEAAAKHEAQRLEQEARGRLERQKILDQSEAEKARKELLELEALSMAVESTGTAKAEAESRAEAARIEGEGSVLQAKLKAQALAIETEAELQRVQKVRELELVYARAQLELEVSKAQQLAEVEVKKFKQMTEAIGPSTIRDLAVAGPEMQVKLLQSLGLKSTLITDGSTPINLFNTAFGLLGMGPEGQPLGRRVASGPSPGEGISPQSAQAPQAPGDNHVVPVLR

SEQ ID NO: 4500 - DNA, 2821 bp, Homo sapiens
aaaggttccccatctgaggcgtttgttgcagctacctgcacttctagattcatcttcttgtgagccctgggcttaggagtcaccatggcaactgaagagttcatcatccgcatccccccataccactatatccatgtgctggaccagaacagcaacgtgtcccgtgtggaggtcgggccaaagacctacatccggcaggacaatgagagggtactgtttgcccccatgcgcatggtgaccgtccccccacgtcactactgcacagtggccaaccctgtgtctcgggatgcccagggcttggtgctgtttgatgtcacagggcaagttcggcttcgccacgctgacctcgagatccggctggcccaggaccccttccccctgtacccaggggaggtgctggaaaaggacatcacacccctgcaggtggttctgcccaacactgccctccatctaaaggcgctgcttgattttgaggataaagatggagacaaggtggtggcaggagatgagtggcttttcgagggacctggcacgtacatcccccggaaggaagtggaggtcgtggagatcattcaggccaccatcatcaggcagaaccaggctctgcggctcagggcccgcaaggagtgctgggaccgggacggcaaggagagggtgacaggggaagaatggctggtcaccacagtaggggcgtacctcccagcggtgtttgaggaggttctggatttggtggacgccgtcatccttacggaaaagacagccctgcacctccgggctcggcggaacttccgggacttcaggggagtgtcccgccgcactggggaggagtggctggtaacagtgcaggacacagaggcccacgtgccagatgtccacgaggaggtgctgggggttgtgcccatcaccaccctgggcccccacaactactgcgtgattctcgaccctgtcggaccggatggcaagaatcagctggggcagaagcgcgtggtcaagggagagaagtcttttttcctccagccaggagagcagctggaacaaggcatccaggatgtgtatgtgctgtcggagcagcaggggctgctgctgagggccctgcagcccctggaggagggggaggatgaggagaaggtctcacaccaggctggggaccactggctcatccgcggacccctggagtatgtgccatctgccaaagtggaggtggtggaggagcgccaggccatccctctagacgagaacgagggcatctatgtgcaggatgtcaagaccggaaaggtgcgcgctgtgattggaagcacctacatgctgacccaggacgaagtcctgtgggagaaagagctgcctcccggggtggaggagctgctgaacaaggggcaggaccctctggcagacaggggtgagaaggacacagctaagagcctccagcccttggcgccccggaacaagacccgtgtggtcagctaccgcgtgccccacaacgctgcggtgcaggtgtacgactaccgagagaagcgagcccgcgtggtcttcgggcctgagctggtgtcgctgggtcctgaggagcagttcacagtgttgtccctctcagctgggcggcccaagcgtccccatgcccgccgtgcgctctgcctgctgctggggcctgacttcttcacagacgtcatcaccatcgaaacggcggatcatgccaggctgcaactgcagctggcctacaactggcactttgaggtgaatgaccggaaggacccccaagagacggccaagctcttttcagtgccagactttgtaggtgatgcctgcaaagccatcgcatcccgggtgcggggggccgtggcctctgtcactttcgatgacttccataagaactcagcccgcatcattcgcactgctgtctttggctttgagacctcggaagcgaagggccccgatggcatggccctgcccaggccccgggaccaggctgtcttcccccaaaacgggctggtggtcagcagtgtggacgtgcagtcagtggagcctgtggatcagaggacccgggacgccctgcaacgcagcgtccagctggccatcgagatcaccaccaactcccaggaagcggcggccaagcatgaggctcagagactggagcaggaagcccgcggccggcttgagcggcagaagatcctggaccagtcagaagccgagaaagctcgcaaggaacttttggagctggaggctctgagcatggccgtggagagcaccgggactgccaaggcggaggccgagtcccgtgcggaggcagcccggattgagggagaagggtccgtgctgcaggccaagctaaaagcacaggccttggccattgaaacggaggctgagctccagagggtccagaaggtccgagagctggaactggtctatgcccgggcccagctggagctggaggtgagcaaggctcagcagctggctgaggtggaggtgaagaagttcaagcagatgacagaggccataggccccagcaccatcagggaccttgctgtggctgggcctgagatgcaggtaaaactgctccagtccctgggcctgaaatcaaccctcatcaccgatggctccactcccatcaacctcttcaacacagcctttgggctgctggggatggggcccgagggtcagcccctgggcagaagggtggccagtgggcccagccctggggaggggatatccccccagtctgctcaggcccctcaagctcctggagacaaccacgtggtgcctgtactgcgctaactcctgattaatacaatggaagtttctgggcaaaaaaaaaaaaaaaaagtttcca

SEQ ID NO: 4501 - protein, 893 aa, Homo sapiens; identical to SEQ ID NO: 4499

SEQ ID NO: 4502 - DNA, 1173 bp, Homo sapiens
ggcacgaggctgccctagtggcctatgtcccttgctcggggccatggagacactgcggccagtacggcggcgcctctgtctgaagaaggggaagtgacctccggcctccaggctctggccgtggaggataccggaggcccctctgcctcggccggtaaggccgaggacgagggggaaggaggccgagaggagaccgagcgtgaggggtccgggggcgaggaggcgcagggagaagtccccagcgctgggggagaagagcctgccgaggaggactccgaggactggtgcgtgccctgcagcgacgaggaggtggagctgcctgcggatgggcagccctggatgcccccgccctccgaaatccagcggctctatgaactgctggctgcccacggtactctggagctgcaagccgagatcctgccccgccggcctcccacgccggaggcccagagcgaagaggagagatccgatgaggagccggaggccaaagaagaggaagaggaaaaaccacacatgcccacggaatttgattttgatgatgagccagtgacaccaaaggactccctgattgaccggagacgcaccccaggaagctcagcccggagccagaaacgggaggcccgcctggacaaggtgctgtcggacatgaagagacacaagaagctggaggagcagatccttcgtaccgggagggacctcttcagcctggactcggaggaccccagccccgccagccccccactccgatcctccgggagtagtctcttccctcggcagcggaaatactgattcccactgctcctgcctctagggtgcagtgtccgtacctgctggagcctgggccctccttccccagcccagacattgagaaacttgggaagaagagagaaacctcaagctcccaaacagcacgttgcgggaaagaggaagagagagtgtgagtgtgtgtgtgtgttttttctattgaacacctgtagagtgtgtgtgtgtgttttctattgaacacctatagagagagtgtgtgtgttttctattgaacatctatatagagagagtgtgtgagtgtgtgttttctattgaacacctattcagagacctggactgaattttctgagtctgaaataaaagatgcagagctatcatctcttaaaaaaaaaaaaaaaaaaaaaaaaa

SEQ ID NO: 4503 - protein, 254 aa, Homo sapiens
MSLARGHGDTAASTAAPLSEEGEVTSGLQALAVEDTGGPSASAGKAEDEGEGGREETEREGSGGEEAQGEVPSAGGEEPAEEDSEDWCVPCSDEEVELPADGQPWMPPPSEIQRLYELLAAHGTLELQAEILPRRPPTPEAQSEEERSDEEPEAKEEEEEKPHMPTEFDFDDEPVTPKDSLIDRRRTPGSSARSQKREARLDKVLSDMKRHKKLEEQILRTGRDLFSLDSEDPSPASPPLRSSGSSLFPRQRKY

SEQ ID NO: 4504 - DNA, 1240 bp, Homo sapiens
tgccgccgcctctacggtggacacagcggccctgaagcagcctccggcgccccctccgccacccccgccagtgtcggcgcccgcggccgaggccgcgccccccgcctccgccgccactatcgccgcgtcggcggccaccgccgtcgtagccccaacctcgacggtcgccgtggccccggtcgcgtctgccttggagaagaagacaaagagcaaggggccctacatctgcgctctgtgcgccaaggagttcaagaacggctacaatctccggaggcacgaagccatccacacgggagccaaggccggccgggtcccctcgggtgctatgaagatgccgaccatggtgcccctgagcctcctgagcgtgccccagctgagcggagccggcgggggagggggagaggcgggtgccggcggcggcgctgccgcagtggccgccggtggcgtggtgaccacgaccgcctcggggaagcgcatccggaagaaccatgcctgcgagatgtgtggcaaggccttccgcgacgtctaccacctgaaccgacacaagctgtcgcactcggacgagaagccctaccagtgcccggtgtgccagcagcgcttcaagcgcaaggaccgcatgagctaccacgtgcgctcacatgacggcgctgtgcacaagccctacaactgctcccactgtggcaagagcttctcccggccggatcacctcaacagtcacgtcagacaagtgcactcaacagaacggcccttcaaatgtgagaaatgtgaggcagctttcgccacgaaggatcggctgcgggcgcacacagtacgacacgaggagaaagtgccatgtcacgtgtgtggcaagatgctgagctcggcttatatttcggaccacatgaaggtgcacagccagggtcctcaccatgtctgtgagctctgcaacaaaggtactggtgaggtttgtccaatggcggcggcagcggcagcggcggcagcggcagcagcggcagcagtagcagcccctcccacagctgtgggctccctctcgggggcggagggggtgcctgtgagctctcagccacttccctcccaaccctggtgagctccaagttggttgcgggggagaggggagaatggagtagagtcccttggtacaagctcctctcccccctcttttcccaccaactcctatttccctaccaaccaaggagcctccagaaggaaaggaggaagaaatgttttcttaggggaattc

SEQ ID NO: 4505 - DNA, 2072 bp, Homo sapiens
tcgccgtggccccggtcgcgtctgccttggagaagaagacaaagagcaaggggccctacatctgcgctctgtgcgccaaggagttcaagaacggctacaatctccggaggcacgaagccatccacacgggagccaaggccggccgggtcccctcgggtgctatgaagatgccgaccatggtgcccctgagcctcctgagcgtgccccagctgagcggagccggcgggggagggggagaggcgggtgccggcggcggcgctgccgcagtggccgccggtggcgtggtgaccacgaccgcctcggggaagcgcatccggaagaaccatgcctgcgagatgtgtggcaaggccttccgcgacgtctaccacctgaaccgacacaagctgtcgcactcggacgagaagccctaccagtgcccggtgtgccagcagcgcttcaagcgcaaggaccgcatgagctaccacgtgcgctcacatgacggcgctgtgcacaagccctacaactgctcccactgtggcaagagcttctcccggccggatcacctcaacagtcacgtcagacaagtgcactcaacagaacggcccttcaaatgtgagaaatgtgaggcagctttcgccacgaaggatcggctgcgggcgcacacagtacgacacgaggagaaagtgccatgtcacgtgtgtggcaagatgctgagctcggcttatatttcggaccacatgaaggtgcacagccagggtcctcaccatgtctgtgagctctgcaacaaaggcttcaccacggcagcatacctgcgcatccacgcggtgaaggaccacgggctccaggccccgcgggctgaccgcatcctgtgcaagctgtgcagcgtgcactgcaagacccctgcccagctggccggccacatgcagacccatctggggggggccgcccccctgtcccgggagacgccccccagccacagcccacctgctgagggggacccccgcacccaccaggtactggtgaggtttgtccaatggcggcggcagcggcagcggcggcagcggcagcagcggcagcagtagcagcccctcccacagctgtgggctccctctcgggggcggagggggtgcctgtgagctctcagccacttccctcccaaccctggtgagctccaagttggttgcgggggagaggggagaatggagtagagtcccttggtacaagctcctctcccccctcttttcccaccaactcctatttccctaccaaccaaggagcctccagaaggaaaggaggaagaaatgttttcttaggggaattcgctaggttttaacgatttgtttctcctgctcctcttctgtcagacctgaccccacacaaacctgtcccctcggttgtgttgaagtcccctggacagtgggcaggggtggcagaggacacgagcagccactgcccgtaccccctctcctctctgtaagcccatgccctgtcttcccagggacttgtgagcctcttccctcgacggtcctcttctctccttccagtcctctccccctgctgtctgcagcccctccccggggagttggtgctttcttttccttttttttttttttccagggggagggaggagaggaaggagggggatcagagctgtcccaaagagggaaagcggtgaggtttgaggaggggcagaagcagggccggcaaaggttgtaccttcataaggtggtatggggggttggggtcaggccctgaacatcgtcctacttgagaatctgtcaggggaaaaagtcaaggggagcaggaggaagagccaggagggccagaggcagagaagagatggagtcttaggggccagggtgagcgaggggtccagggcctagaggtgcttcctgggggcgggggaatgcagccagtgtccccctcccctcttccaccccagctccagccctggtcttgtcttttcatccctcttccccacgacagaagaagttgtggccctggccatgtcatcgtgttcctgtgtcccctgcatgtaccccaccctccaccccttccttttgcgcggaccccattacaataaattttaaata

SEQ ID NO: 4506 - protein, 299 aa, Homo sapiens
MKMPTMVPLSLLSVPQLSGAGGGGGEAGAGGGAAAVAAGGVVTTTASGKRIRKNHACEMCGKAFRDVYHLNRHKLSHSDEKPYQCPVCQQRFKRKDRMSYHVRSHDGAVHKPYNCSHCGKSFSRPDHLNSHVRQVHSTERPFKCEKCEAAFATKDRLRAHTVRHEEKVPCHVCGKMLSSAYISDHMKVHSQGPHHVCELCNKGFTTAAYLRIHAVKDHGLQAPRADRILCKLCSVHCKTPAQLAGHMQTHLGGAAPLSRETPPSHSPPAEGDPRTHQVLVRFVQWRRQRQRRQRQQRQQ

SEQ ID NO: 4507 - DNA, 2097 bp, Homo sapiens
gggcgggcccaaggagggagtggaatggccgcgggcggctcgacgcagcagaggcgacgcgagatggcggcagcttcagcggcggcgatctcaggagctggtcgctgtcggctaagcaagattggagctactcgtcgtccacctccagctcgcgtaagggtggctgtgcgactgcggccatttgtggatggaacagcgggagcaagtgatcccccctgtgtgcggggcatggacagctgctctctagagattgctaactggaggaaccaccaggagactctcaaataccagtttgatgccttctatggggagaggagtactcagcaggacatctatgcaggttcagtgcagcccatcctaaggcacttgctggaagggcagaatgccagtgtgcttgcctatggacccacaggagctgggaagacgcacacaatgctgggcagcccagagcaacctggggtgatcccgcgggctctcatggacctcctgcagctcacaagggaggagggtgccgagggccggccatgggccctttctgtcaccatgtcttacctagagatctaccaggagaaggtattagacctcctggaccctgcttcgggagacctggtaatccgagaagactgccgggggaatatcctgattccgggtctctcccagaagcccatcagtagctttgctgattttgagcggcacttcctgccagccagtcgaaatcggactgtaggagccacccggctcaaccagcgctcctcccgcagtcatgctgtgctcctggtcaaggtggaccagcgggaacgtttggccccatttcgccagcgagagggaaaactctacctgattgacttggctgggtcagaggacaaccggcgcacaggcaacaagggccttcggctaaaagagagtggagccatcaacacctccctgtttgtcctgggcaaagtggtagatgcgctgaatcagggcctccctcgtgtaccttatcgggacagcaagctcactcgcctattgcaggactctctgggtggctcagcccacagtatccttattgccaacattgcccctgagagacgcttctacctagacacagtctccgcactcaactttgctgccaggtccaaggaggtgatcaatcggccttttaccaatgagagcctgcagcctcatgccttgggacctgttaagctgtctcagaaagaattgcttggtccaccagaggcaaagagagcccgaggccctgaggaagaggagattgggagccctgagcccatggcagctccagcctctgcctcccagaaactcagccccctacagaagctaagcagcatggacccggccatgctggagcgcctcctcagcttggaccgtctgcttgcctcccaggggagccagggggcccctctgttgagtaccccaaagcgagagcggatggtgctaatgaagacagtagaagagaaggacctagagattgagaggcttaagacgaagcaaaaagaactggaggccaagatgttggcccagaaggctgaggaaaaggagaaccattgtcccacaatgctccggcccctttcacatcgcacagtcacaggggcaaagcccctgaaaaaggctgtggtgatgcccctacagctaattcaggagcaggcagcatccccaaatgccgagatccacatcctgaagaataaaggccggaagagaaagctggagtccctggatgccctagagcctgaggagaaggctgaggactgctgggagctacagatcagcccggagctactggctcatgggcgccaaaaaatactggatctgctgaacgaaggctcagcccgagatctccgcagtcttcagcgcattggcccgaagaaggcccagctaatcgtgggctggcgggagctccacggccccttcagccaggtggaggacctggaacgcgtggagggcataacggggaaacagatggagtccttcctgaaggcaaacatcctgggtctcgccgccggccagcgctgtggcgcctcctgaccgtcgtctcctcactccgccttttcaaatttttgtataaccccgtgttgtgtaaatacagtttttgctccggtg

SEQ ID NO: 4508 - protein, 665 aa, Homo sapiens
MAAGGSTQQRRREMAAASAAAISGAGRCRLSKIGATRRPPPARVRVAVRLRPFVDGTAGASDPPCVRGMDSCSLEIANWRNHQETLKYQFDAFYGERSTQQDIYAGSVQPILRHLLEGQNASVLAYGPTGAGKTHTMLGSPEQPGVIPRALMDLLQLTREEGAEGRPWALSVTMSYLEIYQEKVLDLLDPASGDLVIREDCRGNILIPGLSQKPISSFADFERHFLPASRNRTVGATRLNQRSSRSHAVLLVKVDQRERLAPFRQREGKLYLIDLAGSEDNRRTGNKGLRLKESGAINTSLFVLGKVVDALNQGLPRVPYRDSKLTRLLQDSLGGSAHSILIANIAPERRFYLDTVSALNFAARSKEVINRPFTNESLQPHALGPVKLSQKELLGPPEAKRARGPEEEEIGSPEPMAAPASASQKLSPLQKLSSMDPAMLERLLSLDRLLASQGSQGAPLLSTPKRERMVLMKTVEEKDLEIERLKTKQKELEAKMLAQKAEEKENHCPTMLRPLSHRTVTGAKPLKKAVVMPLQLIQEQAASPNAEIHILKNKGRKRKLESLDALEPEEKAEDCWELQISPELLAHGRQKILDLLNEGSARDLRSLQRIGPKKAQLIVGWRELHGPFSQVEDLERVEGITGKQMESFLKANILGLAAGQRCGAS

SEQ ID NO: 4509 - DNA, 1162 bp, Homo sapiens
gtcctgagcagccaacacaccagcccagacagctgcaagtcaccatggacgctgaaggcctggcgctgctgctgccgcccgtcaccctggcagccctggtggacagctggctccgagaggactgcccagggctcaactacgcagccttggtcagcggggcaggcccctcgcaggcggcgctgtgggccaaatcccctggggtactggcagggcagcctttcttcgatgccatatttacccaactcaactgccaagtctcctggttcctccccgagggatcgaagctggtgccggtggccagagtggccgaggtccggggccctgcccactgcctgctgctgggggaacgggtggccctcaacacgctggcccgctgcagtggcattgccagtgctgccgccgctgcagtggaggccgccaggggggccggctggactgggcacgtggcaggcacgaggaagaccacgccaggcttccggctggtggagaagtatgggctcctggtgggcggggccgcctcgcaccgctacgacctgggagggctggtgatggtgaaggataaccatgtggtggccgccggtggcgtggagaaggcggtgcgggcggccagacaggcggctgacttcactctgaaggtggaagtggaatgcagcagcctgcaggaggccgtgcaggcagctgaggctggtgccgaccttgtcctgctggacaacttcaagccagaggagctgcaccccacggccaccgtgctgaaggcccagttcccgagtgtggctgtggaagccagtgggggcatcaccctggacaacctcccccagttctgcgggccgcacatagacgtcatctccatggggatgctgacccaggcggccccagcccttgatttctccctcaagctgtttgccaaagaggtggctccagtgcccaaaatccactagtcctaaaccggaagaggatgacaccggccatgggttaacgtggctcctcaggaccctctgggtcacacatctttagggtcagtggccaatggggcacatttggcactagcttgagcccaactctggctctgccacctgctgctcctgtgacctgtcagggctgacttcacctctgctcatctcagtttcctaatctgtaaaatgggtctaataaaggatcaacc

SEQ ID NO: 4510 - protein, 297 aa, Homo sapiens
MDAEGLALLLPPVTLAALVDSWLREDCPGLNYAALVSGAGPSQAALWAKSPGVLAGQPFFDAIFTQLNCQVSWFLPEGSKLVPVARVAEVRGPAHCLLLGERVALNTLARCSGIASAAAAAVEAARGAGWTGHVAGTRKTTPGFRLVEKYGLLVGGAASHRYDLGGLVMVKDNHVVAAGGVEKAVRAARQAADFTLKVEVECSSLQEAVQAAEAGADLVLLDNFKPEELHPTATVLKAQFPSVAVEASGGITLDNLPQFCGPHIDVISMGMLTQAAPALDFSLKLFAKEVAPVPKIH

SEQ ID NO: 4511 - DNA, 1879 bp, Homo sapiens
gcctcgggaggtggtggagtgacctggccccagtgctgcgtccttatcagccgagccggtcccagctcttgctcctgcctgtttgcctggaaatggccacgcttctccttctccttggggtgctggtggtaagcccagacgctctggggagcacaacagcagtgcagacacccacctccggagagcctttggtctctactagcgagcccctgagctcaaagatgtacaccacttcaataacaagtgaccctaaggccgacagcactggggaccagacctcagccctacctccctcaacttccatcaatgagggatcccctctttggacttccattggtgccagcactggttcccctttacctgagccaacaacctaccaggaagtttccatcaagatgtcatcagtgccccaggaaacccctcatgcaaccagtcatcctgctgttcccataacagcaaactctctaggatcccacaccgtgacaggtggaaccataacaacgaactctccagaaacctccagtaggaccagtggagcccctgttaccacggcagctagctctctggagacctccagaggcacctctggaccccctcttaccatggcaactgtctctctggagacttccaaaggcacctctggaccccctgttaccatggcaactgactctctggagacctccactgggaccactggaccccctgttaccatgacaactggctctctggagccctccagcggggccagtggaccccaggtctctagcgtaaaactatctacaatgatgtctccaacgacctccaccaacgcaagcactgtgcccttccggaacccagatgagaactcacgaggcatgctgccagtggctgtgcttgtggccctgctggcggtcatagtcctcgtggctctgctcctgctgtggcgccggcggcagaagcggcggactggggccctcgtgctgagcagaggtggcaagcgtaacggggtggtggacgcctgggctgggccagcccaggtccctgaggagggggccgtgacagtgaccgtgggagggtccgggggcgacaagggctctgggttccccgatggggaggggtctagccgtcggcccacgctcaccactttctttggcagacggaagtctcgccagggctccctggcgatggaggagctgaagtctgggtcaggccccagcctcaaaggggaggaggagccactggtggccagtgaggatggggctgtggacgccccagctcctgatgagcccgaagggggagacggggctgccccttaagtgtcggtgaatagtgaggctggaggccggaatctcagccagcctccagcaccttccctctcaccatcccactgccccctcgctcccatgtttccacccggcaccctgatcctcacccgaatctcctttttttttttcttttgagacagagtttcgctttgtcgcccaggctggagtgcaatgcacgatctcagttcactgcaacctctgcctcctaagttcaggcgattctcctgcctcagcttcccgagtaactgagattacaggcacccaccaccatgcccagctgcttttttgtatttttggtagagatggggtttcaccatgttggctaggctggtctcaaactcctgacctcaggtgatctacctgcctcagcctcccaaagtgctgagattacagacatgagcctccgcgccttgcctcctcacccacctcttcactctgaatcctcatgaggcttctcagccctggatttcctgctgccatcctcacccagcacccacaactagcgcctgggcagggcagggctggcacctctcaacgtctgtggactgaatgaataaaccctcctcatccacccc

SEQ ID NO: 4512 - protein, 400 aa, Homo sapiens
MATLLLLLGVLVVSPDALGSTTAVQTPTSGEPLVSTSEPLSSKMYTTSITSDPKADSTGDQTSALPPSTSINEGSPLWTSIGASTGSPLPEPTTYQEVSIKMSSVPQETPHATSHPAVPITANSLGSHTVTGGTITTNSPETSSRTSGAPVTTAASSLETSRGTSGPPLTMATVSLETSKGTSGPPVTMATDSLETSTGTTGPPVTMTTGSLEPSSGASGPQVSSVKLSTMMSPTTSTNASTVPFRNPDENSRGMLPVAVLVALLAVIVLVALLLLWRRRQKRRTGALVLSRGGKRNGVVDAWAGPAQVPEEGAVTVTVGGSGGDKGSGFPDGEGSSRRPTLTTFFGRRKSRQGSLAMEELKSGSGPSLKGEEEPLVASEDGAVDAPAPDEPEGGDGAAP

SEQ ID NO: 4513 - DNA, 1995 bp, Homo sapiens
ggtaacttcttgatgttgccgtggcatttgtaaactgtcatggtgctggtaggagtgtagcagggaggatgatgggaggtcagtcttgtctctattttggttttggtgggttttggccagctccttcactgcaacctgttttatcagcaaggtctttatgactggtattttgtgctgaccttctatgtcatcctgtgacttagaatgccttaaccatcagggaatgcagcccagtagtttcagcctcatttttcccggctcctatttaagatggagttgctctggttcacacacctctgacatgatcattgcccactgcggcttccacctcccgggttcaagagatcctcctgcctcaccctcccaaggtgctgggactacaggtgtgtgccaccacgctcagctaatttttgtattttttgtagagatggtgtttttccatgttgcccaggctggtctcaaactcctgggctcaagcaatccttctgtctcagcctcccaaagtactgggattacaggcatgtcccaccatgcccagactaatatttacttttaatcagactaagatagggttactacttgagttgctatggctccagctgaaagaaagcccgtgcagtcatatcacgcgtaaacatttgctttatgctaaaaatatggtggacctggcattacagctattacaaatctcctaagatgtctcgggtagtgtattagttacttttcatactgctatgaagaaatactggaaactgggtaatttataaagaaaaagaggtttaatgtactcacagttccacaaggctggagaggcctcagaatcatggtggaaggcaaggagcaaaaaggtatgtcttccatggcagcaggcaagagagcacgtgcagggaaactgccctttataaaaccatcagatttagtgagatgtattcactatcacgagaacagtatgggaaaaacctgcccccatgattcgattacctcctaccgggtccctcccacgacacatggggattatgggaactacaattcaagatgaaatttgggtggggacgcagccaaaccatatcgggtagcaacaacctagggtcagttttgcaggtggtaaagccatttaccaagatagttgtaggtaaagaagggcagatttattagagaaattgtgaaaatatgttgcagtgggcagctcagcagagaaggggctacctgcaaagaggcaagggctggaggaaagttttatagggtcctgctgaagggtgctacgtgtggaatgaggtcattgtgcccgcaggttgtttgtgattagctgtttctaacaattgttcatacaataattgttcattattgttctcaacttggggctctccccaacctggggacccttccttattgttgcttacttatcaggtctccacataaaggtgtggaaacttcattcattcatatcttcaacacaaattgtaggtagcctgttttttaaaacatttattcaacaaatatttagtccaagccactattacttattaccttctctactattgtatggacttttaactatctctgacactattcactattcttccacattctctattatttatacctatggtaaaatttgccagtttgaccatacaactaatactcacagggaatatatagagtctagaagaaaatatacaggtccttaaaggctgccctgccaacaaaaccataacgcaggaacaaacatcacaactatgccaaataatcaatcctacaatgtccaaaattttactttaaaactggaatttccagacttcctttctgcattaaccagtttaactagacagtaacgaaatattcctactttatgctgtgatagtttgtttatttatttatttatttatttatttgagacagagtttcgctcttgttgcagtgagccaggatcatgccattgcactccagcctggtcaacggagcgagactccgcctcattaaaaaaaaaaaaaaaaa

SEQ ID NO: 4514 - DNA, 1063 bp, Homo sapiens
cggtccttctcaacaggcctgtgccccgcggggtccgcctcctctgggacgccttcctcccggcacagaaggcctccccctctcaccagggccctcgcccgctggtccgccaggccccgccttttttgcggcccccattgtgctgctggacccgacgagcagtgttgacagtgaaccccacgtagacgcggccccggtaccgggggttcaggcagtagagcaggtagacgccgaaaaagcgccctggcctcgccgcgacccccgcgggacccatcgggccttggggttcgggaaccacagcagggggttgattgccgtgacctagggtccaggggagggctggatcgctagggctgcagggtgcttgcttcggaacaagctctcggggactatccggaggcagcctgcaggaagccgtagcgccggtacgtgcccctctcctgtctggaggcgggtgtagaagtccgaccgcggaagccagactgctgtccagtcggcgagcgcgtaccattcagcatcggctccgcccgagtcccaccttcctcaggctctgattggctgacacatggcaagcgcgaaaagcctggaccgctggaaagcccggctgcttgagggcggaagtactgcgttgacgtacgccttagtaagggcggaagtgagttttccagcggaagtggctcctgtaaggcagcaaggtagcgtggccggcgcccgagctggggttgtgtccctgctgggctgccgttccagctggactgccgccatggaactcagcgccgaatacctccgcgagaagctgcagcgggacctggaggcggagcatgtggaggtggaggacacgaccctcaaccgttgctcctgtagcttccgagtcctggtggtgtcggccaagttcgaggggaaaccgctgcttcagagacacaggctggtgaacgcgtgcctagcagaagagctcccgcacatccatgcctttgaacagaaaaccctgaccccagaccagtgggcacgtgagcgacagaaatgagggactgggatctgcacagccattaaattataaatctgg

SEQ ID NO: 4515 - protein, 309 aa, Homo sapiens
MASAKSLDRWKARLLEGGSTALTYALVRAEVSFPAEVAPVRQQGSVAGARAGVVSLLGCRSSWTAAMELSAEYLREKLQRDLEAEHVLPSPGGVGQVRGETAASETQVLYRVMRCVTAANQVFFSEAVLTAANERVGVLLGSLDPSMTIHCDMVITYGLDQLENCQTCGTDYIISVLNLLTLIVEQINTKLPSSFVEKLFIPSSKLLFLRYHKEKEVVAVARAVYQAVLSLKNIPVLETAYKLILGEMTCALNNLLHSLQLPESCSEIKHEAFKNHVFNVDNAKFVVKFDLSALTTIGNAKNSLIGVSL

SEQ ID NO: 4516 - DNA, 1659 bp, Homo sapiens
tcagcgggcgagtccccggctcctccagctccttcctcctcttcctcctcctcctccacctccggcttttgggggatcactgtcctctctcggcagcagaatgagccggcaggtggtccgctccagcaagttccgccacgtgtttggacagccggccaaggccgaccagtgctatgaagatgtgcgcgtctcacagaccacctgggacagtggcttctgtgctgtcaaccctaagtttgtggccctgatctgtgaggccagcgggggaggggccttcctggtgctgcccctgggcaagactggacgtgtggacaagaatgcgcccacggtctgtggccacacagcccctgtgctagacatcgcctggtgcccgcacaatgacaacgtcattgccagtggctccgaggactgcacagtcatggtgtgggagatcccggatgggggcctgatgctgcccctgcgggagcccgtcgtcaccctggagggccacaccaagcgtgtgggcattgtggcctggcacaccacagcccagaacgtgctgctcagtgcaggttgtgacaacgtgatcatggtgtgggacgtgggcactggggcggccatgctgacactgggcccagaggtgcacccagacacgatctacagtgtggactggagccgagatggaggcctcatttgtacctcctgccgtgacaagcgcgtgcgcatcatcgagccccgcaaaggcactgtcgtagctgagaaggaccgtccccacgaggggacccggcccgtgcgtgcagtgttcgtgtcggaggggaagatcctgaccacgggcttcagccgcatgagtgagcggcaggtggcgctgtgggacacaaagcacctggaggagccgctgtccctgcaggagctggacaccagcagcggtgtcctgctgcccttctttgaccctgacaccaacatcgtctacctctgtggcaagggtgacagctcaatccggtactttgagatcacttccgaggcccctttcctgcactatctctccatgttcagttccaaggagtcccagcggggcatgggctacatgcccaaacgtggcctggaggtgaacaagtgtgagatcgccaggttctacaagctgcacgagcggaggtgtgagcccattgccatgacagtgcctcgaaagtcggacctgttccaggaggacctgtacccacccaccgcagggcccgaccctgccctcacggctgaggagtggctggggggtcgggatgctgggcccctcctcatctccctcaaggatggctacgtacccccaaagagccgggagctgagggtcaaccggggcctggacaccgggcgcaggagggcagcaccagaggccagtggcactcccagctcggatgccgtgtctcggctggaggaggagatgcggaagctccaggccacggtgcaggagctccagaagcgcttggacaggctggaggagacagtccaggccaagtagagccccgcagggcctccagcagggtcagccattcacacccatccactcacctcccattcccagccacatggcagagaaaaaaatcataataaaatggctttattttctggtaaaaaaaaaaaaaaaaaaaaaaaaaaaaaaaaaaaaaaaaaaaaaaaaaaagggggggggga

SEQ ID NO: 4517 - protein, 461 aa, Homo sapiens
MSRQVVRSSKFRHVFGQPAKADQCYEDVRVSQTTWDSGFCAVNPKFVALICEASGGGAFLVLPLGKTGRVDKNAPTVCGHTAPVLDIAWCPHNDNVIASGSEDCTVMVWEIPDGGLMLPLREPVVTLEGHTKRVGIVAWHTTAQNVLLSAGCDNVIMVWDVGTGAAMLTLGPEVHPDTIYSVDWSRDGGLICTSCRDKRVRIIEPRKGTVVAEKDRPHEGTRPVRAVFVSEGKILTTGFSRMSERQVALWDTKHLEEPLSLQELDTSSGVLLPFFDPDTNIVYLCGKGDSSIRYFEITSEAPFLHYLSMFSSKESQRGMGYMPKRGLEVNKCEIARFYKLHERRCEPIAMTVPRKSDLFQEDLYPPTAGPDPALTAEEWLGGRDAGPLLISLKDGYVPPKSRELRVNRGLDTGRRRAAPEASGTPSSDAVSRLEEEMRKLQATVQELQKRLDRLEETVQAK

SEQ ID NO: 4518 - DNA, 1429 bp, Mus musculus
gccacgaaggccggagagccggaaccggagtcgcagcggcggagacccctgtgcggtgcggagggggcggcggccccgactctgacccgcgccgggggtgggccatggcggagatcagcgacctggaccggcagatcgagcagctgcgtcgctgcgagctcatcaaggagagcgaagtcaaggccctgtgcgctaaggccagagagatcttggtagaggagagcaacgtgcagagggtggactcgccagtcacagtgtgcggcgacatccatggacaattctatgacctcaaagagctgttcagagtaggtggcgacgtccctgagaccaactacctcttcatgggggactttgtggaccgtggcttctatagcgtcgaaacgttcctcctgctgctggcacttaaggttcgctatcctgatcgcatcacactgatccggggcaaccatgagagtcgccagatcacgcaggtctatggcttctacgatgagtgcctgcgcaagtacggctcggtgactgtgtggcgctactgcactgagatctttgactacctcagcctgtcagccatcatcgatggcaagatcttctgcgtgcacgggggcctctccccctccatccagaccctggatcagattcggacaatcgaccgaaagcaagaggtgcctcatgatgggcccatgtgtgacctcctctggtctgacccagaagacaccacaggctggggcgtgagcccccgaggagccggctacctatttggcagtgacgtggtggcccagttcaacgcagccaatgacattgacatgatctgccgtgcccaccaactggtgatggaaggttacaagtggcacttcaatgagacggtgctcactgtgtggtcggcacccaactactgctaccgctgtgggaatgtggcagccatcttggagctggacgagcatctccagaaagatttcatcatctttgaggctgctccccaagagacacggggcatcccctccaagaagcccgtggccgactacttcctgtgaccccgcccggcccctgccccctccaacccttctggccctcgcaccactgtgactctgccatcttcctcagacggaggctgggcgtggggggggctgtcctggctctgctgtcccccaagagggtgcttcgagggtgaggacttctctggagaggcctggagacctagctccatgttcctcctcctctctccccacttgaaccatgaagtttccaataatttttttttctttttttccttcttttttctgtttgtttttagataaaaattttgagaaaaaaaatgaaaaaattctaataaaagaagaaaaatgaaaaaaaaaaaaaaaaaaaaaaaaaaaaaaaaaaaaaaaaaaaaaaaaaaaaaaaaaaaaaaaaaaaaaaaaaaaaaaaaaaaaaaaaa

SEQ ID NO: 4519 - protein, 307 aa, Mus musculus
MAEISDLDRQIEQLRRCELIKESEVKALCAKAREILVEESNVQRVDSPVTVCGDIHGQFYDLKELFRVGGDVPETNYLFMGDFVDRGFYSVETFLLLLALKVRYPDRITLIRGNHESRQITQVYGFYDECLRKYGSVTVWRYCTEIFDYLSLSAIIDGKIFCVHGGLSPSIQTLDQIRTIDRKQEVPHDGPMCDLLWSDPEDTTGWGVSPRGAGYLFGSDVVAQFNAANDIDMICRAHQLVMEGYKWHFNETVLTVWSAPNYCYRCGNVAAILELDEHLQKDFIIFEAAPQETRGIPSKKPVADYFL

SEQ ID NO: 4520 - DNA, 1464 bp, Homo sapiens
agtaccgggtacgcaggggtgcctcaaccacactccgtccacggactctccgttattttaggaggtccctggccaaagatttatttctcttgacaaccaagggcctccgtctggatttccaaggaagaatttcctctgaagcaccggaacttgctactaccagcaccatgccctaccaatatccagcactgaccccggagcagaagaaggagctgtctgacatcgctcaccgcatcgtggcacctggcaagggcatcctggctgcagatgagtccactgggagcattgccaagcggctgcagtccattggcaccgagaacaccgaggagaaccggcgcttctaccgccagctgctgctgacagctgacgaccgcgtgaacccctgcattgggggtgtcatcctcttccatgagacactctaccagaaggcggatgatgggcgtcccttcccccaagttatcaaatccaagggcggtgttgtgggcatcaaggtagacaagggcgtggtccccctggcagggacaaatggcgagactaccacccaagggttggatgggctgtctgagcgctgtgcccagtacaagaaggacggagctgacttcgccaagtggcgttgtgtgctgaagattggggaacacaccccctcagccctcgccatcatggaaaatgccaatgttctggcccgttatgccagtatctgccagcagaatggcattgtgcccatcgtggagcctgagatcctccctgatggggaccatgacttgaagcgctgccagtatgtgaccgagaaggtgctggctgctgtctacaaggctctgagtgaccaccacatctacctggaaggcaccttgctgaagcccaacatggtcaccccaggccatgcttgcactcagaagttttctcatgaggagattgccatggcgaccgtcacagcgctgcgccgcacagtgccccccgctgtcactgggatcaccttcctgtctggaggccagagtgaggaggaggcgtccatcaacctcaatgccattaacaagtgccccctgctgaagccctgggccctgaccttctcctacggccgagccctgcaggcctctgccctgaaggcctggggcgggaagaaggagaacctgaaggctgcgcaggaggagtatgtcaagcgagccctggccaacagccttgcctgtcaaggaaagtacactccgagcggtcaggctggggctgctgccagcgagtccctcttcgtctctaaccacgcctattaagcggaggtgttcccaggctgcccccaacaactccaggccctgccccctcccactcttgaagaggaggccgcctcctcggggctccaggctggcttgcccgcgctctttcttccctcgtgacagtggtgtgtggtgtcgtctgtgaatgctaagtccatcaccctttccggcacactgccaaataaacagctatttaaggggg

SEQ ID NO: 4521 - protein, 364 aa, Homo sapiens
MPYQYPALTPEQKKELSDIAHRIVAPGKGILAADESTGSIAKRLQSIGTENTEENRRFYRQLLLTADDRVNPCIGGVILFHETLYQKADDGRPFPQVIKSKGGVVGIKVDKGVVPLAGTNGETTTQGLDGLSERCAQYKKDGADFAKWRCVLKIGEHTPSALAIMENANVLARYASICQQNGIVPIVEPEILPDGDHDLKRCQYVTEKVLAAVYKALSDHHIYLEGTLLKPNMVTPGHACTQKFSHEEIAMATVTALRRTVPPAVTGITFLSGGQSEEEASINLNAINKCPLLKPWALTFSYGRALQASALKAWGGKKENLKAAQEEYVKRALANSLACQGKYTPSGQAGAAASESLFVSNHAY

SEQ ID NO: 4522 - DNA, 1670 bp, Homo sapiens
ggcacgaggcggcctccctgccccttcacggcccgcctgcctccctgcccaagtcctgagccaccatgctgaccccgatggtggccgggggggtggtgttccccggactcttcctcctctccaagaacacgctccagcggctgccccagctacgctgggaggaggccgacgcagtcattgtctcagccaggctggtgtcctctgtccaggccatcatggcctccactgccggctacatcgtctccacctcctgcaagcacatcattgatgaccaacactggctgtcctctgcctacacgcaatttgctgtgccctacttcatctacgacatctacgccatgttcctctgtcactggcacaagcaccaggtcaaagggcatggaggggacgacggagcggccagagccccgggcagcacgtgggccatagcgcgtggctacctgcacaaggagttcctcatggtgctccaccatgccgccatggtgctggtgtgcttcccactctcagtggtgtggcgacagggtaagggagacttctttctgggttgcatgttgatggcagaggtcagcacgcccttcgtctgccttggcaagatcctcatccagtacaagcagcagcacacactgctgcacaaggtgaacggggccctgatgctgctcagcttcctctgctgccgggtgctgctctttccctacctgtactgggcctacgggcgccatgccggcctgcccctgctggccgtgcccctggccatccctgcccacgtcaacctgggcgctgcgctgctcctggcccctcagctctactggttcttcctcatctgccgtggggcctgccgcctcttctggccccgctcccggccgcccccggcctgccaggcccaggactgaggccgggggccgggaccctccccctccccacccccacccccgtggagacagggctctggggctgatggctggggttgggagccagggtcctcttgcccggacaaccccaggactgacgatgaccccgaaagggaagaggccccatctctcggggactgagggggtggagagaggggacctcttccccctactctgcccccttcctgcacacccttgcgctggaggaggggagggggcaccgcctcccacccactgagggcaggagggcttgtggggagggacaccaacagggtttcaaggggaccaggagtcagaatgtggggagacgcctctgccaaggccatcccagcccctatgctgccatcccccagggctccccatcacccgagaggagaggacgccccaactaacccccgctggccctcgggcctcccgagtggccggctgcaaccacggctcctctccagggtaggccagcttgaggaatcttatttattttatttatttacccaaatttgaactagtctgttgggttgggggaaggaggtggctgctacccccaagccttcccagtgctgacaaccccgggggcaggcgagggcgcccagtccctcaccatcggctgcacatcgcgccctcgggccctgccatgtccctggtgctactgacctctcaaggcttcctccaatctggggtcgggggaccctgggaggtgctttacagaccgctaataaaagacgatctgcgtgaacgccaaaaaaaaaaaaaaaaaaaaaaaaa

SEQ ID NO: 4523 - protein, 224 aa, Homo sapiens
MASTAGYIVSTSCKHIIDDQHWLSSAYTQFAVPYFIYDIYAMFLCHWHKHQVKGHGGDDGAARAPGSTWAIARGYLHKEFLMVLHHAAMVLVCFPLSVVWRQGKGDFFLGCMLMAEVSTPFVCLGKILIQYKQQHTLLHKVNGALMLLSFLCCRVLLFPYLYWAYGRHAGLPLLAVPLAIPAHVNLGAALLLAPQLYWFFLICRGACRLFWPRSRPPPACQAQD

SEQ ID NO: 4524 - DNA, 1092 bp, Homo sapiens
cgttggcccttggccgcggaccgcgtgggccgagaactttgccagacgagacttgttttctctgggcagttggagggtctcgcggctcctacccttttttggaacggatcattttaaaagttctcgttagaaaccaattcggcgccggcaccctttgggtgaaacctaatcagcccgcgacgctgcctttctcactggtcacgggcaacagctaggctgctgttatttcgcaaggcagaagagaaaaggcatcctcgcgagcagatgaggaacctcggggataaatccttttgtggcttcaagtgtctaagtacattagagtcaggaacggcgctttccagcgtccgccatttttgtggcgtcaccgcgtcgctgctacggcttggggtagcgggagggcagactctgggcgccactcccgggccggtcatgaacgggccggcggacggcgaagtggactacaaaaaaaaataccggaatctgaagcggaagctcaagttcctcatctacgagcacgagtgcttccaggaggagctgaggaaagcgcaaaggaaattactgaaggtgtcccgggacaagagtttcctcctagaccgacttctgcagtacgagaacgtggatgaagactcttcggactcagatgccactgcatcatcagataacagcgagacggaggggacacccaagttgtctgacacaccggcccctaagagggtttccccttcaggcctccggggtcccctccccatacctgagctcgctggcctcctcccgctaccccccattcccttctgactacctggccctgcagctgcccgagcccagtcccctgaggcccaagcgggagaaacggccccgcctgccccggaaactcaagatggcggtgggaccccccgactgccctgtgggagggccgctgaccttccctggccggggttctggggctggggtcgggacaaccctgacccccctcccaccccctaagatgcccccccccacgatcctgagcacggtccctcggcagatgttcagcgatgcaggtagcggggacgatgccttggatggagacgatgacctggtgatcgacatccc

SEQ ID NO: 4525 - protein, 150 aa, Homo sapiens
MRNLGDKSFCGFKCLSTLESGTALSSVRHFCGVTASLLRLGVAGGQTLGATPGPVMNGPADGEVDYKKKYRNLKRKLKFLIYEHECFQEELRKAQRKLLKVSRDKSFLLDRLLQYENVDEDSSDSDATASSDNSETEGTPKLSDTPAPKR

SEQ ID NO: 4526 - DNA, 2272 bp, Homo sapiens
ccgaggttcctcatctgctcgcgaggatgccttttctcttctgccttgcgaaataacagcagcctagctgttgcccgtgaccagtgagaaaggcagcgtcgcgggctgattaggtttcacccaaagggtgccggcgccgaattggtttctaacgagaacttttaaaatgatccgttccaaaaaagggtaggagccgcgagaccctccaactgcccagagaaaacaagtctcgtctggcaaagttctcggcccacgcggtccgcggccaagggccaacggtccctcgccccacgttgccgcagcactgcgcgtgcgcgagccgctgtcaaacgcgctgacggaggccgagaagaaaaaaaggcgggagccgtcaatcccgggttgagcaaaatggcgcgggagaaggagatgcaggagttcacccgtagcttcttccgaggccgcccggacctcagcacgcttacgcattccatcgtgcggcggaggtacttagctcactcgggccgcagccacctggagcccgaggagaagcaggcactgaagcggctggtggaggaggagctgctgaagatgcaggtggatgaagccgcttccagggaagacaaactggaccttaccaagaagggcaagaggcctcccaccccttgtagcgacccggagagaaaaaggttccgcttcaattcagagtcggagtccggctctgaagcctccagcccagactactttggacccccagcaaagaatggggtggcagcagaagtcagcccagccaaagaggagaatccaaggcgagcctcaaaggcagttgaggagagcagtgatgaggaacggcagagggacctgcccgcacagaggggagaggagagcagtgaggaggaggaaaaggggtacaaggggaagactaggaagaaacctgtggtaaagaagcaggcaccaggcaaggcctcagtcagtaggaagcaggccagggaagaaagtgaggagagcgaggcagaacccgttcagaggacagcaaagaaggtggagggaaataaaggaactaaaagcctgaaggaaagtgaacaggagagtgaagaggagatcctagcccagaagaaagagcagagagaggaggaagtggaggaggaagagaaagaagaggatgaggaaaagggggattggaaacccagaaccaggagcaatggccggagaaagtcagctagggaggagaggagctgtaagcagaaaagccaggcaaagaggctcttgggagactcagacagcgaggaagagcagaaagaggcagccagcagtggggatgacagtgggagagatagagaacccccagtgcagaggaagagtgaggacaggacccagcttaagggtgggaagaggttgagtggaagcagcgaggacgaggaagacagtgggaagggggaacccacagctaaaggctctagaaagatggccagactgggcagcaccagtggtgaggaaagtgacttggagagggaggtaagtgacagcgaggcagggggaggcccccagggggagaggaagaaccgctcttccaagaagagctccaggaaaggcaggacacgaagctcctcttcctcctcagatggaagtccagaggccaaaggagggaaggctggctcaggtcgccgtggagaggaccacccggctgtgatgaggctgaagcgctacattcgggcctgtggtgcccatcgaaactacaagaagctgttgggctcctgttgctcacacaaggagcgcctgagtatcctccgggcagaactggaagcgctaggcatgaagggtaccccttccctagggaagtgtcgggccctgaaggagcagagggaggaggcagctgaggtggcctccttggatgttgcgaacatcatcagtggctcgggccggccacgcagacgtacagcctggaaccctttaggagaagcagcacccccaggggagctgtaccgacggaccctggactcagatgaagagcggccccgtcccgcacccccagactggtcacatatgcgtggcatcatcagcagtgatggcgagagtaactgagctctgccacccccaggagggacccttgatacatgtacaaagcatacatagcaccccttgccctgtgtctgtggaacagaagcagcttccttcagagaagactgcagctcccaaggacacaagctgttgggatgctacttctcagcttcacgctgtccctttaaggtgtttattttttaagactcaataaaggagtgtttttaatcacctc

SEQ ID NO: 4527 - DNA, 2816 bp, Homo sapiens
agcagggtctcactctgtcacccaggctggagtgcagtggcgcagttatagctcactgcagccttgaactcctgggctcaagtgatccttccacctcagcctccctagtagctgggaccacaggtggtgacttccaagagtgactccgtcggaggaaaatgactccccagtcgctgctgcagacgacactgttcctgctgagtctgctcttcctggtccaaggtgcccacggcaggggccacagggaagactttcgcttctgcagccagcggaaccagacacacaggagcagcctccactacaaacccacaccagacctgcgcatctccatcgagaactccgaagaggccctcacagtccatgcccctttccctgcagcccaccctgcttcccgatccttccctgaccccaggggcctctaccacttctgcctctactggaaccgacatgctgggagattacatcttctctatggcaagcgtgacttcttgctgagtgacaaagcctctagcctcctctgcttccagcaccaggaggagagcctggctcagggccccccgctgttagccacttctgtcacctcctggtggagccctcagaacatcagcctgcccagtgccgccagcttcaccttctccttccacagtcctccccacacggccgctcacaatgcctcggtggacatgtgcgagctcaaaagggacctccagctgctcagccagttcctgaagcatccccagaaggcctcaaggaggccctcggctgcccccgccagccagcagttgcagagcctggagtcgaaactgacctctgtgagattcatgggggacatggtgtccttcgaggaggaccggatcaacgccacggtgtggaagctccagcccacagccggcctccaggacctgcacatccactcccggcaggaggaggagcagagcgagatcatggagtactcggtgctgctgcctcgaacactcttccagaggacgaaaggccggagcggggaggctgagaagagactcctcctggtggacttcagcagccaagccctgttccaggacaagaattccagccaagtcctgggtgagaaggtcttggggattgtggtacagaacaccaaagtagccaacctcacggagcccgtggtgctcactttccagcaccagctacagccgaagaatgtgactctgcaatgtgtgttctgggttgaagaccccacatgtgacagcccggggcattggagcagtgctgggtgtgagaccgtcaggagagaaacccaaacatcctgcttctgcaaccacttgacctactttgcagtgctgatggtctcctcggtggaggtggacgccgtgcacaagcactacctgagcctcctctcctacgtgggctgtgtcgtctctgccctggcctgccttgtcaccattgccgcctacctctgctccagggtgcccctgccgtgcaggaggaaacctcgggactacaccatcaaggtgcacatgaacctgctgctggccgtcttcctgctggacacgagcttcctgctcagcgagccggtggccctgacaggctctgaggctggctgccgagccagtgccatcttcctgcacttctccctgctcacctgcctttcctggatgggcctcgaggggtacaacctctaccgactcgtggtggaggtctttggcacctatgtccctggctacctactcaagctgagcgccatgggctggggcttccccatctttctggtgacgctggtggccctggtggatgtggacaactatggccccatcatcttggctgtgcataggactccagagggcgtcatctacccttccatgtgctggatccgggactccctggtcagctacatcaccaacctgggcctcttcagcctggtgtttctgttcaacatggccatgctagccaccatggtggtgcagatcctgcggctgcgcccccacacccaaaagtggtcacatgtgctgacactgctgggcctcagcctggtccttggcctgccctgggccttgatcttcttctcctttgcttctggcaccttccagcttgtcgtcctctaccttttcagcatcatcacctccttccaaggcttcctcatcttcatctggtactggtccatgcggctgcaggcccggggtggcccctcccctctgaagagcaactcagacagcgccaggctccccatcagctcgggcagcacctcgtccagccgcatctaggcctccagcccacctgcccatgtgatgaagcagagattcggcctcgtcgcacactgcctgtggcccccgagcccggcccagccccaggccagtcagccgcagactttggaaagcccaacgaccatggagagatgggccgttgccatggtggacggactcccgggctgggcttttgaattggccttggggactactcggctctcactcagctcccacgggactcagaagtgcgccgccatgctgcctagggtactgtccccacatctgtcccaacccagctggaggcctggtctctccttacaacccctgggcccagccctcattgctgggggccaggccttggatcttgagggtctggcacatccttaatcctgtgcccctgcctgggacagaaatgtggctccagttgctctgtctctcgtggtcaccctgagggcactctgcatcctctgtcattttaacctcaggtggcacccagggcgaatggggcccagggcagaccttcagggccagagccctggcggaggagaggccctttgccaggagcacagcagcagctcgcctacctctgagccc

SEQ ID NO: 4528 - DNA, 2320 bp, Homo sapiens
agggcttcctgaagaatgagaaggacaatgccctgctgtctgccatcgaagagtcccggaagaggaccttcggcatggctgaggagtaccatcgggagtcaatgttggttgagtgggagcaagtgaaacagcgaattctgcacacactgctggcatcaggagaagacgcccttgactttactcaagaaagcgagccaagctacatcagtgatgtgggaccccctggtcgaagctctctggataacatcgagatggcctatgcgcggcaaatttatatctataatgagaaaattgtaaatggacacctgcagcctaacctggtggacctttgtgcttccgtcgcagagctcgatgataagagcatttccgacatgtggaccatggtaaaacaaatgacagacgtgttgttgacaccggcaacggatgccctgaagaaccgcagcagcgtggaagtgcgcatggagtttgtcaggcaggccttggcgtaccttgagcagagttataagaattacacccttgtgactgtctttggaaatttgcatcaggcccagctgggcggggtgcctgggacttaccaattggttcgaagtttcctgaacattaaactgccagctcccttgcctggactacaggatggagaggtggaaggccatcctgtgtgggcgctaatttactactgcatgcgctgtggagacctgcttgccgcttcacaggtagttaatcgagcccagcaccagctgggagagtttaaaacctggttccaggagtacatgaacagcaaggacagaagattgtccccagctacggaaaacaagctccggctgcattaccgtagggccctcaggaacaatacagatccctacaagcgggccgtgtactgtatcattggcagatgtgacgtcaccgacaaccagagtgaagtggcggacaaaactgaggattacctgtggctgaagttgaaccaagtgtgttttgacgacgatggcaccagctccccacaagacaggctcactctctcacagttccagaagcagttgttggaagactatggcgagtcccactttacggtgaaccagcaacccttcctctacttccaagtcctgttcctgacagcgcagtttgaagcagcagttgcctttcttttccgcatggagcggctgcgctgccatgctgtccatgtagcactggtgctgtttgagctgaagctgcttttaaagtcctctggacagagtgctcagctcctcagccacgagcctggtgaccctccttgcttgcggcggctgaacttcgtgcggctcctcatgctgtacacccggaagtttgagtccacggacccaagggaggccctccagtacttctatttcctcagggatgagaaagatagtcaaggagaaaacatgtttctgcgctgtgtgagtgagcttgtgattgaaagccgagagttcgatatgattcttgggaaactagagaatgacggaagtagaaagcctggagtcatagataagtttactagtgacacaaagcctattatcaacaaagttgcttctgtggcagaaaataaaggactgtttgaagaggcagcaaagctgtatgaccttgccaagaatgctgacaaggtactggagctgatgaacaaactgctgagccctgtcgtcccccagatcagtgccccgcaatccaacaaggagaggctgaagaacatggcactctccattgccgaacggtatagggctcaaggaataagcgcaaataaatttgtggactccacgttctatcttcttttggacttgatcaccttttttgacgagtatcatagtggtcatattgatagagcttttgatatcattgagcgcttgaagctggtgcccctgaatcaggaaagtgtggaagagagagtggctgccttcagaaatttcagtgatgaaatcaggcacaacctctcagaagtgcttcttgccaccatgaacatcttgttcacacagtttaagaggctcaaggggacaagtccatcctcgtcatccaggccccagcgagtcatcgaggaccgcgactctcaactccgaagtcaagcccgcactctgattacctttgctggaatgataccataccgaacgtctggggacaccaatgcgaggctggtgcagatggaggtcctcatgaattaagtgccatgctttgtgggagtctgggtcggcacactgtcagtacatcaggcacatgggcccactaggctggggtttctggttttgtttctgttgtgttttgttttggtttctgtattatgtatttttgtcaacgccaataaatttctttgatttgt

SEQ ID NO: 4529 - protein, 696 aa, Homo sapiens
MAEEYHRESMLVEWEQVKQRILHTLLASGEDALDFTQESEPSYISDVGPPGRSSLDNIEMAYARQIYIYNEKIVNGHLQPNLVDLCASVAELDDKSISDMWTMVKQMTDVLLTPATDALKNRSSVEVRMEFVRQALAYLEQSYKNYTLVTVFGNLHQAQLGGVPGTYQLVRSFLNIKLPAPLPGLQDGEVEGHPVWALIYYCMRCGDLLAASQVVNRAQHQLGEFKTWFQEYMNSKDRRLSPATENKLRLHYRRALRNNTDPYKRAVYCIIGRCDVTDNQSEVADKTEDYLWLKLNQVCFDDDGTSSPQDRLTLSQFQKQLLEDYGESHFTVNQQPFLYFQVLFLTAQFEAAVAFLFRMERLRCHAVHVALVLFELKLLLKSSGQSAQLLSHEPGDPPCLRRLNFVRLLMLYTRKFESTDPREALQYFYFLRDEKDSQGENMFLRCVSELVIESREFDMILGKLENDGSRKPGVIDKFTSDTKPIINKVASVAENKGLFEEAAKLYDLAKNADKVLELMNKLLSPVVPQISAPQSNKERLKNMALSIAERYRAQGISANKFVDSTFYLLLDLITFFDEYHSGHIDRAFDIIERLKLVPLNQESVEERVAAFRNFSDEIRHNLSEVLLATMNILFTQFKRLKGTSPSSSSRPQRVIEDRDSQLRSQARTLITFAGMIPYRTSGDTNARLVQMEVLMN

SEQ ID NO: 4530 - DNA, 1884 bp, Homo sapiens
gacgtgaacggtcgttgcagagattgcgggcggctgagacgccgcctgcctggcacctaggagcgcagcggagccccgacaccgccgccgccgccatggagtccgagaccgaacccgagcccgtcacgctcctggtgaagagccccaaccagcgccaccgcgacttggagctgagtggcgaccgcggctggagtgtgggccacctcaaggcccacctgagccgcgtctaccccgagcgtccgcgtccagaggaccagaggttaatttattctgggaagctgttgttggatcaccaatgtctcagggacttgcttccaaagcaggaaaaacggcatgttttgcatctggtgtgcaatgtgaagagtccttcaaaaatgccagaaatcaacgccaaggtggctgaatccacagaggagcctgctggttctaatcggggacagtatcctgaggattcctcaagtgatggtttaaggcaaagggaagttcttcggaacctttcttcccctggatgggaaaacatctcaaggcctgaagctgcccagcaggcattccaaggcctgggtcctggtttctccggttacacaccctatgggtggcttcagctttcctggttccagcagatatatgcacgacagtactacatgcaatatttagcagccactgctgcatcaggggcttttgttccaccaccaagtgcacaagagatacctgtggtctctgcacctgctccagcccctattcacaaccagtttccagctgaaaaccagcctgccaatcagaatgctgctcctcaagtggttgttaatcctggagccaatcaaaatttgcggatgaatgcacaaggtggccctattgtggaagaagatgatgaaataaatcgagattggttggattggacctattcagcagctacattttctgtttttctcagtatcctctacttctactcctccctgagcagattcctcatggtcatgggggccaccgttgttatgtacctgcatcacgttgggtggtttccatttagaccgaggccggttcagaacttcccaaatgatggtcctcctcctgacgttgtaaatcaggaccccaacaataacttacaggaaggcactgatcctgaaactgaagaccccaaccacctccctccagacagggatgtactagatggcgagcagaccagcccctcctttatgagcacagcatggcttgtcttcaagactttctttgcctctcttcttccagaaggccccccagccatcgcaaactgatggtgtttgtgctgtagctgttggaggctttgacaggaatggactggatcacctgactccagctagattgcctctcctggacatggcaatgatgagtttttaaaaaacagtgtggatgatgatatgcttttgtgagcaagcaaaagcagaaacgtgaagccgtgatacaaattggtgaacaaaaaatgcccaaggcttctcatgtctttattctgaagagctttaatatatactctatgtagtttaataagcactgtacgtagaaggccttaggtgttgcatgtctatgcttgaggaacttttccaaatgtgtgtgtctgcatgtgtgtttgtacatagaagtcatagatgcagaagtggttctgctggtacgatttgattcctgttggaatgtttaaattacactaagtgtactactttatataatcaatgaaattgctagacatgttttagcaggacttttctaggaaagacttatgtataattgctttttaaaatgcagtgctttactttaaactaaggggaactttgcggaggtgaaaacctttgctgggttttctgttcaataaagttttactatgaatgaccctgaaaaaaaaaaaaaaaaaaaaaa

SEQ ID NO: 4531 - protein, 391 aa, Homo sapiens
MESETEPEPVTLLVKSPNQRHRDLELSGDRGWSVGHLKAHLSRVYPERPRPEDQRLIYSGKLLLDHQCLRDLLPKQEKRHVLHLVCNVKSPSKMPEINAKVAESTEEPAGSNRGQYPEDSSSDGLRQREVLRNLSSPGWENISRPEAAQQAFQGLGPGFSGYTPYGWLQLSWFQQIYARQYYMQYLAATAASGAFVPPPSAQEIPVVSAPAPAPIHNQFPAENQPANQNAAPQVVVNPGANQNLRMNAQGGPIVEEDDEINRDWLDWTYSAATFSVFLSILYFYSSLSRFLMVMGATVVMYLHHVGWFPFRPRPVQNFPNDGPPPDVVNQDPNNNLQEGTDPETEDPNHLPPDRDVLDGEQTSPSFMSTAWLVFKTFFASLLPEGPPAIAN

SEQ ID NO: 4532 - DNA, 2163 bp, Homo sapiens
cccgagcggctgggagcgcacgcgagcgggccgtggccgcgcgggcagcgccctgagcctgtcccgcgcccgcgggcccggccgagcaggagcagctcccggggatgcccgggcggctcggagcgcgggcagcggcagccgtgcggtgagggcggtggcgcccgcgggacctgcgactgccaggaactcctgccaccgccaccggctcccatggcccacatacccagtgggggtgccccagcagcgggggcagcccccatgggcccccagtattgcgtgtgcaaggtggagctgtcagtgagtggccagaacctactggaccgggatgttacctccaagtccgaccccttctgtgtcctctttacagagaacaatggcagatggatcgagtacgacaggacagaaaccgcgatcaacaacctcaaccccgccttctccaagaagttcgtgcttgactaccacttcgaggaggtacagaagctcaagttcgcgctctttgaccaggacaagtccagtatgcggctggacgagcatgacttcctgggccagttctcctgcagcctgggcacgatcgtctccagcaagaagatcactaggcctctgctgctgctgaatgacaagcctgcggggaagggcttgattacgatcgctgcccaggagctgtccgacaaccgcgtcatcacactaagcctggcgggcaggaggctggacaagaaggacctctttgggaagtcagacccctttctggagttttataagccaggagacgatggcaagtggatgctggtccacaggactgaggtgatcaagtacacactggaccctgtgtggaagccattcacagtgcccttggtgtccctgtgtgatggggacatggagaagcccatccaggtcatgtgctacgactatgacaatgacgggggccatgacttcatcggcgagttccagacctcagtgtcacagatgtgtgaggctcgagacagcgtcccgctggagttcgagtgcatcaaccccaagaagcagaggaagaagaagaactataaaaactcgggcatcatcatcctgcgatcctgcaagataaaccgagactactccttccttgactacatcctgggaggctgccagctcatgttcaccgttggaatagactttacagcctccaacgggaatcccctcgacccttcctctttgcactatatcaaccctatgggcaccaacgaatatctgtcggccatctgggctgttgggcagatcattcaggactacgacagtgataagatgtttccagctctgggattcggggcccagttacccccagactggaaggtctcccatgagtttgccatcaacttcaaccccaccaaccccttctgctcaggtgtggatggtattgcccaggcgtactcagcttgcctgccccacatccgcttctacggtcctaccaatttctcccccatcgtcaaccacgtggcccggtttgcggcccaggccacacaacagcggacggccacgcagtacttcatcctcctcatcatcacggacggggtcatcagtgacatggaggagacacggcatgccgtggtgcaggcttccaagctgcccatgtccatcatcatcgtgggcgtgggcaatgcggacttcgctgccatggagttcctggatggggacagccgcatgctgcgctcccacacgggggaggaggcagcccgcgatattgtgcagttcgttccctttcgagagttccgcaacgcagcaaaagagaccttggccaaagctgtgctggcggagctgccccaacaagttgtgcagtatttcaagcataaaaacctgccccccaccaactcggagcccgcctgagctccagtgcccagcagcagcatgtcagctgagcctcctgccctcccccaggaacatgcacgctcactctgcttccttgtgggtggcctttttttaccgatccccttttttattttttacaaccggacctccacccccaacttcctccagcccagctgggcttcctttgttggagtcaactgttgatgcttccaggccaaactggcttcctctcctcctctccccacctttgccattcttaagtattgaatgtactttgtataattttagtggaattgttattgagaataaaatttttacaatcat

SEQ ID NO: 4533 - protein, 446 aa, Homo sapiens
MRLDEHDFLGQFSCSLGTIVSSKKITRPLLLLNDKPAGKGLITIAAQELSDNRVITLSLAGRRLDKKDLFGKSDPFLEFYKPGDDGKWMLVHRTEVIKYTLDPVWKPFTVPLVSLCDGDMEKPIQVMCYDYDNDGGHDFIGEFQTSVSQMCEARDSVPLEFECINPKKQRKKKNYKNSGIIILRSCKINRDYSFLDYILGGCQLMFTVGIDFTASNGNPLDPSSLHYINPMGTNEYLSAIWAVGQIIQDYDSDKMFPALGFGAQLPPDWKVSHEFAINFNPTNPFCSGVDGIAQAYSACLPHIRFYGPTNFSPIVNHVARFAAQATQQRTATQYFILLIITDGVISDMEETRHAVVQASKLPMSIIIVGVGNADFAAMEFLDGDSRMLRSHTGEEAARDIVQFVPFREFRNAAKETLAKAVLAELPQQVVQYFKHKNLPPTNSEPA

SEQ ID NO: 4534 - DNA, 1770 bp, Homo sapiens
cggtggcgccgcgcagtcaccgcggagcagacgcggaggctggtggcccctgggcgagatgccgtacgccaaccagcctaccgtgcggatcacggagctcactgacgagaatgtcaagttcatcatcgagaacaccgacctggcggtggccaattcgattcggagggtcttcatcgctgaggttcccataatagccattgactgggttcagattgatgccaattcctcagttcttcatgatgaattcattgctcacaggcttggattaattcccctcattagtgatgacattgtggacaagctgcagtactctcgggactgcacatgtgaggagttctgccccgagtgctcggtggagttcaccctcgatgtgcggtgcaatgaagaccagacgcgacatgtcacgtctcgagacctcatctccaacagcccccgggtcattccggtgacatcccggaaccgagataatgaccccaatgactacgtggagcaggatgacatcctcatcgtcaagttgagaaagggccaggagctgagacttcgagcctatgccaaaaagggctttggcaaggagcatgccaagtggaaccctactgcaggggtggcttttgaatacgatccagacaatgccctgaggcacacagtgtaccccaagcccgaggaatggccaaagagtgagtactcggagctggatgaggatgagtcgcaggctccctatgaccccaacggcaagccagaaaggttttactacaatgtggagtcctgtggctctctgcgtcctgaaaccattgtcctgtcagccctctcaggattgaagaagaaactgagtgatttacaaactcaattaagccacgagatccagagtgatgtgctaaccataaattaactgcagcttgcctgcttcagcaaaaacggagattcaggccagcagctggatatgggggtctctcttcagactcttctcgtttctgagaatctagtctactgttggttgagcttcttggcaggacatcagtaccaactagaagtgggtcatagatagattaccagggatgcagtggtgtttaggcaggataggtctttactggccctgactgctgttaataattggcagcagtgctccccagatcccagaaggtccctgctggagtgtttccagtgcacctgtagggaaccaactagacttctctcctggttagtccagctctttactctaaaccctttctgtccaaaatgagtcattttcagttgtaccttagatgtctggtgttgaggatcaagtgccatagcctttattcagggggcctataaacccttccagttcttgccccagggctggcctgctagcgcttcaaattcccaggtgtccctaatttgagaagtaaccttttggaatagcattagaccctggctgtcccctccccaccaaataaacatgatatttcattctctgtccagcagtcatgaaccccttcacctccaatgacctgatcatttagtttggtgggggtgggggtgggggtgggggtggaagcagccgcaggagcaagggcccctcccacatacacaggaggagtatttcatttctccttaatgaaggctctggccctaacccctcagcactgtctccagataggaacatgcacaaagcagttaattaggcagcctggagaaaaccagagatccagtacagaaaggaaaggatatttattgattaacagaagttgtctttttaaaagtgtttatttttggcaataaagagcacaacat

SEQ ID NO: 4535 - DNA, 2727 bp, Homo sapiens
cccggcgccgccgccgccctgccgcccccgccagccgcgccgtgacgcgggcatgagcctgctccgcggcgccgctgagcaggcgctcctggcccgggcctcggcgcccagcaggcgcggggcgaaggagctgctagaacaatgctgaggcgggtgaggtgaggagcagcccctcgcggcagccccgacagagtgtctggaacaggtgattggaggagccggagacccaggcacctgggcatccttcccctcgcctctgccaggccccgcgcccctaaaaggtgggaaaaccatggcgaccaatttcagtgacatcgtcaagcaaggctacgtgaagatgaagagcaggaagctcgggatctaccggaggtgctggctggtgttccggaaatcctccagcaaggggccccagcggctggagaagtatccagatgagaagtcggtgtgcctccggggctgccccaaggtgactgagatcagcaacgtcaagtgtgttacgcggctccccaaggagaccaagcggcaggcggtggccatcatattcactgatgactcggcacgtaccttcacctgcgactcagagctagaggcagaggagtggtacaagacactatctgtggagtgtctggggtcccgcctcaacgacatcagtctgggagaacctgacctcctggccccaggggtgcagtgtgaacagacagatcgcttcaatgtcttcctgctgccctgccccaacctggacgtgtatggcgagtgcaagctgcagatcacccacgagaacatctacctctgggacatccacaacccccgtgtgaagctcgtctcgtggcccctctgctcactgcgccgctatggccgggatgccacacgctttaccttcgaggctggccggatgtgtgatgctggggaaggactctataccttccagacacaagagggggagcagatttaccagcgcgtccacagtgccaccctggccatcgcagagcagcacaagcgggtcctgctggaaatggagaagaacgtgaggctgctgaacaagggcacggaacattactcgtatccctgcacacccacgaccatgctgccgcgcagtgcctactggcaccacatcactggttcccagaacatcgccgaagcctccagctatgctggtgaggggtatggggcagcccaggccagctcggaaacagacctcctcaacagattcatcctgctaaagccaaagcccagccagggggacagcagtgaggccaagaccccatcccagtgaccacagtgctggcgagcaccgatgactgctgggggctgcctgctgcggggctggctgcagtgtaccgtggacagcctcagggggctgtcggccaagagcctggagaaagggagcaagctgccccctccttgcccccaaggatgaggctggactgaggcaaagggctggccacaccacctgagcatgtgtgaggggttggagctaccgtgggactatatactgttaatgattttaatatatatggcttatgacatactctgtatcaatgagatcccctcaccctcaccccatccttccccaccaatacacacaaattttttaatcccatgaccaggccacggtcaaggctgtttttgagtatgagtgcagtcgtgtccatcctccatggcacagccctcctgctgccaggacctgcttgaactaccagggccacaggagggggataatcagagcttgaggctggcactctgactgctggcttttcccaaacagcccaagggccggaacagcaggtggcttctcagttcctctgggcctggagtgacacaggaaggatctgcacttcctctgtgctgcttgccagccttgcagttggagttttaagcagaggtgacatctggttgacgcctcaggtgaaaatctggttttaaaatgtaacttctgcacaggctccttcctgctttgtaggctgggaagatgcccctggggtaggggtgctgattacctcagccatgtggaggaaggctggagcttgttcctgccccaggaataggccaggagggaaggccgcagcaggactgccgtggggagcacccctgctgcccccctctcactgaccaggggtggacaatgcccaagcagagggagcccccttgccctgtttggccaccctctggccagccaaaagcactctgaaaccaagaccttcccattcctcctccccacatggtgctgaggctccctgctgcaatgcaattaaagcaattgattttctagtgctggtatttgttgactaccatgcagaagggctatctttctattcacgtcaaacttttggttgtgtggggttttttgttgttttttgggttttgttttttaatactttagggtcctgatttgtgggaacagaccttcttgtaaataaccactatttgagttgtggcaggaggatgataaagcacgcggcccctcccaaaggagcccttgagctagggaggtggtgcagtcagcctcgctctcaacgtgacccggggaatgaccacccagagggatgagctagcctgtagaggggaactggggtccaaaggtctttggggagggaggcagagctggctggctcagctaagtggcacgatgacgcatgaaggagattatgttgtgctctttattgccaaaaataaacacttttaaaaagaaaaaaaaaaaaaaaaaaaaaaaaaaaaaaaaaaaaaaaa

SEQ ID NO: 4536 - protein, 326 aa, Homo sapiens
MATNFSDIVKQGYVKMKSRKLGIYRRCWLVFRKSSSKGPQRLEKYPDEKSVCLRGCPKVTEISNVKCVTRLPKETKRQAVAIIFTDDSARTFTCDSELEAEEWYKTLSVECLGSRLNDISLGEPDLLAPGVQCEQTDRFNVFLLPCPNLDVYGECKLQITHENIYLWDIHNPRVKLVSWPLCSLRRYGRDATRFTFEAGRMCDAGEGLYTFQTQEGEQIYQRVHSATLAIAEQHKRVLLEMEKNVRLLNKGTEHYSYPCTPTTMLPRSAYWHHITGSQNIAEASSYAGEGYGAAQASSETDLLNRFILLKPKPSQGDSSEAKTPSQ

SEQ ID NO: 4537 - DNA, 2305 bp, Homo sapiens
attttgtgggtggggcttcaggtgccagccagctgaaggatggccacccctgtggtcaccaagacagcctggaagttgcaagagatcgtcgcgcatgccagcaacgtgtcctcactggtgctgggcaaagcctccgggcggctgctggctacaggcggggatgactgccgcgtcaacctgtggtccatcaacaagcccaactgcatcatgagcctgacgggccacacatccccagtggagagcgtccgcctcaacacccccgaggagctcatcgtggccggctctcagtcgggctccatccgtgtctgggacctggaagctgccaaaattcttcgcacactcatgggacacaaagccaacatctgcagcctggatttccacccgtacggcgagtttgtagcctctggttcccaggacacaaacatcaagctctgggacatcaggaggaaaggctgtgtcttccgatacagggggcacagccaggccgtgcggtgtctccggttcagccccgatgggaagtggttggcgtcggccgcagatgaccacaccgtgaagctctgggatctcactgccggcaagatgatgtctgagttccctggtcacacggggcctgtcaacgtggtcgagtttcaccccaacgagtacctcctggcctccggcagctctgacaggacaatccgcttctgggacctggagaagttccaggtggtgagctgcatcgaaggggagcctgggcccgtcaggagcgtcctcttcaacccagacggctgctgcctgtacagcggctgccaggactcactgcgtgtctacggctgggaacctgagcggtgctttgatgtggtcctcgtcaactggggcaaggtggccgacctggccatctgcaatgaccagttgataggtgtggccttctcccagagcaacgtctcctcctacgtggtggatctgacgcgtgtcaccaggactggcacggtggcccgggaccctgtgcaggaccaccggcccctggcacagccactgcccaaccccagcgcccccctccggcgcatctatgagcggcccagcacaacctgcagcaagcctcagagggtgaagcagaactcagagagcgagcgccgcagccccagcagcgaggatgaccgggacgagcgcgagtcccgcgcggagatccagaacgccgaggactacaacgagatcttccagcccaagaacagcatcagtcggacgccaccccggagaagtgagcccttccctgcacccccagaggacgacgcagccacagcaaaggaggcagcaaagcccagccctgccatggatgtgcagttcccggtgccaaatctggaggtcctgccccggcccccagtggttgcttccacacctgcacccaaggctgagcctgccatcatccctgccacccggaacgagcccatcgggctgaaggcctccgacttcctgcccgccgtgaagatcccccagcaggccgagctggtggacgaggatgccatgtcacagatccgcaaaggccacgacaccatgtgtgtggtgctcaccagccgccacaagaacctggacactgtgcgggctgtgtggaccatgggcgacatcaagacgtcggtggactccgctgtggccatcaacgacctgtcggtggtggtggacctcctgaacatcgtcaaccagaaagcctccctgtggaagctggacctgtgcaccaccgtcctgccacagattgagaagcttctgcagagcaagtatgagagctacgtccagacgggctgcacctccctgaagctgatcctgcagcggtttctgcccctcatcacagacatgctggcggccccaccctctgtgggtgtggatatcagcagggaggagaggctgcataagtgccggctctgctacaagcagcttaagagcatcagcggcctggtcaagagcaagtcaggcctgagcggccgccatggcagtaccttccgcgagctgcacctgctcatggccagtctggactgaggaaagcagtgggcaggggcgctcggcagcccacagggcctggcctcagcccccactcctgttccttgtgcacccactggcccatgagcctctgcctggcccctgctgctgtcctgtggccgtcctggaggaggtgatgctggtccctggccacctctacagccctgaactcttgagacaactctctccagcaatagctgcccagctttgcccaactgttgcttcttggggcagcgaactgagccctggggctgctgctgtaatttataaggcaaattttattaaatttgtaactatt

SEQ ID NO: 4538 - DNA, 2247 bp, Homo sapiens
gagggcgcttccggcacagcggaactccgggtgccggttgaggttgctggtggacctgctctggtggtcttggatgaggccccatgagcgcggcgcccctggtgggctacagcagcagcggctccgaggatgagtccgaggacgggatgcggaccaggccgggggatgggagccaccgtcgtggccagagcccccttcccaggcagagatttccagtacctgacagtgtgctgaacatgttcccgggcaccgaggaggggcctgaagatgacagcacaaaacacgggggacgggtgcgcaccttcccccacgagcgaggcaactgggccacccacgtctatgtaccatatgaagccaaggaggagttcctggatctgcttgatgtgttgctgccccatgcccagacatatgtcccccggctggtaaggatgaaggtgttccacctcagcctgtcccagagtgtggttctgcgccaccactggatcctccccttcgtgcaggctctgaaagcccgtatgacctccttccacagattcttctttactgccaaccaggtaaagatttacaccaatcaagagaaaaccaggacctttattgggcttgaggtcacttcagggcatgcccagttcctggacctggtttcagaggtggacagagtcatggaggaattcaacctcaccactttctaccaggatccttctttccacctcagcctggcctggtgtgtgggtgatgcacgtctccagctggaggggcagtgcctgcaggaactacaggcaatcgtggatgggtttgaagatgctgaggtgctgctgcgcgtgcacactgagcaagtccgctgcaagtctgggaacaagttcttctcgatgcctttgaagtgagcaccagaggccttcctcctccagggccctctgcagaccaggctgagatggaggaacctgctaaaatcgatggagatgcttctagcctcccagtaggaggccccagccatgccttcaacctggcaggaggtgtagccactcctcatcctccctgagtgctgatattctctctctctctttctcttcctcttctttctctctcttctcctctctttctctcctctggctctcttcctctcctctcttcctctcttctctcttcctctcctctctctcttcctcttctctctctttccctcctgtctctcctcccctcctctctatctctcctctctcttactctcctctctctaaccctcctggctttccttgccctcctctctcttcctctcctatctctcttcctctcctctctcttcccttcctgtctctcttcccctcctctctctcttcctgtcctctatctcttcccctcctctatctcttcctctcctctctctcttcctctcctctctctctcttgctttcttctctctctcctgtctcggctgttgtgggttgcaggttgggtgctgctgttgtggtccttcccagaaactgccagtagagggcagcctgggcatcctaatgcttactctggttgttacacaaagaaaatattggggtcactggcgagcccacccacactcaccagaatctccactgtagtccccctaacaaacagcccttcacttcctctcccacttcagcaatttgtattttgatgccattggcctcagatcagagtgttttaaatcatcacgccctggcttatccctggtcgagccaggacacggggtgcttcagtgggtctgtcaccctctctccttgaagcatgttgcttttatttatttacttttactctcaccctgctcctgtaccagcaggggccacttcaaagccaaggtacagggtgataacttgtggtccagcatcagttttctccacttctttctcccactcacccccagcaaggtgcctggggagacttgagcagatgtttcattttggcctggccagtggctgaaagccaggcctccaatgcactgtgacctctggcttccccagcagctttcccagagaggcagaggggccttccacagcccgggttctcctgctgcctcctgcctgctgcagctgcaggcattctgaggggcaacgtggaggaagggccagggatgcatgggattttaattgtttcatcacaccttccccgtggcaaagaaacagtcagtcctcttcaggtgtcttctggatttctggtgatggacagagaaatctttttacagtttcaaattatgttcaacaaataaaaattgcatttttt

SEQ ID NO: 4539 - DNA, 2176 bp, Homo sapiens
ccgcttccccgtcttgtacacccctaactcctgaggctcctccgaatcacgcgagtggaagcggagaagctcaagtggccgccatgtcagaggcttatttccgagtggagtcgggtgcgctggggcctgaggagaactttctttctttggacgacatcctgatgtcccacgagaagctgccggtgcgcacggagaccgccatgcctcgccttggcgctttcttcctggagcggagcgcaggcgccgagactgacaacgcggtcccacagggttccaagcttgaactacccttgtggctggcaaaaggactttttgacaacaagcgacggatcctttctgtggaactccccaagatctaccaagagggttggaggactgtgttcagtgcagatcccaatgtggtggacctccacaaaatggggccccatttctacgggtttggctcccagctcctgcattttgacagtcccgagaatgcagacatttcccagtctctgctgcagacttttatcggacgttttcgccgcatcatggactcctcacagaatgcttacaacgaagacacttcagccctggtagccaggctagacgagatggagaggggcttatttcaaacagggcagaaaggactgaatgactttcagtgttgggagaaggggcaggcttctcagatcacagcttccaacctcgttcagaattacaagaagagaaaattcactgatatggaagactgaaagccggaagaacacagaatggctcctcacagacgtatccctccgtgtgtccttgataggagctggttgaccttgtacagaaccagaatcctgtcccatttcatggcttatttcctgtggccatagagaattatagggaactggacatgctggaggatgtgggtgtccctggctctgtgagtcttccaggaccgtcccaccctgctgacccacagcccaggccctttaacccaagaacccatggccaaggagaaatcaaagtccttcctaaataagaatcactgccatataatatatcacagtagagttgcaactgagattccttgtgtctgggagtttggacagcttcagatgtacagtttcactagccacaaagcacaggtacaaactgggtcatcgcctgttcacaaaatgctctcttgatcttatttgcctcatcttcctcatggttgtacagaggatagcaccccaccatgccagcctgacttggagatatctcctgctgcctgcctgcagggagttaccccagtttccaaaaacagtcgcccagataaaggaggaaaagggaaaggcagacgaatggcatggcttttactaaagaaaagatgttggcctcatactctatactcagggcttaatgaactggaatctgcataactcagcagtcaacccagaagggaaatggttaaactgagcttgttattgcctcggagagcctaagagcacccgcacacttaattctactccctgtctagaaaagctgtcagggagtcgtttggaattgcaatgtagttattaagggctgttaaccagcctgcattacatctggaagtcaggacttgggtgctgactatgaagggccctgttttcaaaatctaacattgcaagtgtaaatgggcaagaagcctccgttgtgctttttttttcctcttcagtaacttttgcaacattattgcatagaagatccctgaccatttactaggaacctggttaagcaagcactaatctcttttcctggagatcaaggatgcaacctcaggttgagaaagaaacagggttccctgggcccattagactgtttgcagggcatcactgcttccccctgacacctcacaactagcaaaaattgtctttgtctttggaaattatagagggatttgggtatccagattgtgcagatgcaaacttaggctgtcttgatgcaaacttagaaccacagaaatgcttttaaaatgcctgttttaagatggaattgttgtttttataatttgattttagtgctaaataaatgattggctttgtacatgaatatgttctgtacaagtgctctttcactagtactacagataatcaaagctatcagaattgtgtctttgatcatatttgacggtaatacacaaataaatccatgttttagcaaaaaaaaaaaaaaaaaaaaaaaa

SEQ ID NO: 4540 - protein, 216 aa, Homo sapiens
MSEAYFRVESGALGPEENFLSLDDILMSHEKLPVRTETAMPRLGAFFLERSAGAETDNAVPQGSKLELPLWLAKGLFDNKRRILSVELPKIYQEGWRTVFSADPNVVDLHKMGPHFYGFGSQLLHFDSPENADISQSLLQTFIGRFRRIMDSSQNAYNEDTSALVARLDEMERGLFQTGQKGLNDFQCWEKGQASQITASNLVQNYKKRKFTDMED

SEQ ID NO: 4541 - DNA, 2339 bp, Homo sapiens
ggtccaccatggccctgctgcactccggccgcgtcctccccgggatcgccgccgccttccacccgggcctcgccgccgcggcctctgccagagccagctcctggtggacccatgtggaaatgggacctccagatcccattctgggagtcactgaagcctttaagagggacaccaatagcaaaaagatgaatctgggagttggtgcctaccgggatgataatggaaagccttacgttctgcctagcgtccgcaaggcagaggcccagattgccgcaaaaaatttggacaaggaatacctgcccattgggggactggctgaattttgcaaggcatctgcagaactagccctgggtgagaacagcgaagtcttgaagagtggccggtttgtcactgtgcagaccatttctggaactggagccttaaggatcggagccagttttctgcaaagattttttaagttcagccgagatgtctttctgcccaaaccaacctggggaaaccacacacccatcttcagggatgctggcatgcagctacaaggttatcggtattatgaccccaagacttgcggttttgacttcacaggcgctgtggaggatatttcaaaaataccagagcagagtgttcttcttctgcatgcctgcgcccacaatcccacgggagtggacccgcgtccggaacagtggaaggaaatagcaacagtggtgaagaaaaggaatctctttgcgttctttgacatggcctaccaaggctttgccagtggtgatggtgataaggatgcctgggctgtgcgccacttcatcgaacagggcattaatgtttgcctctgccaatcatatgccaagaacatgggcttatatggtgagcgtgtaggagccttcactatggtctgcaaagatgcggatgaagccaaaagggtagagtcacagttgaagatcttgatccgtcccatgtattccaaccctcccctcaatggggcccggattgctgctgccattctgaacaccccagatttgcgaaaacaatggctgcaagaagtgaaagtcatggctgaccgcatcattggcatgcggactcaactggtctccaacctcaagaaggagggttccacccacaattggcaacacatcaccgaccaaattggcatgttctgtttcacagggctaaagcctgaacaggtggagcggctgatcaaggagttctccatctacatgacaaaagatggccgcatctctgtggcaggggtcacctccagcaacgtgggctaccttgcccatgccattcaccaggtcaccaagtaatgtccctggtgcgaggaaacagagacaacctttctgtcttcagcctctgctattgagagcttcacacagacaatgagagagggtggatggtggtgagtggatcatttctttcagccacagtgtgtaacactcagcatttgaatgtttctcagaaaagaacatgtagtgacacagggcagaggcatccatggctggcgtctggaatattaaaccaaactctccccggtccttttttctccaacttttctcaaagagtttacatgtgcaagaaagtcatcgcaccaaaaaacctgtcaattatgccattgcaatatttcagaagctttaactgaagtgtcaggttcctcgtgagaaacagcacacgttagaggctttgagagaaggcctagttctgtcatgagtagtcggcctcgtgtctgtcctcccatcttggaacaaccttatcaacaggccgcactgcagaaatgatgttttatgaaaaccaatgaggctgctgccactccagcaagggaaataatgcagtttcctgtcttatttaagaaaaagagaaggctctcttttctcccttgtcattgccgttcttttccttacacgcaaagattttttaactattgcagattttcatcccattctactgcttgattgaccatcaactccatcctatcgagatttatttaagaatgaagaacataattttctgctgatgctgtaccctcacccttttcagcaaagaatagtggagagtaggaaactgtactttatctcggcatcctcttgaatgatagtgcaagtttctccagttgggatgttgtctctgcccggttggacctcctccctttgttgaatgtggtgtgcagcctctcatctcacactgtgagtccagcggcgcagggtggtaccaggaaagaggatattctaggctttgcgtgctgctagctgggttcaggcttcacccactggaaagaaccaccatctgctctaaccatgtagacttattgcggcctggtttctctgttacaataaaattactgtagaccc

SEQ ID NO: 4542 - protein, 430 aa, Homo sapiens
MALLHSGRVLPGIAAAFHPGLAAAASARASSWWTHVEMGPPDPILGVTEAFKRDTNSKKMNLGVGAYRDDNGKPYVLPSVRKAEAQIAAKNLDKEYLPIGGLAEFCKASAELALGENSEVLKSGRFVTVQTISGTGALRIGASFLQRFFKFSRDVFLPKPTWGNHTPIFRDAGMQLQGYRYYDPKTCGFDFTGAVEDISKIPEQSVLLLHACAHNPTGVDPRPEQWKEIATVVKKRNLFAFFDMAYQGFASGDGDKDAWAVRHFIEQGINVCLCQSYAKNMGLYGERVGAFTMVCKDADEAKRVESQLKILIRPMYSNPPLNGARIAAAILNTPDLRKQWLQEVKVMADRIIGMRTQLVSNLKKEGSTHNWQHITDQIGMFCFTGLKPEQVERLIKEFSIYMTKDGRISVAGVTSSNVGYLAHAIHQVTK

SEQ ID NO: 4543 - DNA, 457 bp, Homo sapiens
atctgcagtggagccgccaccaaaatgcagattttcgtgaaaacccttacggggaagaccatcaccctcgaggttgaaccctcggatacgatagaaaatgtaaaggccaagatccagggtaaggaaggaattcctcctgatcagcagagactgatctttgctggcaagcagctggaagatggacgtactttgtctgactacaatattcaaaaggagtctactcttcatcttgtgttgagacttctggtggtgctaagaaaaggaagaagaagtcttacaccactcccaagaagaataagcacaagagaaagaaggttaagctggctgtcctgaaatactataaggtggatgagaatggctttatggcaagccactttgacagacattattgtggcaaatgttgtctgacttactgcttcaacaaaccagaagacaagtaactgtatgagttaataaa

SEQ ID NO: 4544 - DNA, 2010 bp, Homo sapiens
atggcggaccttgattcgcctccgaagctgtcaggggtgcagcagccgtctgagggggtgggaggtggccgctgctccgaaatctccgctgagctcattcgctccctgacagagctgcaggagctggaggctgtatacgaacggctctgcggcgaggagaaagtggtggagagagagctggatgctcttttggaacagcaaaacaccattgaaagtaagatggtcactctccaccgaatgggtcctaatctgcagctgattgagggagatgcaaagcagctggctggaatgatcacctttacctgcaacctggctgagaatgtgtccagcaaagttcgtcagcttgacctggccaagaaccgcctctatcaggccattcagagagctgatgacatcttggacctgaagttctgcatggatggagttcagactgctttgaggagtgaagattatgagcaggctgcagcacatactcatcgctacttgtgcctggacaagtcggtcattgagctcagccgacagggcaaagaggggagcatgattgatgccaacctgaaattgctgcaggaagctgagcaacgtctcaaagccattgtggcagagaagtttgccattgccaccaaggaaggtgatctgccccaggtggagcgcttcttcaagatcttcccactgctgggtttgcatgaggagggattaagaaagttctcggagtacctttgcaagcaggtggccagtaaagctgaggagaatctgctcatggtgctggggacagacatgagtgatcggagagctgcagtcatctttgcagatacacttactcttctgtttgaagggattgcccgcattgtggagacccaccagccaatagtggagacctattatgggccagggagactctataccctgatcaaatatctgcaggtggaatgtgacagacaggtggagaaggtggtagacaagttcatcaagcaaagggactaccaccagcagttccggcatgttcagaacaacctgatgagaaattctacaacagaaaaaatcgaaccaagagaactggaccccatcctgactgaggtcaccctgatgaatgcccgcagtgagctatacttacgcttcctcaagaagaggattagctctgattttgaggtgggagactccatggcctcagaggaagtaaagcaagagcaccagaagtgtctggacaaactcctcaataactgccttttgagctgtaccatgcaggagctaattggcttatatgttaccatggaggagtacttcatgagggagactgtcaataaggctgtggctctggacacctatgagaagggccagctgacatccagcatggtggatgatgtcttctacattgttaagaagtgcattgggcgggctctgtccagctccagcattgactgtctctgtgccatgatcaacctcgccaccacagagctggagtctgacttcagggatgttctgtgtaataagctgcggatgggctttcctgccaccaccttccaggacatccagcgcggggtgacaagtgccgtgaacatcatgcacagcagcctccagcaaggcaaatttgacacaaaaggcatcgagagtactgacgaggcgaagatgtccttcctgggacatattctgagtcacctgagccacgatagaggctgggctgtccagctgtcacctagaattcattccccagagcactggccagctgctcaggagcccactgagtgccaagcttggcttgcatctgccacagaaccagctctaccatctgtgccagaccaccagactgcttctctgaggagaggcccgcagcatgggcaggcgccagtccttcgggcctgccatcactgctctgctagtacatgtcttaggctttcaacttcctctggaaaggaggctttattaaagccctttgctacccagaatgacagatgtgataaagcagcaagccttccattgtgtgacagcttggaaaggaggagcacagaaggatga

SEQ ID NO: 4545 - DNA, 1674 bp, Homo sapiens
ggcacgaggcagcgtcagctgacctggggagtcgcgattcgtgccggccggtcctggttctccggtcccgccgctcccgcagcagccatgtcgttcttcccggagctttactttaacgtggacaatggctacttggagggactggtgcgcggcctgaaggccggggtgctcagccaggccgactacctcaacctggtgcagtgcgagacgctagaggacttgaaactgcatctgcagagcactgattatggtaacttcctggccaacgaggcatcacctctgacggtgtcagtcatcgatgaccggctcaaggagaagatggtggtggagttccgccacatgaggaaccatgcctatgagccactcgccagcttcctagacttcattacttacagttacatgatcgacaacgtgatcctgctcatcacaggcacgctgcaccagcgctccatcgctgagctcgtgcccaagtgccacccactaggcagcttcgagcagatggaggccgtgaacattgctcagacacctgctgagctctacaatgccattctggtggacacgcctcttgcggcttttttccaggactgcatttcagagcaggaccttgacgagatgaacatcgagatcatccgcaacaccctctacaaggcctacctggagtccttctacaagttctgcaccctactgggcgggactacggctgatgccatgtgccccatcctggagtttgaagcagaccgccgcgccttcatcatcaccatcaattctttcggcacagagctgtccaaagaggaccgtgccaagctctttccacactgtgggcggctctaccctgagggcctggcgcagctggctcgggctgacgactatgaacaggtcaagaacgtggccgattactacccggagtacaagctgctcttcgagggtgcaggtagcaaccctggagacaagacgctggaggaccgattctttgagcacgaggtaaagctgaacaagttggccttcctgaaccagttccactttggtgtcttctatgccttcgtgaagctcaaggagcaggagtgtcgcaacatcgtgtggatcgctgaatgtatcgcccagcgccaccgcgccaaaatcgacaactacatccctatcttctagcgtcctggcccaaggctctcaattgcactctttgtgtgtgtgtgtgtgtgtgtgcgcgtgtgtgtgcgtgtgtgtgtatgtggtctgtgacaagcctgtggctcacctgcctgtccggggtgtagtacgctgtcctagcggctgcccagttctcctgaccctcttagagactgttcttaggcctgaaaaggggctgggcacccccccccaccaaggatggacgaagaccccctccagagcaaggaggccccctcagccctgtggttacagccgctgatgtatctaagaagcatgtcactttcatgttcctccctaactccctgacctgagaaccctggggcctgggggcagtttgagcctcctctcccttctgtgggtcgctcccagagccatggcccatgggaaggacagagtgtgtgtgtccttggggcctggggggatgttgctcctcagctccctccctcagccctgcccctctgagacaataaaactgccctctctaaggcaaaaaaaaaaaaaaaaaaaaaaaaa

SEQ ID NO: 4546 - protein, 351 aa, Homo sapiens
MSFFPELYFNVDNGYLEGLVRGLKAGVLSQADYLNLVQCETLEDLKLHLQSTDYGNFLANEASPLTVSVIDDRLKEKMVVEFRHMRNHAYEPLASFLDFITYSYMIDNVILLITGTLHQRSIAELVPKCHPLGSFEQMEAVNIAQTPAELYNAILVDTPLAAFFQDCISEQDLDEMNIEIIRNTLYKAYLESFYKFCTLLGGTTADAMCPILEFEADRRAFIITINSFGTELSKEDRAKLFPHCGRLYPEGLAQLARADDYEQVKNVADYYPEYKLLFEGAGSNPGDKTLEDRFFEHEVKLNKLAFLNQFHFGVFYAFVKLKEQECRNIVWIAECIAQRHRAKIDNYIPIF

SEQ ID NO: 4547 - DNA, 1873 bp, Homo sapiens
cgcgccccaggccggtgtacccccgcactccgcgccccggcctagaagctctctctccccgctccccggcccggcccccgccccgccccgccccagcccgctgggccgccatggagcgctggccttggccgtcgggcggcgcctggctgctcgtggctgcccgcgcgctgctgcagctgctgcgctcagacctgcgtctgggccgcccgctgctggcggcgctggcgctgctggccgcgctcgactggctgtgccagcgcctgctgcccccgccggccgcactcgccgtgctggccgccgccggctggatcgcgttgtcccgcctggcgcgcccgcagcgcctgccggtggccactcgcgcggtgctcatcaccggctgtgactctggttttggcaaggagacggccaagaaactggactccatgggcttcacggtgctggccaccgtattggagttgaacagccccggtgccatcgagctgcgtacctgctgctcccctcgcctaaggctgctgcagatggacctgaccaaaccaggagacattagccgcttgctagagttcaccaaggcccacaccaccagcaccggcctgtggggcctcgtcaacaacgcaggccacaatgaagtagttgctgatgcggagctgtctccagtggccactttccgtagctgcatggaggtgaatttctttggcgcgctcgagctgaccaagggcctcctgcccctgctgcgcagctcaaggggccgcatcgtgactgtggggagcccagcgggggacatgccatatccgtgcttgggggcctatggaacctccaaagcggccgtggcgctactcatggacacattcagctgtgaactccttccctggggggtcaaggtcagcatcatccagcctggctgcttcaagacagagtcagtgagaaacgtgggtcagtgggaaaagcgcaagcaattgctgctggccaacctgcctcaagagctgctgcaggcctacggcaaggactacatcgagcacttgcatgggcagttcctgcactcgctacgcctggccatgtccgacctcaccccagttgtagatgccatcacagatgcgctgctggcagctcggccccgccgccgctattaccccggccagggcctggggctcatgtacttcatccactactacctgcctgaaggcctgcggcgccgcttcctgcaggccttcttcatcagtcactgtctgcctcgagcactgcagcctggccagcctggcactaccccaccacaggacgcagcccaggacccaaacctgagccccggcccttccccagcagtggctcggtgagccatgtgcacctatggcccagccactgcagcacaggaggctccgtgagccttggttcctccccgaaaacccccagcattacgatcccccaagtgtcctggaccctggcctaaagaatcccacccccacttcatgcccactgccgatgcccaatccaggcccggtgaggccaaggtttcccagtgagcctctgcgcctctccactgtttcatgagcccaaacaccctcctggcacaacgctctaccctgcagcttggagaactccgctggatgggagtctcatgcaagacttcactgcagcctttcacaggactctgcagatagtgcctctgcaaactaaggagtgactaggtgggttggggaccccctcaggattgtttctcggcaccagtgcctcagtgctgcaattgagggctaaatcccaagtgtctcttgactggctcaagaattagggccccaactacacacccccaagccacagggaagcatgtactgtacttcccaattgccacattttaaataaagacaaatttttatttcttcta

SEQ ID NO: 4548 - protein, 405 aa, Homo sapiens
MERWPWPSGGAWLLVAARALLQLLRSDLRLGRPLLAALALLAALDWLCQRLLPPPAALAVLAAAGWIALSRLARPQRLPVATRAVLITGCDSGFGKETAKKLDSMGFTVLATVLELNSPGAIELRTCCSPRLRLLQMDLTKPGDISRLLEFTKAHTTSTGLWGLVNNAGHNEVVADAELSPVATFRSCMEVNFFGALELTKGLLPLLRSSRGRIVTVGSPAGDMPYPCLGAYGTSKAAVALLMDTFSCELLPWGVKVSIIQPGCFKTESVRNVGQWEKRKQLLLANLPQELLQAYGKDYIEHLHGQFLHSLRLAMSDLTPVVDAITDALLAARPRRRYYPGQGLGLMYFIHYYLPEGLRRRFLQAFFISHCLPRALQPGQPGTTPPQDAAQDPNLSPGPSPAVAR

SEQ ID NO: 4549 - DNA, 4828 bp, Homo sapiens
agtggcgtcggaactgcaaagcacctgtgagcttgcggaagtcagttcagactccagcccgctccagcccggcccgacccgaccgcacccggcgcctgccctcgctcggcgtccccggccagccatgggcccttggagccgcagcctctcggcgctgctgctgctgctgcaggtctcctcttggctctgccaggagccggagccctgccaccctggctttgacgccgagagctacacgttcacggtgccccggcgccacctggagagaggccgcgtcctgggcagagtgaattttgaagattgcaccggtcgacaaaggacagcctatttttccctcgacacccgattcaaagtgggcacagatggtgtgattacagtcaaaaggcctctacggtttcataacccacagatccatttcttggtctacgcctgggactccacctacagaaagttttccaccaaagtcacgctgaatacagtggggcaccaccaccgccccccgccccatcaggcctccgtttctggaatccaagcagaattgctcacatttcccaactcctctcctggcctcagaagacagaagagagactgggttattcctcccatcagctgcccagaaaatgaaaaaggcccatttcctaaaaacctggttcagatcaaatccaacaaagacaaagaaggcaaggttttctacagcatcactggccaaggagctgacacaccccctgttggtgtctttattattgaaagagaaacaggatggctgaaggtgacagagcctctggatagagaacgcattgccacatacactctcttctctcacgctgtgtcatccaacgggaatgcagttgaggatccaatggagattttgatcacggtaaccgatcagaatgacaacaagcccgaattcacccaggaggtctttaaggggtctgtcatggaaggtgctcttccaggaacctctgtgatggaggtcacagccacagacgcggacgatgatgtgaacacctacaatgccgccatcgcttacaccatcctcagccaagatcctgagctccctgacaaaaatatgttcaccattaacaggaacacaggagtcatcagtgtggtcaccactgggctggaccgagagagtttccctacgtataccctggtggttcaagctgctgaccttcaaggtgaggggttaagcacaacagcaacagctgtgatcacagtcactgacaccaacgataatcctccgatcttcaatcccaccacgtacaagggtcaggtgcctgagaacgaggctaacgtcgtaatcaccacactgaaagtgactgatgctgatgcccccaataccccagcgtgggaggctgtatacaccatattgaatgatgatggtggacaatttgtcgtcaccacaaatccagtgaacaacgatggcattttgaaaacagcaaagggcttggattttgaggccaagcagcagtacattctacacgtagcagtgacgaatgtggtaccttttgaggtctctctcaccacctccacagccaccgtcaccgtggatgtgctggatgtgaatgaagcccccatctttgtgcctcctgaaaagagagtggaagtgtccgaggactttggcgtgggccaggaaatcacatcctacactgcccaggagccagacacatttatggaacagaaaataacatatcggatttggagagacactgccaactggctggagattaatccggacactggtgccatttccactcgggctgagctggacagggaggattttgagcacgtgaagaacagcacgtacacagccctaatcatagctacagacaatggttctccagttgctactggaacagggacacttctgctgatcctgtctgatgtgaatgacaacgcccccataccagaacctcgaactatattcttctgtgagaggaatccaaagcctcaggtcataaacatcattgatgcagaccttcctcccaatacatctcccttcacagcagaactaacacacggggcgagtgccaactggaccattcagtacaacgacccaacccaagaatctatcattttgaagccaaagatggccttagaggtgggtgactacaaaatcaatctcaagctcatggataaccagaataaagaccaagtgaccaccttagaggtcagcgtgtgtgactgtgaaggggccgccggcgtctgtaggaaggcacagcctgtcgaagcaggattgcaaattcctgccattctggggattcttggaggaattcttgctttgctaattctgattctgctgctcttgctgtttcttcggaggagagcggtggtcaaagagcccttactgcccccagaggatgacacccgggacaacgtttattactatgatgaagaaggaggcggagaagaggaccaggactttgacttgagccagctgcacaggggcctggacgctcggcctgaagtgactcgtaacgacgttgcaccaaccctcatgagtgtcccccggtatcttccccgccctgccaatcccgatgaaattggaaattttattgatgaaaatctgaaagcggctgatactgaccccacagccccgccttatgattctctgctcgtgtttgactatgaaggaagcggttccgaagctgctagtctgagctccctgaactcctcagagtcagacaaagaccaggactatgactacttgaacgaatggggcaatcgcttcaagaagctggctgacatgtacggaggcggcgaggacgactaggggactcgagagaggcgggccccagacccatgtgctgggaaatgcagaaatcacgttgctggtggtttttcagctcccttcccttgagatgagtttctggggaaaaaaaagagactggttagtgatgcagttagtatagctttatactctctccactttatagctctaataagtttgtgttagaaaagtttcgacttatttcttaaagcttttttttttttcccatcactctttacatggtggtgatgtccaaaagatacccaaattttaatattccagaagaacaactttagcatcagaaggttcacccagcaccttgcagattttcttaaggaattttgtctcacttttaaaaagaaggggagaagtcagctactctagttctgttgttttgtgtatataattttttaaaaaaaatttgtgtgcttctgctcattactacactggtgtgtccctctgcctttttttttttttttaagacagggtctcattctatcggccaggctggagtgcagtggtgcaatcacagctcactgcagccttgtcctcccaggctcaagctatccttgcacctcagcctcccaagtagctgggaccacaggcatgcaccactacgcatgactaattttttaaatatttgagacggggtctccctgtgttacccaggctggtctcaaactcctgggctcaagtgatcctcccatcttggcctcccagagtattgggattacagacatgagccactgcacctgcccagctccccaactccctgccattttttaagagacagtttcgctccatcgcccaggcctgggatgcagtgatgtgatcatagctcactgtaacctcaaactctggggctcaagcagttctcccaccagcctcctttttatttttttgtacagatggggtcttgctatgttgcccaagctggtcttaaactcctggcctcaagcaatccttctgccttggccccccaaagtgctgggattgtgggcatgagctgctgtgcccagcctccatgttttaatatcaactctcactcctgaattcagttgctttgcccaagataggagttctctgatgcagaaattattgggctcttttagggtaagaagtttgtgtctttgtctggccacatcttgactaggtattgtctactctgaagacctttaatggcttccctctttcatctcctgagtatgtaacttgcaatgggcagctatccagtgacttgttctgagtaagtgtgttcattaatgtttatttagctctgaagcaagagtgatatactccaggacttagaatagtgcctaaagtgctgcagccaaagacagagcggaactatgaaaagtgggcttggagatggcaggagagcttgtcattgagcctggcaatttagcaaactgatgctgaggatgattgaggtgggtctacctcatctctgaaaattctggaaggaatggaggagtctcaacatgtgtttctgacacaagatccgtggtttgtactcaaagcccagaatccccaagtgcctgcttttgatgatgtctacagaaaatgctggctgagctgaacacatttgcccaattccaggtgtgcacagaaaaccgagaatattcaaaattccaaattttttcttaggagcaagaagaaaatgtggccctaaagggggttagttgaggggtagggggtagtgaggatcttgatttggatctctttttatttaaatgtgaatttcaacttttgacaatcaaagaaaagacttttgttgaaatagctttactgtttctcaagtgttttggagaaaaaaatcaaccctgcaatcactttttggaattgtcttgatttttcggcagttcaagctatatcgaatatagttctgtgtagagaatgtcactgtagttttgagtgtatacatgtgtgggtgctgataattgtgtattttctttgggggtggaaaaggaaaacaattcaagctgagaaaagtattctcaaagatgcatttttataaattttattaaacaattttgttaaaccataaaaaaaaaaaaa

SEQ ID NO: 4550 - protein, 882 aa, Homo sapiens
MGPWSRSLSALLLLLQVSSWLCQEPEPCHPGFDAESYTFTVPRRHLERGRVLGRVNFEDCTGRQRTAYFSLDTRFKVGTDGVITVKRPLRFHNPQIHFLVYAWDSTYRKFSTKVTLNTVGHHHRPPPHQASVSGIQAELLTFPNSSPGLRRQKRDWVIPPISCPENEKGPFPKNLVQIKSNKDKEGKVFYSITGQGADTPPVGVFIIERETGWLKVTEPLDRERIATYTLFSHAVSSNGNAVEDPMEILITVTDQNDNKPEFTQEVFKGSVMEGALPGTSVMEVTATDADDDVNTYNAAIAYTILSQDPELPDKNMFTINRNTGVISVVTTGLDRESFPTYTLVVQAADLQGEGLSTTATAVITVTDTNDNPPIFNPTTYKGQVPENEANVVITTLKVTDADAPNTPAWEAVYTILNDDGGQFVVTTNPVNNDGILKTAKGLDFEAKQQYILHVAVTNVVPFEVSLTTSTATVTVDVLDVNEAPIFVPPEKRVEVSEDFGVGQEITSYTAQEPDTFMEQKITYRIWRDTANWLEINPDTGAISTRAELDREDFEHVKNSTYTALIIATDNGSPVATGTGTLLLILSDVNDNAPIPEPRTIFFCERNPKPQVINIIDADLPPNTSPFTAELTHGASANWTIQYNDPTQESIILKPKMALEVGDYKINLKLMDNQNKDQVTTLEVSVCDCEGAAGVCRKAQPVEAGLQIPAILGILGGILALLILILLLLLFLRRRAVVKEPLLPPEDDTRDNVYYYDEEGGGEEDQDFDLSQLHRGLDARPEVTRNDVAPTLMSVPRYLPRPANPDEIGNFIDENLKAADTDPTAPPYDSLLVFDYEGSGSEAASLSSLNSSESDKDQDYDYLNEWGNRFKKLADMYGGGEDD

SEQ ID NO: 4551 - DNA, 2727 bp, Homo sapiens
agtgctcgcggcggcggcgacggcggcgggaggttcggttgtcgcccgttggccgcgcggcgccgcgctcggcggccgccattgcagggaatccctgtgctgatcgtggggcatcatatcctgtatgggaaaatcatccacctggagaaaccttttgcagtccttgtcaaacacactcctggggatcaggactgtgatgagcttggccgcgagactggcacccggtacctggtgacagcactcatcaaagacaagatccttttcaaaacccgccccaagcccattatcaccagcgtccccaagaaagtatgaaagaacctcggattttccctagagagcggccaactccttggactcgtgctccgctgccacctcgaggacggctcgacggttccctgggaccacaggggggtcctgttctgaacacaggccacccactgggtgtgaactcggatcccttccttatggcggccggttctcttggtggaaatctgaccccatttccaaggaacccatctccttttccagcttcatcaggctcattggcttcaaatccagcacctttcccggctggtgctcgtgacccaagtatggcttcttttccaagagggatgaatcccactggcacaggtgcagtttctttcccaaggcctggtggcctcttggggccaggcccaggcccaggccccaccctaaaccctaggacaggggctctgccaggcccagggcctctgtctaaccccaggttagggggtctcccaggaccaggtcctatgtccaacccaagggcaggtggtctcctgggagcaggtcctgaccccagaggtggtggtcccatgggccctggatctggacctaacctgagagccggtgttctgttaacctctgggaatggtcctcccaatcctaggccagttggcctgggcccaggaccaaaccccaatctgagatcaggctttttagggacaaaccctgcccccaggtcaggtgtgtttccaggcccaggccttgggcccaacccaagaccaagtggcctgggcccaggccctaatctagatgccagagcaggtggcctcttgggcacaggatctggtcttaacttaagaatggctggacctcaaggcctcgatcttgcccccattctaagagcagcaggtcttttaggagcaaattcagcttctttctcacaggcttctggaaacatgggcacaagcccatcctccatggcaagagtacctggccccatgggcccaaactcgggtcctagctctcggggaattggccttccagggccaaatccatctcccatgtcaagggctcctggccccataggccctaattcagctcatttctcaaggccagttggccccatgggggtaaatgccaatccctttcccaggggagcaggttcatctgccttttctcagtcttctggcacattggcatcaaacccagctaccttccaaaggtccgctggcctccagggctcaaatccaaccattttcccaagagcctctgggccacttggccccaacccagctaacttcccaagggccactggcctgcagggtccaagtccaactaccttcccaaggtctactggcccattaggccctggtcaagttactttccccaggccagctgccgggcatctgggcccttctccagctggccctgtgggtatcaacccagctcctttcacaaggccaactgggaccctgggtctcaacccagcttcctttccaaggatgaatggccctgcaggcaagagtttcgtcccatttcctagagtggggagcctccctggcacaaacccagctgctttccccagaccagggggtccaatggctgcaatgtacccaaatggaatgttgcccccttaaacaccattttccctccaggaccaccttggtttctaggcactgtggttcttggcaggggctgtcttaggtaaaagggtagttgtggagctacagtctgaagaacatagcttgggctcaagttcaaatgagccatctttttcctttgcgtttttcttgactgaaggtgagatgttatttgtggcatgtgaactgtggcaggtgggaataatcctgcccttgagagaaaggatctccagcctcccagaagcctgctgtgctttcgtcccacagctttctgcccattgtttcttactagtttcttgaattgttcttgtggacttttcctcagggatacattggcctgcaggtcccagttcacatgtagtcccctgctcaccattggagaatcagctcactgctctctagaaacgtggcgttggtgaacggaccatgcttccgtagctctgacctgggcagcttggacctggtcatcctctactgccatacctttccctgggggcttgaacacagaacagggagatggacaaccacttcaaagaaagacccaccgaatgcagtttctgcttgactgactgggcctgcagctcccttctcctgggacttagaggtggccagatttaaggcccctctactcatccaactccctcttcactggtactcccaatcaatcaaagaacctcaaaatttaaactgatgtggatgggaatatgggaattagggtgggggtgggggatgaagggaagaaatcactgtgctttgttcggcctggtgtgcaaggatggttggtggttttcctgcattgtatcttttcttactgtttctttaataaatgggatgagagggc

SEQ ID NO: 4552 - protein, 524 aa, Homo sapiens
MKEPRIFPRERPTPWTRAPLPPRGRLDGSLGPQGGPVLNTGHPLGVNSDPFLMAAGSLGGNLTPFPRNPSPFPASSGSLASNPAPFPAGARDPSMASFPRGMNPTGTGAVSFPRPGGLLGPGPGPGPTLNPRTGALPGPGPLSNPRLGGLPGPGPMSNPRAGGLLGAGPDPRGGGPMGPGSGPNLRAGVLLTSGNGPPNPRPVGLGPGPNPNLRSGFLGTNPAPRSGVFPGPGLGPNPRPSGLGPGPNLDARAGGLLGTGSGLNLRMAGPQGLDLAPILRAAGLLGANSASFSQASGNMGTSPSSMARVPGPMGPNSGPSSRGIGLPGPNPSPMSRAPGPIGPNSAHFSRPVGPMGVNANPFPRGAGSSAFSQSSGTLASNPATFQRSAGLQGSNPTIFPRASGPLGPNPANFPRATGLQGPSPTTFPRSTGPLGPGQVTFPRPAAGHLGPSPAGPVGINPAPFTRPTGTLGLNPASFPRMNGPAGKSFVPFPRVGSLPGTNPAAFPRPGGPMAAMYPNGMLPP

SEQ ID NO: 4553 - DNA, 1810 bp, Homo sapiens
ctcagttagcggtggagaggcagtatgtccggttcaatggcgactgcggaagctagcggcagcgatgggaaagggcaggaagtcgagacctcagtcacctattaccggttggaggaggtggcaaagcgcaactccttgaaggaactgtggcttgtgatccatgggcgagtctacgatgtcacccgcttcctcaacgagcaccctggaggagaagaggttctgctggaacaagctggtgtagatgcaagtgaaagctttgaagatgtaggacactcttctgatgccagagaaatgctaaagcagtactacattggtgatatccatccgagtgaccttaaacctgaaagtggtagcaaggacccttcaaaaaatgatacatgcaaaagttgctgggcatattggattttacccatcataggcgctgttctcttaggtttcctgtaccgctactacacatcggaaagcaaatcctcctgaggaggccttgctgaagttagaaagtgcatccactttggggcgaaaactagagacttgcttgggggctgcagaagtgccctctcctcgaatcctgccagttgcattcttcccccttggagccaagacgattggccagacatcacctcagatctgagaccagcgtcttccatctctcagagccttactcccaaagtacctgctcactgttccgtgttgaacaattgccggtgtttcctctcttcactggtttccatgagtacccttatatttcacaactttctgttcataagttatagtgacattgctctttggtaaaaatgcctgctttccaatactttgattgcatattagacattcttaacagggcggcagtctagtgttgaaagttttatttttccatttttcttttaagtaaattttttttaaaaaattctgatttagggctaggtgtggtggctcaggcctgtaatcctggcactttgggaggccaaggtgggaacatcgcttgaggccaagagttcaagaccagcctgggcaacatagcgagacccctatctgtattaaaaaaaaatctgatttaattcttttatttatcataaggggtttaattcctgaagtaaaggtttgcacctattaaacttaaaactgccaaatgatttttgttcttttatgtgcgtgataaaaatacaaagaatggtgtggccacctcctccctttcaagctagggcagcaggtagctcttcccagcccctgagcccagccccttcccaagtggtgccggacaaaaaactacatggccctttcgtgtcttgggggtggaaagggagggatgaattggggtgatagaaccctggtgaattcagagtaatctttctttagaaaactggtgttttctaaagaaacaggataggagtttagagaaggcaccaaagctttcactttggtttggcaccagtttctaaccatctgttttttctaccctagctatcttttattggtaaaatataaatgtataattatgtttgtagagctttaccaaggagtttccctcctttttttgtttgttgattagcaaatttttgattctccattttccaaaagtaagagactccagcatggccttctgtttgccccgcagtaaagtaacttccatataaaatggtatttgaaagtgagagttcatgacaacagaccgttttccatttcatctgtattttatctccgtgactccaacttgtgggtttgttctgtttttccatgagaataaaatactggcggttttttttcaaaaaaaaaaaaaaaaaaaaaaaaaaaaaaaaaaaaaaaaaaaaaa

SEQ ID NO: 4554 - protein, 146 aa, Homo sapiens
MATAEASGSDGKGQEVETSVTYYRLEEVAKRNSLKELWLVIHGRVYDVTRFLNEHPGGEEVLLEQAGVDASESFEDVGHSSDAREMLKQYYIGDIHPSDLKPESGSKDPSKNDTCKSCWAYWILPIIGAVLLGFLYRYYTSESKSS

SEQ ID NO: 4555 - DNA, 1985 bp, Homo sapiens
cacacacccctacaatcccctcccccagccccgagagacttttcttgacttccaccagttgctccggcgggtgagagtggagaggcccctccttcatcccccaggctccctcccttcctggagctgcagcctcagcatcctccgcccagcaccccaggattcaggcgttgggtcccgcccttgtaggctgtccacctcaaacgggccggacaggatatataagagagaatgcaccgtgcactacacacgcgactcccacaaggttgcagccggagccgcccagctcaccgagagcctagttccggccagggtcgccccggcaaccacgagcccagccaatcagcgccccggactgcaccagagccatggtcggcagaagagcactgatcgtactggctcactcagagaggacgtccttcaactatgccatgaaggaggctgctgcagcggctttgaagaagaaaggatgggaggtggtggagtcggacctctatgccatgaacttcaatcccatcatttccagaaaggacatcacaggtaaactgaaggaccctgcgaactttcagtatcctgccgagtctgttctggcttataaagaaggccatctgagcccagatattgtggctgaacaaaagaagctggaagccgcagaccttgtgatattccagagtaagaaggcagtgctttccatcaccactggtggcagtggctccatgtactctctgcaagggatccacggggacatgaatgtcattctctggccaattcagagtggcattctgcatttctgtggcttccaagtcttagaacctcaactgacatatagcattgggcacactccagcagacgcccgaattcaaatcctggaaggatggaagaaacgcctggagaatatttgggatgagacaccactgtattttgctccaagcagcctctttgacctaaacttccaggcaggattcttaatgaaaaaagaggtacaggatgaggagaaaaacaagaaatttggcctttctgtgggccatcacttgggcaagtccatcccaactgacaaccagatcaaagctagaaaatgagattccttagcctggatttccttctaacatgttatcaaatctgggtatctttccaggcttccctgacttgctttagtttttaagatttgtgtttttctttttccacaaggaataaatgagagggaatcgactgtattcgtgcatttttggatcatttttaactgattcttatgattactatcatggcatataaccaaaatccgactgggctcaagaggccacttagggaaagatgtagaaagatgctagaaaaatgttctttaaaggcatctacacaatttaattcctctttttagggctaaagttttagggtacagtttggctaggtatcattcaactctccaatgttctattaatcacctctctgtagtttatggcagaagggaattgctcagagaaggaaaagactgaatctacctgccctaagggacttaacttgtttggtagttagccatctaatgcttgtttatgatatttcttgctttcaattacaaagcagttactaatatgcctagcacaagtaccactcttggtcagcttttgttgtttatatacagtacacagataccttgaaaggaagagctaataaatctcttctttgctgcagtcatctactttttttttaattaaaaaaaatttttttttgaagcagtcttgctctgttacccaggctggagtgcagtggtgtgatctcggctcactgcaacctctgcctcccaggttccagcaattctcctgcctcagcctccctagtagctgggatgacaggcgcctgccatcatgcctgactaatttttgtatttttagtagagacggcgtttcaccatgttggccaggctggtctcgaactcctgacctcaggtgatctgcctgcctcagcctcccaaagtgctgggattacaggcgtga

SEQ ID NO: 4556 - DNA, 1733 bp, Homo sapiens
ctctcacgcagccaacatggctccagtggagcacgttgtggcggatgctggggctttcctgcggcatgcggctctgcaggacatcgggaagaacatttacaccatccgggaggtggtcactgagattcgggacaaggccacacgcaggcggctcgctgtcctgccctacgagctgcggttcaaggagcccttaccggaatacgtgcggctggtgactgagttttcaaagaaaacaggagactaccccagcctctctgccacggacatccaagtgcttgcactcacataccagttggaagcagagtttgttggggtgtctcacctaaaacaagaaccacagaaggttaaggtgagctcatcgattcagcacccagaaacacctctgcacatttctggtttccatctgccctacaagcctaaacccccacaagaaacagaaaaaggacactcagcttgtgagcctgagaacctggaatttagttccttcatgttctggagaaaccctttgcccaacatcgatcatgaactgcaggagctgctgattgacagaggtgaggacgttccaagtgaggaggaggaggaggaagaaaacgggtttgaagacagaaaagatgacagcgatgacgacgggggtggctggataacccccagtaacatcaagcagatccagcaggagctggagcagtgtgacgtccccgaggacgtgcgggttggctgcctgaccacagacttcgccatgcagaatgttctgctgcagatggggctgcacgtgctggcggtgaacggcatgctgattcgtgaggcccggagctacatcttgcgctgccatggctgtttcaagacaacgtctgacatgagccgagtgttctgctcacactgtgggaacaagaccctgaagaaagtgtccgtgaccgtcagcgacgacggcaccctgcacatgcacttctcccgcaaccccaaggtgctgaacccccgcggcctccggtactcgcttcccactcccaaagggggcaaatacgccatcaacccccatctcaccgaggatcagcgcttccctcagctgcgactctcccaaaaggccaggcagaaaaccaacgtgttcgcccctgactacatcgccggggtgtcaccctttgtcgagaatgacatctccagccgctcagctaccctgcaggtccgggacagcaccttgggagctgggcggagacgcttaaatcccaacgcttccagaaagaagtttgtgaagaaaaggtgaagagcgagttcccgcaggcaaattggatgggcgtctggccgccgtggagttccggtgacccatttccccagccgtgtcgtctccaggaccacccgatggaaataacaggcgggcttcacggtgcggctctgtccgcccatgccccgctgggtctgcagggaactggactgtcccatggcctgtgagcaccggagcgcctggctgcctgccaaggaagtgcaattgcataaaaacagaaagaacaacgccctggagccaatcttcaagaaaggaatttccaaaggataatatttttctaataaatgcggctgcaacctcctgtgcatttaattaaataggccaaatttttgctgcttaggtcatctcaaggctgatacttgagctgtgtgcccagagatcatgcatttagatttatatttttgccagaaaatacaaggttataataaaactaagaactaccaaaaaaaaaaaaaaaaaa

SEQ ID NO: 4557 - protein, 412 aa, Homo sapiens [sequence omitted]

SEQ ID NO: 4558 - DNA, 2652 bp, Homo sapiens
cttttctcgggacgggagaggccgtgtagcgtcgccgttactccgaggagagaccagtcggtagaggagaagtccaggttagagggaagtgggaggcactttgctgtcttcaatcgaagttgagggtgcaaaaatgcagagtaataaaacttttaacttggagaagcaaaaccatactccaagaaagcatcatcaacatcaccaccagcagcaacagctgcagccgccaccaccgccaatacctgcaaatgggcaacaggccagcagccaaaatgaaggctttgactatttggcctgaagaattttagaaaaccaggagagaagaccttcacccaacgaagccgtctttttgtgggaaatcttcctcccgacatcactgaggaagaaatgaggaaactatttgagaaatatggaaaggcaggcgaagtcttcattcataaggattaaggatttggctttatccgcttggaaacacgaaccctagcggagattgcgaaagtggagctggacaatatgccactctgtggaaagcagctgcgtgtgcgcttttcctgccatagtgcatcccttacagttcgaaaccttcctcagtatgtgtccaacgaagtgctggaagaagccttttctgtgtttggccaggtagagagggctgtagtcattgtggatgatcgaggaaggccctcaggaaaaggcattgttgagttctcagggaagccagctgctgggaaagctctggacagacgcagtgaaggctccttcctgctaaccacatttcctcgtcctgtgactatggagcccatggaccagttagatgatgaagggggacttccagagaagctggttataaaaaaccagcaatttcacaaggaacgagagcaaccacccagatttgcacagcctggctcctttgagtatgaatatgccatgcgctggaaggcactcattgagatggagaagcagcagcaggaccaagtggaccgcaacatcaaagaggctcgtgagaagccagagatggagatggaggctgcacgccataagcaccaggtcatgctaatgagacagaatttgatgaggcgccaagaagaacttcggaggatggaagagctgcacaaccaagaggtgcaaaaacgaaagcaactggagctcaggcaggaggaagagcgcaggcgccctgaagaagagatgcggcggcagcaagaagaaatgatgcagccacagcaggaaggattcaagggaaccttccctgatgtgagagagcaggagatttggatgggtcagatggctatgggaggtgctatgggcataaacagcagaggtgccttgacccctgctcctgtgccagctggtaccccagctcctccaggacctgccactatgatgccggatggaactttgggattgaccccaccaacaactgaacgctttggtcaggctgctacaatggaaggaattggggcaattggtgaaactcctcctgcattcaaccatgcagctcctggagctgaatttgctccaaacaaacgtcgccgatactaataagttgcagtgtctagtttctcaaaacccttaaaagaaggaccctttttggaccagccagaattctaccctggaaaagtgttagggattccttccaatagttagatctaccctgcctgtactactctagggagtatgctggaggcagaggacaagggaggggtggtattaaacaagtcaattctatgtagtatattatttaatcagttctgtgtggtgcattcctgaagtctcaaatgtgattgttgagggcctggggaaaccatggcaaagtagatccagttagagcccattaatcttgatcattctgtttttttggtttgtttgttgtttttttttttttttttttttgtccatcttgtttcatttgcttgccctgcccccgagatggagtcttactctgtcgcccaggctggagtgtagtggcacgatctcggctcactgcaatctctgcctctcgggttcaagcttgtccaggctgatcttgaactcctgacctcgtgatcccctgcctcagcctcccaaaatgctgggattacaggggtgagccaccgtgcccaacctcacttgctttcttatccttacactcccccagtcccagagaaactgccacatacaccacaaaaaccaaacatcccccaatgaccttagccgcattgctccattcactcccaggtgagaattcaggtaaacgtccacaaaggtcacaggcaacgtacatacggttctattatatcccatatattaccccttcatgtcctaaagaagacattttctcttagagattttcattttagtatatctttaaaaaaaaatcttgtgttaacttgcctccatctttttcttgggtgaggacacccaggaatgacccttttgtgtctatgatactgctgttcacagcttttcttgataggcctagtacaatcttgggaacagggttactgtatactgaaggtctgacagtagctcttagactcgcctatcttaggtagtcatgctgtgccttttttttccattggtgtattgtatttgatttgtctctgatatatttggagtttttctgagaactggagcagtaatgcagcatcgacctattaaaatacattttaagccttt

SEQ ID NO: 4559 - protein, 340 aa, Homo sapiens [sequence omitted]

SEQ ID NO: 4560 - DNA, 710 bp, Homo sapiens
gcagtgaaggctccttcctgctaaccacatttcctcgtcctgtgactatggagcccatggaccagttagatgatgaagggggacttccagagaagctggttataaaaaaccagcaatttcacaaggaacgagagcaaccacccagatttgcacagcctggctcctttgagtatgaatatgccatgcgctggaaggcactcattgagatggagaagcagcagcaggaccaagtggaccgcaacatcaaagaggctcgtgagaagccagagatggagatggaggctgcacgccataagcaccaggtcatgctaatgagacagaatttgatgaggcgccaagaagaacttcggaggatggaagagctgcacaaccaagaggtgcaaaaacgaaagcaatctctgcctctcgggttcaagcttgtccaggctgatcttgaactcctgacctcgtgatcccctgcctcagcctcccaaaatgctgggattacaggggtgagccaccgtgcccaacctcacttgctttcttatccttacactcccccagtcccagagaaactgccacatacaccacaaaaaccaaacatcccccaatgaccttagccgcattgctccattcactcccaggtgagaattcaggtaaacgtccacaaaggtcacaggcaacgtacatacggttctattatatcccatatattaccccttcatgtccta

SEQ ID NO: 4561 - DNA, 640 bp, Homo sapiens
cttttctcgggacgggagaggccgtgtagcgtcgccgttactccgaggagagaccagtcggtagaggaagagcgcaggcgccctgaagaagagatgcggcggcagcaagaagaaatgatgcagccacagcaggaaggattcaagggaaccttccctgatgtgagagagcaggagatttggatgggtcagatggctatgggaggtgctatgggcataaacagcagaggtgccttgacccctgctcctgtgccagctggtaccccagctcctccaggacctgccactatgatgccggatggaactttgggattgaccccaccaacaactgaacgctttggtcaggctgctacaatggaaggaattggggcaattggtgaaactcctcctgcattcaaccatgcagctcctggagctgaatttgctccaaacaaacgtcgccgatactaataagttgcagtgtctagtttctcaaaacccttaaaagaaggaccctttttggaccagccagaattctaccctggaaaagtgttagggattccttccaatagttagatctaccctgcctgtactactctagggagtatgctggaggcagaggacaagggaggggtggtattaaacaagtcaattctatgtagta

SEQ ID NO: 4562 - DNA, 3288 bp, Homo sapiens
agtggtgtccgcaaagcccaaggtgcataatcgtcaacctcgaattaactcctacgtggaggtggcggtggatggactccccagtgagaccaagaagactgggaagcgcattgggagctctgagcttctctggaatgagatcatcattttgaatgtcacggcacagagtcatttagatttaaaggtctggagctgccataccttgagaaatgaactgctaggcaccgcatctgtcaacctctccaacgtcttgaagaacaatgggggcaaaatggagaacatgcagctgaccctgaacctgcagacggagaacaaaggcagcgttgtctcaggcggagagctgacaattttcctggacgggccaactgttgatctgggaaatgtgcctaatggcagtgccctgacagatggatcacagctgccttcgagagactccagtggaacagcagtagctccagagaaccggcaccagccccccagcacaaactgctttggtggaagatcccggacgcacagacattcgggtgcttcagccagaacaaccccagcaaccggcgagcaaagccccggtgctcggagccggcaccgccagcccgtcaagaactcaggccacagtggcttggccaatggcacagtgaatgatgaacccacaacagccactgatcccgaagaaccttccgttgttggtgtgacgtccccacctgctgcacccttgagtgtgaccccgaatcccaacacgacttctctccctgccccagccacaccggctgaaggagaggaacccagcacttcgggtacacagcagctcccagcggctgcccaggcccccgacgctctgcctgctggatgggaacagcgagagctgcccaacggacgtgtctattatgttgaccacaataccaagaccaccacctgggagcggccccttcctccaggctgggaaaaacgcacagatccccgaggcaggttttactatgtggatcacaatactcggaccaccacctggcagcgtccgaccgcggagtacgtgcgcaactatgagcagtggcagtcgcagcggaatcagctccagggggccatgcagcacttcagccaaagattcctctaccagtcttcgagtgcttcgactgaccatgatcccctgggccccctccctcctggctgggagaagagacaggacaatggacgggtgtattacgtgaaccataacactcgcacgacccagtgggaggatccccggacccaggggatgatccaggaaccagctctgcccccaggatgggagatgaaatacaccagcgagggggtgcgatactttgtggaccacaatacccgcaccaccacctttaaggatcctcgcccggggtttgagtcggggacgaagcaaggttcccctggtgcttatgaccgcagttttcggtggaagtatcaccagttccgtttcctctgccattcaaatgccctacctagccacgtgaagatcagcgtttccaggcagacgcttttcgaagattccttccaacagatcatgaacatgaaaccctatgacctgcgccgccggctctacatcatcatgcgtggcgaggagggcctggactatgggggcatcgccagagagtggtttttcctcctgtctcatgaggtgctcaaccctatgtattgtttatttgaatatgccggaaagaacaattactgcctgcagatcaaccccgcctcctccatcaacccggaccacctcacctactttcgctttataggcagattcatcgccatggcgctgtaccatggaaagttcatcgacacgggcttcaccctccctttctacaagcggatgctcaataagagaccaaccctgaaagacctggagtccattgaccctgagttctacaactccattgtctggatcaaagagaacaacctggaagaatgtggcctggagctgtacttcatccaggacatggagatactgggcaaggtgacgacccacgagctgaaggagggcggcgagagcatccgggtcacagaggagaacaaggaagagtacatcatgctgctgactgactggcgtttcacccgaggcgtggaagagcagaccaaagccttcctggatggcttcaacgaggtggccccgctggagtggctgcgctactttgacgagaaagagctggagctgatgctgtgcggcatgcaggagatagacatgagcgactggcagaagagcaccatctaccggcactacaccaagaacagcaagcagatccagtggttctggcaggtggtgaaggagatggacaacgagaagaggatccggctgctgcagtttgtcaccggtacctgccgcctgcccgtcgggggatttgccgaactcatcggtagcaacggaccacagaagttttgcattgacaaagttggcaaggaaacctggctgcccagaagccacacctgcttcaaccgtctggatcttccaccctacaagagctacgaacagctgagagagaagctgctgtatgccattgaggagaccgagggctttggacaggagtaaccgaggccgcccctcccacgccccccagcgcacatgtagtcctgagtcctccctgcctgagaggccactggccccgcagcccttgggaggcccccgtggatgtggccctgtgtgggaccacactgtcatctcgctgctggcagaaaagcctgatcccaggaggccctgcagttcccccgacccgcggatggcagtctggaataaagccccctagttgcctttggccccacctttgcaaagttccagagggctgaccctctctgcaaaactctcccctgtcctctagaccccaccctgggtgtatgtgagtgtgcaagggaaggtgttgcatccccaggggctgccgcagaggccggagacctcctggactagttcggcgaggagactggccactgggggtggctgttcgggactgagagcgccaagggtctttgccagcaaaggaggttctgcctgtaattgagcctctctgatgatggagatgaagtgaaggtctgagggagcgggccctggggcgaggccatctctgcctgcctccctagcaggcgccagcggtggaggctgagtcgcaggacacatgccggccagttaattcattctcagccaatgaaggtttgtctaagctgcctgggtatccacgggacaaaaacagcaaactccctcagactttgtccatgtataaacttgaagtggttgtgttgtagggttgcaggttttttgttacgctgctgtcactttctgtc

SEQ ID NO: 4563 - protein, 870 aa, Homo sapiens
MASASSSRAGVALPFEKSQLTLKVVSAKPKVHNRQPRINSYVEVAVDGLPSETKKTGKRIGSSELLWNEIIILNVTAQSHLDLKVWSCHTLRNELLGTASVNLSNVLKNNGGKMENMQLTLNLQTENKGSVVSGGELTIFLDGPTVDLGNVPNGSALTDGSQLPSRDSSGTAVAPENRHQPPSTNCFGGRSRTHRHSGASARTTPATGEQSPGARSRHRQPVKNSGHSGLANGTVNDEPTTATDPEEPSVVGVTSPPAAPLSVTPNPNTTSLPAPATPAEGEEPSTSGTQQLPAAAQAPDALPAGWEQRELPNGRVYYVDHNTKTTTWERPLPPGWEKRTDPRGRFYYVDHNTRTTTWQRPTAEYVRNYEQWQSQRNQLQGAMQHFSQRFLYQSSSASTDHDPLGPLPPGWEKRQDNGRVYYVNHNTRTTQWEDPRTQGMIQEPALPPGWEMKYTSEGVRYFVDHNTRTTTFKDPRPGFESGTKQGSPGAYDRSFRWKYHQFRFLCHSNALPSHVKISVSRQTLFEDSFQQIMNMKPYDLRRRLYIIMRGEEGLDYGGIAREWFFLLSHEVLNPMYCLFEYAGKNNYCLQINPASSINPDHLTYFRFIGRFIAMALYHGKFIDTGFTLPFYKRMLNKRPTLKDLESIDPEFYNSIVWIKENNLEECGLELYFIQDMEILGKVTTHELKEGGESIRVTEENKEEYIMLLTDWRFTRGVEEQTKAFLDGFNEVAPLEWLRYFDEKELELMLCGMQEIDMSDWQKSTIYRHYTKNSKQIQWFWQVVKEMDNEKRIRLLQFVTGTCRLPVGGFAELIGSNGPQKFCIDKVGKETWLPRSHTCFNRLDLPPYKSYEQLREKLLYAIEETEGFGQE

SEQ ID NO: 4564 - DNA, 3344 bp, Homo sapiens
ggtacagctgcgcgtctgcgggaataggtgcagcgggcccttggcgggggactctgagggaggagctggggacggcgaccctaggagagttctttggggtgactttcaagatggactctactctaacagcaagtgaaatccggcagcgatttatagatttcttcaagaggaacgagcatacgtatgttcactcgtctgccaccatcccattggatgaccccactttgctctttgccaatgcaggcatgaaccagtttaaacccattttcctgaacacaattgacccatctcaccccatggcaaagctgagcagagctgccaatacccagaagtgcatccgggctgggggcaaacaaaatgacctggacgatgtgggcaaggatgtctatcatcacaccttcttcgagatgctgggctcttggtcttttggagattactttaaggaattggcatgtaagatggctctggaactcctcacccaagagtttggcattcccattgaaagactttatgttacttactttggcggggatgaagcagctggcttagaagcagatctggaatgcaaacagatctggcaaaatttggggctggatgacaccaaaatcctcccaggcaacatgaaggataacttctgggagatgggtgacacgggcccctgtggtccttgcagtgagatccactacgaccggattggtggtcgggacgccgcacatcttgtcaaccaggacgaccctaatgtgctggagatctggaaccttgtgttcatccagtataacagggaagctgatggcattctgaaacctcttcccaagaaaagcattgacacagggatgggcctggaacgactggtatctgtgctgcagaataagatgtccaactatgacactgacctttttgtcccttactttgaagccattcagaagggcacaggtgcccgaccatacactgggaaagttggtgctgaggatgccgatgggattgacatggcctaccgggtgctggctgaccatgctcggaccatcactgtggcactggctgatggtggccggcctgacaacacagggcgtggatatgtgttgagacggattctccgccgagctgtccgatacgcccatgaaaagctcaatgccagcaggggcttctttgctacgttagtggatgttgtcgtccagtccctgggagatgcatttcctgagctgaagaaggacccagacatggtgaaggacatcattaatgaagaagaggtgcagtttctcaagactctcagcagagggcgtcgcatcctggacaggaaaattcagagcctgggagacagcaagaccattcccggagacactgcttggctcctctatgacacctatgggtttccagtggatctgactggactgattgctgaagagaagggcctggtggtagacatggatggctttgaagaggagaggaaactggcccagctgaaatcacagggcaagggagctggtggggaagacctcattatgctggacatttacgctatcgaagagctccgggcacggggtctggaggtcacagatgattccccaaagtacaattaccatttggactccagtggtagctatgtatttgagaacacagtggctacggtgatggctctgcgcagggagaagatgttcgtggaagaggtgtccacaggccaggagtgtggagtggtgctggacaagacctgtttctatgctgagcaaggaggccagatctatgacgaaggctacctggtgaaggtggatgacagcagtgaagataaaacagagtttacagtgaagaatgctcaggtccgaggagggtatgtgctacacattggaaccatctacggtgacctgaaagtgggggatcaggtctggctgtttattgatgagccccgacgaagacccatcatgagcaaccacacagctacgcacattctgaacttcgccctgcgctcagtgcttggggaagctgaccagaaaggctcattggttgctcctgaccgcctcagatttgactttactgccaagggagccatgtccacccaacagatcaagaaggctgaagagattgctaatgagatgattgaggcagccaaggccgtctatacccaggattgccccctggcagcagcgaaagccatccagggcctacgggctgtgtttgatgagacctatcctgaccctgtgcgagtcgtctccattggggtcccggtgtccgagttgctggatgacccctctgggcctgctggctccctgacttctgttgagttctgtgggggaacgcacctgcggaactcgagtcatgcaggagcttttgtgatcgtgacggaagaagccattgccaagggtatccggaggattgtggctgtcacaggtgccgaggcccagaaggccctcaggaaagcagagagcttgaagaaatgtctctctgtcatggaagccaaagtgaaggctcagactgctccaaacaaggatgtgcagagggagatcgctgaccttggagaggccctggccactgcagtcatcccccagtggcagaaggatgaattgcgggagactctcaaatccctaaagaaggtcatggatgacttggaccgagccagcaaagccgatgtccagaaacgagtgttagagaagacgaagcagttcatcgacagcaaccccaaccagcctcttgtcatcctggagatggagagcggcgcctcagccaaggccctgaatgaagccttgaagctcttcaagatgcactcccctcagacttctgccatgctcttcacggtggacaatgaggctggcaagatcacgtgcctgtgtcaagtcccccagaatgcagccaatcggggcttaaaagccagcgagtgggtgcagcaggtgtcaggcttgatggacggtaaaggtggtggcaaggatgtgtctgcacaggccacaggcaagaacgttggctgcctgcaggaggcgctgcagctggccacttccttcgcccagctgcgcctcggggatgtaaagaactgagtggggaaggaggaggctcccactggatccatccgtccagccaagagctcttcatctgctacaagaacatttgaatcttgggacctttaaagagcccctcctaacccagcagtaactggaacacacttgggagcagtcctatgtctcagtgccccttaaatttctgccctgagccctccacgtcagtgccatcggtctagaaccactaaccccgcattgctgttgatcgtcacgctcgcatctatagataacggctctccagacctgagctttccgcgtcagcaagtaggaatcgtttttgctgcagagaataaaaggaccacgtgc

SEQ ID NO: 4565 - protein, 968 aa, Homo sapiens
MDSTLTASEIRQRFIDFFKRNEHTYVHSSATIPLDDPTLLFANAGMNQFKPIFLNTIDPSHPMAKLSRAANTQKCIRAGGKQNDLDDVGKDVYHHTFFEMLGSWSFGDYFKELACKMALELLTQEFGIPIERLYVTYFGGDEAAGLEADLECKQIWQNLGLDDTKILPGNMKDNFWEMGDTGPCGPCSEIHYDRIGGRDAAHLVNQDDPNVLEIWNLVFIQYNREADGILKPLPKKSIDTGMGLERLVSVLQNKMSNYDTDLFVPYFEAIQKGTGARPYTGKVGAEDADGIDMAYRVLADHARTITVALADGGRPDNTGRGYVLRRILRRAVRYAHEKLNASRGFFATLVDVVVQSLGDAFPELKKDPDMVKDIINEEEVQFLKTLSRGRRILDRKIQSLGDSKTIPGDTAWLLYDTYGFPVDLTGLIAEEKGLVVDMDGFEEERKLAQLKSQGKGAGGEDLIMLDIYAIEELRARGLEVTDDSPKYNYHLDSSGSYVFENTVATVMALRREKMFVEEVSTGQECGVVLDKTCFYAEQGGQIYDEGYLVKVDDSSEDKTEFTVKNAQVRGGYVLHIGTIYGDLKVGDQVWLFIDEPRRRPIMSNHTATHILNFALRSVLGEADQKGSLVAPDRLRFDFTAKGAMSTQQIKKAEEIANEMIEAAKAVYTQDCPLAAAKAIQGLRAVFDETYPDPVRVVSIGVPVSELLDDPSGPAGSLTSVEFCGGTHLRNSSHAGAFVIVTEEAIAKGIRRIVAVTGAEAQKALRKAESLKKCLSVMEAKVKAQTAPNKDVQREIADLGEALATAVIPQWQKDELRETLKSLKKVMDDLDRASKADVQKRVLEKTKQFIDSNPNQPLVILEMESGASAKALNEALKLFKMHSPQTSAMLFTVDNEAGKITCLCQVPQNAANRGLKASEWVQQVSGLMDGKGGGKDVSAQATGKNVGCLQEALQLATSFAQLRLGDVKN

SEQ ID NO: 4566 - DNA, 1806 bp, Homo sapiens
gtagtggggctggagcagagcctgccgcgaacccccggagcccacgatccctcgtgccatccctcgaatccaccagcacgagcgtcccacccgcgcctgggaccatggccactgactcatgggccctggcggtggacgagcaggaagctgcggctgagtcgttgagcaacttgcatcttaaggaagagaaaatcaaaccagataccaatggtgctgttgtcaagaccaatgccaatgcagagaagacagatgaagaagagaaagaggacagagctgcccagtccttactcaacaagctgatcagaagcaaccttgttgataacacaaaccaagtggaagtcctgcagcgggatccaaactcccctctgtactcggtgaagtcttttgaagagcttcggctgaaaccacagcttctccaaggagtctatgccatgggtttcaatcgtccatccaagatacaagagaacgcattgccactgatgcttgctgagcccccacagaacttaattgcccaatctcagtctggtactggtaaaacagctgccttcgtgctggccatgcttagccaagtagaacctgcaaacaaatacccccagtgtctatgtctctccccaacgtatgagctcgccctccaaacaggaaaagtgattgaacaaatgggcaaattttaccctgaactgaagctagcttatgctgttcgaggcaataaattggaaagaggccagaagatcagtgagcagattgtcattggcacccctgggactgtgctggactggtgctccaagctcaagttcattgatcccaagaaaatcaaggtgtttgttctggatgaggctgatgtcatgatagccactcagggccaccaagatcagagcatccgcatccagaggatgctgcccaggaactgccagatgctgcttttctccgccacctttgaagactctgtgtggaagtttgcccagaaagtggtcccagacccaaacgttatcaaactgaagcgtgaggaagagaccctggacaccatcaagcagtactatgtcctgtgcagcagcagagacgagaagttccaggccttgtgtaacctctacggggccatcaccattgctcaagccatgatcttctgccatactcgcaaaacagctagttggctggcagcagagctctcaaaagaaggccaccaggtggctctgctgagtggggagatgatggtggaacagagggctgcagtgattgagcgcttccgagagggcaaagagaaggttttggtgaccaccaacgtgtgtgcccgcggcattgatgttgaacaagtgtctgtcgtcatcaactttgatcttcccgtggacaaggacgggaatcctgacaatgagacctacctgcaccggatcgggcgcacgggccgctttggcaagaggggcctggcagtgaacatggtggacagcaagcacagcatgaacatcctgaacagaatccaggagcattttaataagaagatagaaagattggacacagatgatttggacgagattgagaaaatagccaactgagaagctccaccagccactgatgccagccctggcactgcccctgcacaggagacaagtgcgttcagggcacaggccccgacatcaccccaaggacaacggcacaagtagagagaaactacctacctcacttcaaattatgtttggacttgacaaaaatgtatgcaaatgatgggggatggtagaaaaaaattatttacacaaccttggaagattaggcatgaatacacagagatttaccttttggaaaaaaaaaaaaaaaaaa

SEQ ID NO: 4567 - protein, 479 aa, Homo sapiens
MATDSWALAVDEQEAAAESLSNLHLKEEKIKPDTNGAVVKTNANAEKTDEEEKEDRAAQSLLNKLIRSNLVDNTNQVEVLQRDPNSPLYSVKSFEELRLKPQLLQGVYAMGFNRPSKIQENALPLMLAEPPQNLIAQSQSGTGKTAAFVLAMLSQVEPANKYPQCLCLSPTYELALQTGKVIEQMGKFYPELKLAYAVRGNKLERGQKISEQIVIGTPGTVLDWCSKLKFIDPKKIKVFVLDEADVMIATQGHQDQSIRIQRMLPRNCQMLLFSATFEDSVWKFAQKVVPDPNVIKLKREEETLDTIKQYYVLCSSRDEKFQALCNLYGAITIAQAMIFCHTRKTASWLAAELSKEGHQVALLSGEMMVEQRAAVIERFREGKEKVLVTTNVCARGIDVEQVSVVINFDLPVDKDGNPDNETYLHRIGRTGRFGKRGLAVNMVDSKHSMNILNRIQEHFNKKIERLDTDDLDEIEKIAN

SEQ ID NO: 4568 - DNA, 1997 bp, Homo sapiens
gtactatcctccttacttttgggtcgggccctccgggaagatggcggccgtgcaggcggccgaggtgaaagtggatggcagcgagccgaaactgagcaagaatgagctgaagagacgcctgaaagctgagaagaaagtagcagagaaggaggccaaacagaaagagctcagtgagaaacagctaagccaagccactgctgctgccaccaaccacaccactgataatggtgtgggtcctgaggaagagagcgtggacccaaatcaatactacaaaatccgcagtcaagcaattcatcagctgaaggtcaatggggaagacccatacccacacaagttccatgtagacatctcactcactgacttcatccaaaaatatagtcacctgcagcctggggatcacctgactgacatcaccttaaaggtggcaggtaggatccatgccaaaagagcttctgggggaaagctcatcttctatgatcttcgaggagagggggtgaagttgcaagtcatggccaattccagaaattataaatcagaagaagaatttattcatattaataacaaactgcgtcggggagacataattggagttcaggggaatcctggtaaaaccaagaagggtgagctgagcatcattccgtatgagatcacactgctgtctccctgtttgcatatgttacctcatcttcactttgggctcaaagacaaggaaacaaggtatcgccagagatacttggacttgatcctgaatgactttgtgaggcagaaatttatcatccgctctaagatcatcacatatataagaagtttcttagatgagctgggattcctagagattgaaactcccatgatgaacatcatcccagggggagccgtggccaagcctttcatcacttatcacaacgagctggacatgaacttatatatgagaattgctccagaactctatcataagatgcttgtggttggtggcatcgaccgggtttatgaaattggacgccagttccggaatgaggggattgatttgacgcacaatcctgagttcaccacctgtgagttctacatggcctatgcagactatcacgatctcatggaaatcacggagaagatggtttcagggatggtgaagcatattacaggcagttacaaggtcacctaccacccagatggcccagagggccaagcctacgatgttgacttcaccccacccttccggcgaatcaacatggtagaagagcttgagaaagccctggggatgaagctgccagaaacgaacctctttgaaactgaagaaactcgcaaaattcttgatgatatctgtgtggcaaaagctgttgaatgccctccacctcggaccacagccaggctccttgacaagcttgttggggagttcctggaagtgacttgcatcaatcctacattcatctgtgatcacccacagataatgagccctttggctaaatggcaccgctctaaagagggtctgactgagcgctttgagctgtttgtcatgaagaaagagatatgcaatgcgtatactgagctgaatgatcccatgcggcagcggcagctttttgaagaacaggccaaggccaaggctgcaggtgatgatgaggccatgttcatagatgaaaacttctgtactgccctggaatatgggctgccccccacagctggctggggcatgggcattgatcgagtcgccatgtttctcacggactccaacaacatcaaggaagtacttctgtttcctgccatgaaacccgaagacaagaaggagaatgtagcaaccactgatacactggaaagcacaacagttggcacttctgtctagaaaataataattgcaagttgtataactcaggcgtctttgcatttctgcgaaagatcaaggtctgcaagggaattcttgtgtgctgctttccatttgacaccgcagttctgttcagccatcagaagagagacaaggaattaaaaatttctttttaatcctgtta

SEQ ID NO: 4569 - protein, 597 aa, Homo sapiens
MAAVQAAEVKVDGSEPKLSKNELKRRLKAEKKVAEKEAKQKELSEKQLSQATAAATNHTTDNGVGPEEESVDPNQYYKIRSQAIHQLKVNGEDPYPHKFHVDISLTDFIQKYSHLQPGDHLTDITLKVAGRIHAKRASGGKLIFYDLRGEGVKLQVMANSRNYKSEEEFIHINNKLRRGDIIGVQGNPGKTKKGELSIIPYEITLLSPCLHMLPHLHFGLKDKETRYRQRYLDLILNDFVRQKFIIRSKIITYIRSFLDELGFLEIETPMMNIIPGGAVAKPFITYHNELDMNLYMRIAPELYHKMLVVGGIDRVYEIGRQFRNEGIDLTHNPEFTTCEFYMAYADYHDLMEITEKMVSGMVKHITGSYKVTYHPDGPEGQAYDVDFTPPFRRINMVEELEKALGMKLPETNLFETEETRKILDDICVAKAVECPPPRTTARLLDKLVGEFLEVTCINPTFICDHPQIMSPLAKWHRSKEGLTERFELFVMKKEICNAYTELNDPMRQRQLFEEQAKAKAAGDDEAMFIDENFCTALEYGLPPTAGWGMGIDRVAMFLTDSNNIKEVLLFPAMKPEDKKENVATTDTLESTTVGTSV

SEQ ID NO: 4570 - DNA, 2844 bp, Homo sapiens
aagatggcggaccttgattcgcctccgaagctgtcaggggtgcagcagccgtctgagggggtgggaggtggccgctgctccgaaatctccgctgagctcattcgctccctgacagagctgcaggagctggaggctgtatacgaacggctctgcggcgaggagaaagtggtggagagagagctggatgctcttttggaacagcaaaacaccattgaaagtaagatggtcactctccaccgaatgggtcctaatctgcagctgattgagggagatgcaaagcagctggctggaatgatcacctttacctgcaacctggctgagaatgtgtccagcaaagttcgtcagcttgacctggccaagaaccgcctctatcaggccattcagagagctgatgacatcttggacctgaagttctgcatggatggagttcagactgctttgaggagtgaagattatgagcaggctgcagcacatactcatcgctacttgtgcctggacaagtcggtcattgagctcagccgacagggcaaagaggggagcatgattgatgccaacctgaaattgctgcaggaagctgagcaacgtctcaaagccattgtggcagagaagtttgccattgccaccaaggaaggtgatctgccccaggtggagcgcttcttcaagatcttcccactgctgggtttgcatgaggagggattaagaaagttctcggagtacctttgcaagcaggtggccagtaaagctgaggagaatctgctcatggtgctggggacagacatgagtgatcggagagctgcagtcatctttgcagatacacttactcttctgtttgaagggattgcccgcattgtggagacccaccagccaatagtggagacctattatgggccagggagactctataccctgatcaaatatctgcaggtggaatgtgacagacaggtggagaaggtggtagacaagttcatcaagcaaagggactaccaccagcagttccggcatgttcagaacaacctgatgagaaattctacaacagaaaaaatcgaaccaagagaactggaccccatcctgactgaggtcaccctgatgaatgcccgcagtgagctatacttacgcttcctcaagaagaggattagctctgattttgaggtgggagactccatggcctcagaggaagtaaagcaagagcaccagaagtgtctggacaaactcctcaataactgccttttgagctgtaccatgcaggagctaattggcttatatgttaccatggaggagtacttcatgagggagactgtcaataaggctgtggctctggacacctatgagaagggccagctgacatccagcatggtggatgatgtcttctacattgttaagaagtgcattgggcgggctctgtccagctccagcattgactgtctctgtgccatgatcaacctcgccaccacagagctggagtctgacttcagggatgttctgtgtaataagctgcggatgggctttcctgccaccaccttccaggacatccagcgcggggtgacaagtgccgtgaacatcatgcacagcagcctccagcaaggcaaatttgacacaaaaggcatcgagagtactgacgaggcgaagatgtccttcctggtgactctgaacaacgtggaagtctgcagtgaaaacatctccactctgaagaagacactggagagtgactgcaccaagctcttcagccagggcattggaggggagcaggcccaggccaagtttgacagctgcctttctgacttggccgccgtgtccaacaaattccgagacctcttgcaggaagggctgacggagctcaacagcacagccatcaagccacaggtgcagccttggatcaacagctttttctccgtctcccacaacatcgaggaggaagaattcaatgactatgaggccaacgacccttgggtacaacagttcatccttaacctggagcagcaaatggcagagttcaaggccagcctgtccccggtcatctacgacagcctaaccggcctcatgactagccttgttgccgtcgagttggagaaagtggtgctgaaatccacctttaaccggctgggtggtctgcagtttgacaaggagctgaggtcgctcattgcctaccttaccacggtgaccacctggaccatccgagacaagtttgcccggctctcccagatggccaccatcctcaatctggagcgggtgaccgagatcctcgattactggggacccaattccggcccattgacgtggcgcctcacccctgctgaagtgcgccaggtgctggccctgcggatagacttccgcagtgaagatatcaagaggctgcgcctgtagctgcctggatgagcacacctggctcatcacacttgcaggcctgttccctaaggggccccagccaaggagctgagcgaggctgtctggcttgggggagatctgacagcccagacctttctacggctggcagcagagaaacaaagtctggacccactccatgctctgccctcagacctggccaggtgatgctctgggggcagcatctccccaccgagagaagcgggctcctaatgaggtgggaaagccacggcaggcagcgagcagcccaggccagctttctgcatggatggtcagtctcttgccctcaaacactacagcaaacaagctacccctgccagtcctagacaacttgggtacatctggggacctagcagttaggcttgactttgaggagaggctgtgatgtttatgatccctgaataaagctactccttggagagatgccagtgtgctgttaccagggagggccagatgctatggggc

SEQ ID NO: 4571 - DNA, 1628 bp, Homo sapiens
gtggcagcggctggcggcaaaacctctcgagtgagcccctgcccgagtgccgcgggggagaggccgcgagcgggaccgagaagtgggctgggagcagaggtcgcggaggtggcgagcgaggccggggcccaggcggggaccggcaggggcccgggagtggcgggcacgccagggtcagggtgccgggcgagggagggggcccggggttggggaagggggcccggggagggaggtaaacagccctgcaggcctcggggcaccgttgctgggcggcgccggcggcatgtgcgagggcccgtcccgcatctcggggcccatccccccagacccgacgctctgtcctgacaactacaggcggccgacctcggctcaagggcgcctcgagggaaacgcgctgaagctggacttgctgacttccgaccgggccctggacaccaccgctccccgtggcccctgcatcggtcccggtgccggagagatcctggagcgcggccagcgcggcgtcggggacgtgctgttgcaactcgaggggatctccctaggtcctggggcctctctcaagaggaaggaccctaaggaccatgagaaggagaacctgaggcggatcagggagattcagaagcgcttcagagaacaggagcgcagccgggagcagggccagcccaggcccctgaaagctctgtggcgctcacccaagtacgacaaggtggagtcccgggtcaaggcccagctccaggagcctggccctgcctctgggacagagtctgcccacttcctgcgggcgcactcccgctgcggccctggcctcccaccaccccatgtatctagtccccagccaaccccaccaggtcccgaagctaaggagccaggcctgggggtggacttcattcgtcacaatgcacgagctgccaagagagccccccggaggcattcctgctcactgcaggtcctggcacaagtgctagagcagcagcggcaggcccaggagcactacaatgccacgcagaagggccatgtgccacattacttgttggagcgcagggacctgtggcggcgggaggccgaggcccgcaagcagagccagccggaccctgccatgcccccaggccacacgcgcatgcctgagaaccagcggctggaaacactgaccaagctgctccagagccagagccagctgctgcgtgagctggtactgctgcctgctggggcagactcactgagagcccagagccaccgtgctgagctggaccggaagctggtgcaggtagaggaggccatcaagatcttttctcggcccaaagtcttcgtgaagatggacgactgagcccctttgggggacagtggcaaggagctccatgctgaggatcgccacatggctgcaaaggacagggttggacccaatcccagagcagaggtctgaagacaggagcaggggggtggccagtgtccctagagcactcttcccagtcaccagtggctgcagaagggccaccctagccttttaactgctttgtcaaaattaaacattttgtacacagaaaaaaaaaaaaaaaaaaaaaaaaaaaaaaaaaaaaaaaaaaaaaaaaaaaaaaaaaaaaaaaaaaaaaaaaaaaaaaaaaaaaaaaaaa

SEQ ID NO: 4572 - protein, 346 aa, Homo sapiens
MCEGPSRISGPIPPDPTLCPDNYRRPTSAQGRLEGNALKLDLLTSDRALDTTAPRGPCIGPGAGEILERGQRGVGDVLLQLEGISLGPGASLKRKDPKDHEKENLRRIREIQKRFREQERSREQGQPRPLKALWRSPKYDKVESRVKAQLQEPGPASGTESAHFLRAHSRCGPGLPPPHVSSPQPTPPGPEAKEPGLGVDFIRHNARAAKRAPRRHSCSLQVLAQVLEQQRQAQEHYNATQKGHVPHYLLERRDLWRREAEARKQSQPDPAMPPGHTRMPENQRLETLTKLLQSQSQLLRELVLLPAGADSLRAQSHRAELDRKLVQVEEAIKIFSRPKVFVKMDD

SEQ ID NO: 4573 - DNA, 2118 bp, Homo sapiens
aaaaaaaagaaaccaggcggcgcgttcccggtggcggcgccctggactcccgggcccgcgcatccccgccagccttccttaaggcggatgggtggcccccgagaccccgtcggacccatggtttccagtgcagcgcggagtgggcggtgccagcgtgccaggagccatgtctgaccaggacgtttggaagatcatatccatgccagaggctcttgtggggagatgagttggtaaagagagaggctgggatgaagatgctgccaggagtggacgtgtttgggactggcagctccgcccgagttctggtcccactgctgagggcagaagggttcactgttgaggccctgtgggggaagactgaggaggaggcgaagcagcttgctgaggagatgaacatcgccttctacaccagccggactgatgacatcttgctgcatcaagatgtggatctggtgtgcatcagcatcccccctccactcacccggcagatatccgtgaaggctctaggtattgggaagaatgtggtttgcgagaaggcagcaacatcggtggatgccttccggatggtgacagcctcgcgctactacccgcagctcatgagcctggtagggaacgtgctgcgcttcctgcctgccttcgtgcgcatgaaacagctgatttcggaacactatgtgggagcggtgatgatctgtgatgcccgcatctactcaggcagcctgctgagccccagctatggctggatctgtgatgagctcatgggcggcgggggcttgcacaccatggggacctacattgtggacctgctgacccacctgaccggccggagagccgagaaggtgcacgggctgctcaagacattcgtgaggcagaacgctgccatccgtggcatccggcacgtcactagcgatgacttctgtttcttccagatgctcatgggtgggggtgtgtgtagcacagtgacactcaacttcaacatgccaggcgcctttgtgcatgaagtcatggtggtaggctctgcaggacgcctcgtcgcccggggagccgacctctatgggcagaagaactctgccacgcaagaggagctgctcttgagggactcgctggcagtgggcgcaggactgcctgagcaggggccccaggatgtcccgctgctgtacctgaagggcatggtctacatggtgcaggccttgcgccagtccttccaggggcagggcgaccgccgcacctgggaccgcacccctgtctccatggccgcctccttcgaggatgggctgtacatgcagagcgtggtggatgccatcaagaggtcgagccgatccggggagtgggaggctgtggaggtgctgacggaggagcccgacaccaaccagaacctgtgtgaggcacttcagcggaacaacctatgagcctgcacctgggctccttgccacagggcagagggaccagggaggggaacaggagccagacatgacagggacttggccctagcagagacagtgtctttcatttgatgagtctgggtgaagccagaggtggctctgggacttcgccccctccagtggctcacctgctcctcagacttgcagggtggcaaatgttcctgttgccaggttaccacggtgtgcacagggcagagctgccgccaggcctcctcatggtgatgccagtgagtcggaccaggaaaggctcaccctggggagcccttcagcctgatccgcagtcctaacagggtgagaaagcacaagaggggccagctcggctgaggcctgaggagaaatgatgagaagttttgtttcgttcttgggctggggcatctcaggaacagtgagggcaacaagctgtccctcagggaccctcacctgccctcccatgtgaccaggcccttcccaggtggggactggggcttgctttattaagtgagctcttgggcttttgaagtaggacagagggccctggtttggcagagaggaggcaagggagggctttagaacatctgagaaatgttaataaataattcagaaaataaaaaaaaaaaaaaaaaaaaaaaaaaaaaaaaaaaaaaaaaaaaaaaaaaaaaaaaaaaaaaaaaaaaaaaaaaaaaaaaaaaaaaaaaaaaaa

SEQ ID NO: 4574 - protein, 385 aa, Homo sapiens
MKMLPGVDVFGTGSSARVLVPLLRAEGFTVEALWGKTEEEAKQLAEEMNIAFYTSRTDDILLHQDVDLVCISIPPPLTRQISVKALGIGKNVVCEKAATSVDAFRMVTASRYYPQLMSLVGNVLRFLPAFVRMKQLISEHYVGAVMICDARIYSGSLLSPSYGWICDELMGGGGLHTMGTYIVDLLTHLTGRRAEKVHGLLKTFVRQNAAIRGIRHVTSDDFCFFQMLMGGGVCSTVTLNFNMPGAFVHEVMVVGSAGRLVARGADLYGQKNSATQEELLLRDSLAVGAGLPEQGPQDVPLLYLKGMVYMVQALRQSFQGQGDRRTWDRTPVSMAASFEDGLYMQSVVDAIKRSSRSGEWEAVEVLTEEPDTNQNLCEALQRNNL

SEQ ID NO: 4575 - DNA, 894 bp, Homo sapiens
ggaagggacagtcggccgcagaccgcgctgggttgccgctgccgctgccgccatcgtgccagcccctcgggtctccgtgaggccgggtgacgctccagaatgggagacaagccaatttgggagcagattggatccagcttcattcaacattactaccagttatttgataatgatagaacccaactaggcgcaatttacattgacgcgtcatgccttacgtgggaaggacaacagttccaggggaaagctgccattgtggagaagttgtctagccttccgttccagaaaattcagcacagcatcaccgcgcaggaccatcagcccactccagatagctgcatcatcagcatggttgtgggccagcttaaggcggatgaagaccccatcatggggttccaccagatgttcctattaaagaacatcaacgatgcttgggtttgcaccaatgacatgttcaggctcgccctgcacaactttggctgacctcctctcagctaggcactcacgctgtttcctcctccctcctcttcccaatactattcccactcctccagatgctccaaatatcatgcacaaatgagcagggccgcggtgggagtgggcgcagtgcgctgctgccactgaggtgttgtgcatgatgtttggatgctagactagttgcatctgacgggagaagtttgtgttgtaccagcgcatgccttggaaagacttaagtaatgcaaaaggttgtccttttttttttttttttttttttaatctactgacaagttgctctagtaacccaaagaagtgaaggagaaagcagctgcctcaccgcccagacattgatttgttcagatgtttcaatgcctcatgatacaataaaaccacaaaaattttcttaacaaaaaaaaa

SEQ ID NO: 4576 - protein, 127 aa, Homo sapiens
MGDKPIWEQIGSSFIQHYYQLFDNDRTQLGAIYIDASCLTWEGQQFQGKAAIVEKLSSLPFQKIQHSITAQDHQPTPDSCIISMVVGQLKADEDPIMGFHQMFLLKNINDAWVCTNDMFRLALHNFG

SEQ ID NO: 4577 - DNA, 3436 bp, Homo sapiens
attgcccggagatggccggcagagccgccgagacgccgaagagcccgccgcccgcgcgaggtgtagacggggcactgccttcagagcaggtcctgccagcctcgctggagaggatgccctcgtgtccgtgatgggctgtgggacaagcaaggtccttcccgagccacccaaggatgtccagctggatctggtcaagaaggtggagcccttcagtggcactaagagtgacgtgtacaagcacttcatcacagaggtggacagtgttggccctgtcaaagccgggttcccagcagcaagtcagtatgcacacccctgccccggtcccccgactgctggccacacggagcctccctcagaaccaccacgcagggccagggtagctaagtacagggccaagtttgacccacgtgttacagctaagtatgacatcaaggccctaattggccgaggcagcttcagccgagtggtacgtgtagagcaccgggcaacccggcagccgtatgccatcaagatgattgagaccaagtaccgggaggggcgggaggtgtgtgagtcggagctgcgtgtgctgcgtcgggtgcgtcatgccaacatcatccagctggtggaggtgttcgagacacaggagcgggtgtacatggtgatggagctggccactggtggagagctctttgaccgcatcattgccaagggctccttcaccgagcgtgacgccacgcgggtgctgcagatggtgctggatggcgtccggtatctgcatgcactgggcatcacacaccgagacctcaaacctgagaatctgctctactaccatccgggcactgactccaagatcatcatcaccgacttcggcctggccagtgctcgcaagaagggtgatgactgcttgatgaagaccacctgtggcacgcctgagtacattgccccagaagtcctggtccgcaagccatacaccaactcagtggacatgtgggcgctgggcgtcattgcctacatcctactcagtggcaccatgccgtttgaggatgacaaccgtacccggctgtaccggcagatcctcaggggcaagtacagttactctggggagccctggcctagtgtgtccaacctggccaaggacttcattgaccgcctgctgacagtggaccctggagcccgtatgactgcactgcaggccctgaggcacccgtgggtggtgagcatggctgcctcttcatccatgaagaacctgcaccgctccatatcccagaacctccttaaacgtgcctcctcgcgctgccagagcaccaaatctgcccagtccacgcgttccagccgctccacacgctccaataagtcacgccgtgtgcgggaacgggagctgcgggagctcaacctgcgctaccagcagcaatacaatggctgagccgcctggctgtgcacacatgcagcacgacccagcctggccacacactgtggtgccatctgggtccgatgccctctctggagataggcctatgtggcccacagtaggtgaagaatgtctggctccagccctttctctgtgccttcagcagcccctgtcctcaccatgggcctgggccaggtgtgacagagtagaggtagcacagggggctgtgactccccctgaactgggagcctggcctggcactgatacccctcttggtgggcagctgctctggtggagttgggaagggataggacctggccttcactgtctcccttgccctttgacttttccccaatcaaagggaactgcagtgctgggtggagtgtcctgtggcctcaggaccctttgggacagttacttctgggaccccctttcctccacagagcccttctccctggtttcacacattcccatgcatcctgatccttaagattatgctccagtgggagaccctggtaggcacaaagcttgtgccttgactggacccgtagcccctggctaggtcgaaacagccctccacctcccagccaagatctgtcttccttcatggtgcctccagggagccttcctggtcccaggacctctggtggagggccatggcgtggaccttcacccttctggactgtgtggccatgctggtcatcggcttgcccaggctccagcctctccagattctgaggggtctcagcccaccgcccttggtgccttctttgtagagcccaccgctacctccctctccccgttggatgtccattccattccccaggtgcctccttcccaactgggggtggttaaagggagccccactgctgctacctggggaatggggcacctgggggccaaggcagagggaagggggtcctcccgatagggtcgagtgtcagcctgggttctatcctttggtgcagccccattgccttttcccttcaggctctgttgctccctcctctgcagctgcacgaaggcgccatctggtgtctgcatgggtgttggcagcctgggagtgatcactgcacgcccatcgtgcacacctgcccatcgtgcacacccacccatggtgcacacctgtagtcctccatgaggacatgggaaggtaggagttgccgccctgggggagggtcccgggctgctcacctctccccttctgctgagcttctgcgcacccctccctggaacttagccatactgtgtgacctgcctctgaaaccagggtgccaggggcactgccttctcacagctggccttgccccgtccaccctgtgctgcttcccttcacagcattaaccttccagtctgggtcccactgagcctcaagctggaaggagcccctgcgggaggtgggtggggttgggtggctgctttcccagaggcctgagccagaaccatccccatttcttttgtggtatctccccctaccacaaaccaggctggaacccaagccccttcctccacagctgccttcagtgggtagaatggggccagggcccagctttggccttagcttgacggcagggcccctgccattgcaggagggtttggttcccactcagcttctgccggtcggcagcctgggccaggcccttttcctgcatgtgccacctccagtgggaaacaaaactaaagagaccactctgtgccaagtcgactatgccttagacacatcctcctaccgtccccaatgccccctgggcaggaggcagtggagaaccaagccccatggcctcagaatttccccccagttccccaagtgtctctggggacctgaagccctggggcttacgttctctcttgcccagggtgggcctggtcctgagggcaggacagggggtttggagatgtgggcctttgatagacccacttgggccttcatgccatggcctgtggatggagaatgtgcagttatttattatgcgtattcagtttgtaaacgtatcctctgtattcagtaaacaggctgcctctccagggagggctgccattcattcc

SEQ ID NO: 4578 - protein, 424 aa, Homo sapiens
MGCGTSKVLPEPPKDVQLDLVKKVEPFSGTKSDVYKHFITEVDSVGPVKAGFPAASQYAHPCPGPPTAGHTEPPSEPPRRARVAKYRAKFDPRVTAKYDIKALIGRGSFSRVVRVEHRATRQPYAIKMIETKYREGREVCESELRVLRRVRHANIIQLVEVFETQERVYMVMELATGGELFDRIIAKGSFTERDATRVLQMVLDGVRYLHALGITHRDLKPENLLYYHPGTDSKIIITDFGLASARKKGDDCLMKTTCGTPEYIAPEVLVRKPYTNSVDMWALGVIAYILLSGTMPFEDDNRTRLYRQILRGKYSYSGEPWPSVSNLAKDFIDRLLTVDPGARMTALQALRHPWVVSMAASSSMKNLHRSISQNLLKRASSRCQSTKSAQSTRSSRSTRSNKSRRVRERELRELNLRYQQQYNG

SEQ ID NO: 4579 - DNA, 1184 bp, Homo sapiens
atctgccacgatgttgctgctcagcctgaccctaagcctggttctcctcggctcctcctggggctgcggcattcctgccatcaaaccggcactgagcttcagccagaggattgtcaacggggagaatgcagtgttgggctcctggccctggcaggtgtccctgcaggacagcagcggcttccacttctgcggtggttctctcatcagccagtcctgggtggtcactgctgcccactgcaatgtcagccctggccgccattttgttgtcctgggcgagtatgaccgatcatcaaacgcagagcccttgcaggttctgtccgtctctcgggccattacacaccctagctggaactctaccaccatgaacaatgacgtgacgctgctgaagctcgcctcgccagcccagtacacaacacgcatctcgccagtttgcctggcatcctcaaacgaggctctgactgaaggcctcacgtgtgtcaccaccggctggggtcgcctcagtggcgtgggcaatgtgacaccagcacatctgcagcaggtggctttgcccctggtcactgtgaatcagtgccggcagtactggggctcaagtatcactgactccatgatctgtgcaggtggcgcaggtgcctcctcgtgccagggtgactccggaggccctcttgtctgccagaagggaaacacatgggtgcttattggtattgtctcctggggcaccaaaaactgcaatgtgcgcgcacctgctgtgtatactcgagttagcaagttcagcacctggatcaaccaggtcatagcctacaactgagctcaccacaggccctccccagctcaacccattaaagacccaggccctgtcccatcatgcattcatgtctgtcttcctggctcaggagaaagaagaggctgttgagggtccgactccctacttggacttctggcacagaaggggctgagtgactccttgagtagcagtggctcttcctagagtagccatgccgaggccggggcccccacccctcctccagggcaaccccttggtcctacagcaagaagccagaactgttggaatgaatggcagccctccctggagaggcagcctgtttactgaatacagaggatacgtttacaaactgaatacgcataataaataactgcacattctccatccaaaaaaaaaaaaaaaa

SEQ ID NO: 4580 - protein, 264 aa, Homo sapiens
MLLLSLTLSLVLLGSSWGCGIPAIKPALSFSQRIVNGENAVLGSWPWQVSLQDSSGFHFCGGSLISQSWVVTAAHCNVSPGRHFVVLGEYDRSSNAEPLQVLSVSRAITHPSWNSTTMNNDVTLLKLASPAQYTTRISPVCLASSNEALTEGLTCVTTGWGRLSGVGNVTPAHLQQVALPLVTVNQCRQYWGSSITDSMICAGGAGASSCQGDSGGPLVCQKGNTWVLIGIVSWGTKNCNVRAPAVYTRVSKFSTWINQVIAYN

SEQ ID NO: 4581 - DNA, 3893 bp, Homo sapiens
ggcacgaggggcggggacagcggcggggacagcggcgggcggctgggacggcgggtgcggcggggccgagcccgcacgatgcctcacttcaccgtggtgccagtggacgggccgaggcgcggcgactatgacaacctcgaggggctcagttgggtggactacggggagcgcgccgagctggatgactcggacggacatggcaaccacagagagagcagcccttttctttcccccttggaggcttccagaggaattgactactatgacaggaacctggcactgtttgaggaagagctggacatccgcccaaaggtatcgtctcttctgggaaagctcgtcagctacaccaacctcacccagggcgccaaagagcatgaggaggccgagagtggggagggcacccgccggagggcagccgaggcacccagcatgggcaccctcatgggggtgtacctgccctgcctgcagaatatctttggggttatcctcttcctgcggctgacctggatggtgggcacagcaggtgtgctacaggccctcctcatcgtgcttatctgctgctgttgtaccctgctgacggccatctccatgagtgccatcgccaccaacggtgtggttccagctgggggctcctatttcatgatctctcgttcactggggccagaatttggaggtgctgtgggcctgtgcttctacctgggaacaacattcgcagcagccatgtacatcctgggggccatcgagatcttgctgacctacattgccccaccagctgccattttttacccatcgggtgctcatgacacgtcgaatgccactttgaacaatatgcgtgtgtatgggaccattttcctgaccttcatgaccctggtggtgtttgtgggggtcaagtatgtgaacaaatttgcctcgctcttcctggcctgtgtgatcatctccatcctctccatctatgctgggggcataaagtctatatttgaccctcccgtgtttccggtatgcatgctgggcaacaggaccctgtcccgggaccagtttgacatctgtgccaagacagctgtagtggacaatgagacagtggccacccagctatggagtttcttctgccacagccccaaccttacgaccgactcctgtgacccctacttcatgctcaacaatgtgaccgagatccctggcatccccggggcagctgctggtgtgctccaggaaaacctgtggagcgcctacctggagaagggtgacatcgtggagaagcatgggctgccctccgcagatgccccgagcctgaaggagagcctgcctctgtacgtggtcgctgacatcgccacatccttcaccgtgctggtcggcatcttcttcccttctgtaacaggcatcatggctggctcaaaccgctctggggaccttcgtgacgcccagaagtctatccctgtggggaccattctggccatcattacaacttccctcgtgtacttcagcagtgtggttctctttggtgcctgcattgagggtgtggttctccgggacaagtatggcgatggtgtcagcaggaacttggtggtgggcacactggcctggccttcaccctgggtcatcgtcatcggctccttcttttcaacgtgtggcgctggcctccagagcctcacaggggcaccacgcctattgcaggccattgccaaggacaacatcatccccttcctccgggtgtttggccacgggaaggtgaatggtgaacccacatgggcactcctcctgacggcactcatcgccgagctgggcatcctcatcgcctccctcgacatggtggcccccatcttatccatgttctttctgatgtgctacctgttcgtgaacctcgcctgtgcggtgcagacactcctgaggacccccaactggcggccccggttcaagtactatcactgggcgctgtccttcctgggcatgagtctctgcctggcccttatgtttgtctcctcctggtactatgccctggtggccatgctcatcgccggcatgatctacaaatacatcgagtaccaaggggctgagaaggagtggggtgacgggatccgaggcctgtccctgagcgctgcccgctacgcgctgttgcggctggaggaggggcctcctcacaccaagaactggcggccgcagctgctggtgctgctgaagctggacgaggacctccacgtgaagtacccgcggctcctcaccttcgcctcccagctcaaggctggcaagggcctgaccattgttggttctgtcatccaggggagcttcttggagagctatggcgaggctcaggccgccgagcagaccatcaagaacatgatggaaattgagaaggtgaagggcttctgccaggtggtggtggccagcaaggtgcgggaggggctggcccacctcatccagtcctgtggcctgggaggcatgcggcataactccgtggtgctgggctggccctacggctggcgacagagcgaggacccccgtgcctggaagaccttcattgacaccgtgcgctgcactacggctgcccacctggccctgctcgtgcccaagaacatcgccttctaccccagcaaccacgagcgctacctggagggccacatagacgtgtggtggatcgtgcacgatggtggcatgctcatgcttctgcccttcctgctgcgccagcataaggtctggaggaagtgccggatgcgcatcttcacagtggcccagatggatgacaacagcatccagatgaagaaggacctggctgtctttctgtaccatctgcgccttgaggccgaggtggaggtggtggagatgcataacagtgacatctctgcatacacctacgagcggacgctgatgatggagcagcggtcgcagatgctgcggcagatgagactgaccaagactgagcgggagcgagaagcccagctggtcaaggatcggcactcggccctgaggctggagagcctgtactcggacgaggaagatgagtctgcagtgggggctgacaagatccagatgacgtggaccagggacaagtacatgactgagacctgggaccccagccatgcccctgacaatttccgggagctggtgcacattaagccggaccaatccaatgtgcggcgcatgcacactgctgtgaagctcaatgaagtcattgtcacgcgctcccacgacgcccgcctggttctcctaaacatgcctggcccacccaggaacagtgagggcgacgagaactacatggagttcctcgaggtgctgaccgagggccttgagcgggtgctgttggtgcgcggtggtggccgtgaagtcatcaccatctactcctgagcccagtgtcatcttgtggcctggagtcgaggtcttggccaggacataacaagctgtggtctggggtaacagcctcttcccagcacccacctgccagccctgcttgcctggccctgtcctggacccagctttgctaggtctccttggaaaccaggcctgggcctcaaaatggagatggatcccaggtcttgtgggaccctgggatgtttggggactttactatctagcaccccagtaggcctgtcctggccagagaagactggtaggggccgagtggggtttgaaggcagccggcccggcccagcccaggagcgctatttattgcatatttattgtttggatgtcaccatcagagacgaagggaagggtagccagggagggagtccagcccagctgcctgcaggaagatctggctcagtctactatgggcagggccccccaccaagctgagccgaatggagacagctgagctgaggcctgactttttcaataaaacattgtgtagttctgggcaaaaaaaaaaaaaaaaaaaaaaaaaaaaaaaaaaaaaaaaaaaa

SEQ ID NO: 4582 - protein, 1085 aa, Homo sapiens
MPHFTVVPVDGPRRGDYDNLEGLSWVDYGERAELDDSDGHGNHRESSPFLSPLEASRGIDYYDRNLALFEEELDIRPKVSSLLGKLVSYTNLTQGAKEHEEAESGEGTRRRAAEAPSMGTLMGVYLPCLQNIFGVILFLRLTWMVGTAGVLQALLIVLICCCCTLLTAISMSAIATNGVVPAGGSYFMISRSLGPEFGGAVGLCFYLGTTFAAAMYILGAIEILLTYIAPPAAIFYPSGAHDTSNATLNNMRVYGTIFLTFMTLVVFVGVKYVNKFASLFLACVIISILSIYAGGIKSIFDPPVFPVCMLGNRTLSRDQFDICAKTAVVDNETVATQLWSFFCHSPNLTTDSCDPYFMLNNVTEIPGIPGAAAGVLQENLWSAYLEKGDIVEKHGLPSADAPSLKESLPLYVVADIATSFTVLVGIFFPSVTGIMAGSNRSGDLRDAQKSIPVGTILAIITTSLVYFSSVVLFGACIEGVVLRDKYGDGVSRNLVVGTLAWPSPWVIVIGSFFSTCGAGLQSLTGAPRLLQAIAKDNIIPFLRVFGHGKVNGEPTWALLLTALIAELGILIASLDMVAPILSMFFLMCYLFVNLACAVQTLLRTPNWRPRFKYYHWALSFLGMSLCLALMFVSSWYYALVAMLIAGMIYKYIEYQGAEKEWGDGIRGLSLSAARYALLRLEEGPPHTKNWRPQLLVLLKLDEDLHVKYPRLLTFASQLKAGKGLTIVGSVIQGSFLESYGEAQAAEQTIKNMMEIEKVKGFCQVVVASKVREGLAHLIQSCGLGGMRHNSVVLGWPYGWRQSEDPRAWKTFIDTVRCTTAAHLALLVPKNIAFYPSNHERYLEGHIDVWWIVHDGGMLMLLPFLLRQHKVWRKCRMRIFTVAQMDDNSIQMKKDLAVFLYHLRLEAEVEVVEMHNSDISAYTYERTLMMEQRSQMLRQMRLTKTEREREAQLVKDRHSALRLESLYSDEEDESAVGADKIQMTWTRDKYMTETWDPSHAPDNFRELVHIKPDQSNVRRMHTAVKLNEVIVTRSHDARLVLLNMPGPPRNSEGDENYMEFLEVLTEGLERVLLVRGGGREVITIYS

SEQ ID NO: 4583 - DNA, 2137 bp, Homo sapiens
atcgccagcctccagtcctgcctccacgacgcgcccttccccaaggctggccgggtctggatgtcgccatcccctattcggagctacagacctcgcagctgaactcttaaaaagaacctcgcttcttcctcacggtgctccagctccacacaccgtactgagcctcgccagccaccgtacgcgaggtcgcggcgcgtccgtgacgtcactgatgtgcgcttctcccgcactaagggaaacatggctctaacgcggccggtgcggctcttttccctcgtgactcggttgctcctggcgccgcgacggggcctcacggtccgcagtcccgacgaacccctgccggtggtgcgcatcccagtggctctacagcggcagttggaacagcggcagagcaggcggcggaacctcccgaggccggtgctggttcgacccggaccgctgctggtttcggcgcggcggccggagttgaaccagccggcgcgcctcacactgggccgttgggagcgcgcgccgctagcctctcaaggctggaagagtcgacgcgcgcgtcgggaccacttctccatcgagcgcgcgcaacaggaggcgccagcggtgcgaaagctctcgtctaagggcagctttgctgacctgggcctggagccccgtgtgctgcacgcactacaggaggctgcgcctgaagtcgttcagcccacaaccgtgcagtctagcaccatcccctcactacttcgcggccgccatgtcgtttgcgccgcagaaaccggcagtggcaagactctcagctacctcctgccgctgcttcaacggctcttgggccagccaagcctggactcccttcctatccccgcgccccgaggcctggtccttgttccttcccgagaattggcccaacaggtgcgggctgtggcccaacccttgggccgctccttgggcctgctggtgcgggacctggagggaggccacggcatgcgtaggatcaggctgcagctgtccagacagccttcagcagatgtgcttgtggccactccaggggctctgtggaaggccctgaaaagtcgactgatcagtctggagcaactctccttcttggtgttggatgaggcagacacactgctggatgaaagcttcctggaactggtggactacatcttagagaagagccacatagcagaaggcccagctgacttggaagaccccttcaatcccaaagctcagttagtgctggtaggagccacatttcccgaaggtgtaggccagttgctgaataaagtcgccagcccagatgctgtcaccaccatcaccagctccaagctccactgtatcatgcctcatgtgaaacagacatttctgagactgaagggagcagataaggtggccgagctggtgcacatcctcaagcatcgtgacagagcagaaaggactggtccctcaggaactgttctggtgttctgtaatagctccagcactgtgaactggctgggatatattctggatgaccacaaaatccaacacctaaggttgcaggggcaaatgccagccttgatgagggtaggaatcttccagtccttccagaagagctcccgagacatacttctctgcacagacatagcctctcggggcctggacagcactggtgtggagctggttgtcaattatgatttccccccaacgctgcaagattacatccacagagcagggagagtgggccgtgtggggagcgaggtgccaggcaccgtcatcagttttgtgacccatccctgggatgtgagcctggttcagaagattgagctggcggctcgccgaaggagaagtcttccaggactagcatcctcggtgaaagagcctttgccccaagcaacctgattttgacaaatctgattaaaatgtgatgctagaacagggatctttcccagtatcttgagtgggtgaccacacttgtcagtgggaggctctgggctgccctgtcggctccttgagggcgggatgaactgctttgtgacttggaaaggtacgctgctggccagcattggagaagaagctgctgagcatggctttctgtagtctttagcaagacacaagtggattttgactttgtatcatgtcatgatttctaacaataaatgatgtttttatgtgc

SEQ ID NO: 4584 - DNA, 2008 bp, Homo sapiens
ggcacgaggtggagcaccgtgaggaagaagcgaggttctttttaagagttcagctgcgagatatcaaacaaagaattactctgtacaaagccagaacacatatatcaaagtaatcctgaagtatcagaacaaaataataggctgtaacagaggaggaaatgattttgaatagcctctctctgtgttaccataataagctaatcctggccccaatggttcgggtagggactcttccaatgaggctgctggccctggattatggagcggacattgtttactgtgaggagctgatcgacctcaagatgattcagtgcaagagagttgttaatgaggtgctcagcacagtggactttgtcgcccctgatgatcgagttgtcttccgcacctgtgaaagagagcagaacagggtggtcttccagatggggacttcagacgcagagcgagcccttgctgtggccaggcttgtagaaaatgatgtggctggtattgatgtcaacatgggctgtccaaaacaatattccaccaagggaggaatgggagctgccctgctgtcagaccctgacaagattgagaagatcctcagcactcttgttaaagggacacgcagacctgtgacctgcaagattcgcatcctgccatcgctagaagataccctgagccttgtgaagcggatagagaggactggcattgctgccatcgcagttcatgggaggaagcgggaggagcgacctcagcatcctgtcagctgtgaagtcatcaaagccattgctgataccctctccattcctgtcatagccaacggaggatctcatgaccacatccaacagtattcggacatagaggactttcgacaagccacggcagcctcttccgtgatggtggcccgagcagccatgtggaacccatctatcttcctcaaggagggtctgcggcccctggaggaggtcatgcagaaatacatcagatacgcggtgcagtatgacaaccactacaccaacaccaagtactgcttgtgccagatgctacgagaacagctggagtcgccccagggaaggttgctccatgctgcccagtcttcccgggaaatttgtgaggcctttggccttggtgccttctatgaggagaccacacaggagctggatgcccagcaggccaggctctcagccaagacttcagagcagacaggggagccagctgaagatacctctggtgtcattaagatggctgtcaagtttgaccggagagcatacccagcccagatcacccctaagatgtgcctactagagtggtgccggagggagaagttggcacagcctgtgtatgaaacggttcaacgccctctagatcgcctgttctcctctattgtcaccgttgctgaacaaaagtatcagtctaccttgtgggacaagtccaagaaactggcggagcaggctgcagccatcgtctgtctgcggagccagggcctccctgagggtcggctgggtgaggagagcccttccttgcacaagcgaaagagggaggctcctgaccaagaccctgggggccccagagctcaggagctagcacaacctggggatctgtgcaagaagccctttgtggccttgggaagtggtgaagaaagccccctggaaggctggtgactactcttcctgccttagtcacccctccatgggcctggtgctaaggtggctgtggatgccacagcatgaaccagatgccgttgaacagtttgctggtcttgcctggcagaagttagatgtcctggcaggggccatcagcctagagcatggaccaggggccgcccaggggtggatcctggcccctttggtggatctgagtgacagggtcaagttctctttgaaaacaggagcttttcaggtggtaactccccaacctgacattggtactgtgcaataaagacaccccctaccctcaaaaaaaaaaaaaaaaaaaaaaaaaaaaaaaaaaaaaaaaaaaaaaaaaaaaaaaaaaaaaaaaaaaaaaaaaa

SEQ ID NO: 4585 - protein, 493 aa, Homo sapiens
MILNSLSLCYHNKLILAPMVRVGTLPMRLLALDYGADIVYCEELIDLKMIQCKRVVNEVLSTVDFVAPDDRVVFRTCEREQNRVVFQMGTSDAERALAVARLVENDVAGIDVNMGCPKQYSTKGGMGAALLSDPDKIEKILSTLVKGTRRPVTCKIRILPSLEDTLSLVKRIERTGIAAIAVHGRKREERPQHPVSCEVIKAIADTLSIPVIANGGSHDHIQQYSDIEDFRQATAASSVMVARAAMWNPSIFLKEGLRPLEEVMQKYIRYAVQYDNHYTNTKYCLCQMLREQLESPQGRLLHAAQSSREICEAFGLGAFYEETTQELDAQQARLSAKTSEQTGEPAEDTSGVIKMAVKFDRRAYPAQITPKMCLLEWCRREKLAQPVYETVQRPLDRLFSSIVTVAEQKYQSTLWDKSKKLAEQAAAIVCLRSQGLPEGRLGEESPSLHKRKREAPDQDPGGPRAQELAQPGDLCKKPFVALGSGEESPLEGW

SEQ ID NO: 4586 - DNA, 3969 bp, Homo sapiens
cggctgcggttcctggtgctgctcggcgcgcggccagctttcggaacggaacgctcggcgtcgcgggccccgcccggaaagtttgccgtggagtcgcgacctcttggcccgcgcggcccggcatgaagcggcgttgaggagctgctgccgccgcttgccgctgccgccgccgccgcctgaggaggagctgcagcaccctgggccacgccgatgactactgcaaactgtggcgcccacgacgagctcgacttcaaactcgtctttggcgaggacggggcgccggcgccgccgcccccgggctcgcggcctgcagatcttgagccagatgattgtgcatccatttacatctttaatgtagatccacctccatctactttaaccacaccactttgcttaccacatcatggattaccgtctcactcttctgttttgtcaccatcgtttcagctccaaagtcacaaaaactatgaaggaacttgtgagattcctgaatctaaatatagcccattaggtggtcccaaaccctttgagtgcccaagtattcaaattacatctatctctcctaactgtcatcaagaattagatgcacatgaagatgacctacagataaatgacccagaacgggaatttttggaaaggccttctagagatcatctctatcttcctcttgagccatcctaccgggagtcttctcttagtcctagtcctgccagcagcatctcttctaggagttggttctctgatgcatcttcttgtgaatcgctttcacatatttatgatgatgtggactcagagttgaatgaagctgcagcccgatttacccttggatcccctctgacttctcctggtggctctccagggggctgccctggagaagaaacttggcatcaacagtatggacttggacactcattatcacccaggcaatctccttgccactctcctagatccagtgtcactgatgagaattggctgagccccaggccagcctcaggaccctcatcaaggcccacatccccctgtgggaaacggaggcactccagtgctgaagtttgttatgctgggtccctttcaccccatcactcacctgttccttcacctggtcactcccccaggggaagtgtgacagaagatacgtggctcaatgcttctgtccatggtgggtcaggccttggccctgcagtttttccatttcagtactgtgtagagactgacatccctctcaaaacaaggaaaacttctgaagatcaagctgccatactaccaggaaaattagagctgtgttcagatgaccaagggagtttatcaccagcccgggagacttcaatagatgatggccttggatctcagtatcctttaaagaaagattcatgtggtgatcagtttctttcagttccttcaccctttacctggagcaaaccaaagcctggccacacccctatatttcgcacatcttcattacctccactagactggcctttaccagctcattttggacaatgtgaactgaaaatagaagtgcaacctaaaactcatcatcgagcccattatgaaactgaaggtagccgaggggcagtaaaagcatctactgggggacatcctgttgtgaagctcctgggctataacgaaaagccaataaatctacaaatgtttattgggacagcagatgatcgatatttacgacctcatgcattttaccaggtgcatcgaatcactgggaagacagtcgctactgcaagccaagagataataattgccagtacaaaagttctggaaattccacttcttcctgaaaataatatgtcagccagtattgattgtgcaggtattttgaaactccgcaattcagatatagaacttcgaaaaggagaaactgatattggcagaaagaatactagagtacgacttgtgtttcgtgtacacatcccacagcccagtggaaaagtcctttctctgcagatagcctctatacccgttgagtgctcccagcggtctgctcaagaacttcctcatattgagaagtacagtatcaacagttgttctgtaaatggaggtcatgaaatggttgtgactggatctaattttcttccagaatccaaaatcatttttcttgaaaaaggacaagatggacgacctcagtgggaggtagaagggaagataatcagggaaaaatgtcaaggggctcacattgtccttgaagttcctccatatcataacccagcagttacagctgcagtgcaggtgcacttttatctttgcaatggcaagaggaaaaaaagccagtctcaacgttttacttatacaccagttttgatgaagcaagaacacagagaagagattgatttgtcttcagttccatctttgcctgtgcctcatcctgctcagacccagaggccttcctctgattcagggtgttcacatgacagtgtactgtcaggacagagaagtttgatttgctccatcccacaaacatatgcatccatggtgacctcatcccatctgccacagttgcagtgtagagatgagagtgttagtaaagaacagcatatgattccttctccaattgtacaccagccttttcaagtcacaccaacacctcctgtggggtcttcctatcagcctatgcaaactaatgttgtgtacaatggaccaacttgtcttcctattaatgctgcctctagtcaagaatttgattcagttttgtttcagcaggatgcaactctttctggtttagtgaatcttggctgtcaaccactgtcatccataccatttcattcttcaaattcaggctcaacaggacatctcttagcccatacacctcattctgtgcataccctgcctcatctgcaatcaatgggatatcattgttcaaatacaggacaaagatctctttcttctccagtggctgaccagattacaggtcagccttcgtctcagttacaacctattacatatggtccttcacattcagggtctgctacaacagcttccccagcagcttctcatcccttggctagttcaccgctttctgggccaccatctcctcagcttcagcctatgccttaccaatctcctagctcaggaactgcctcatcaccgtctccagccaccagaatgcattctggacagcactcaactcaagcacaaagtacgggccaggggggtctttctgcaccttcatccttaatatgtcacagtttgtgtgatccagcgtcatttccacctgatggggcaactgtgagcattaaacctgaaccagaagatcgagagcctaactttgcaaccattggtctgcaggacatcactttagatgatgaccaatttatatctgacttggaacaccagccatcaggttcagcagagaaatggcctaaccacagtgtgctctcatgtccagctcctttctggagaatctagaggtgaacgagataattgggagagacatgtcccagatttctgtttcccaaggagcaggggtgagcaggcaggctcccctcccgagtcctgagtccctggatttaggaagatctgatgggctctaacagtgcttactgcagccttgtgtccaccaccaacttctcagcatgtttctctccttggaccttgggtttccaactctgcagccttcaggtctggggccaggagtgggacccaccatttgtggggaaagtagcattcctccacctcaggccttgggtagatttggcaaaagaacaggagcagcataggctgtttgagctttggggaaatgaactttgctttttatatttaactaggatacttttatatgatgggtgctttgagtgtgaatgcagcaggctctcttgtttccgaggtgctgcttttgcaggtgacctggttacttagctaggattggtgatttgtactgctttatggtcatttgaagggccctttagtttttatgataatttttaaaataggaacttttgataagaccttctagaagcc

SEQ ID NO: 4587 - protein, 1068 aa, Homo sapiens
MTTANCGAHDELDFKLVFGEDGAPAPPPPGSRPADLEPDDCASIYIFNVDPPPSTLTTPLCLPHHGLPSHSSVLSPSFQLQSHKNYEGTCEIPESKYSPLGGPKPFECPSIQITSISPNCHQELDAHEDDLQINDPEREFLERPSRDHLYLPLEPSYRESSLSPSPASSISSRSWFSDASSCESLSHIYDDVDSELNEAAARFTLGSPLTSPGGSPGGCPGEETWHQQYGLGHSLSPRQSPCHSPRSSVTDENWLSPRPASGPSSRPTSPCGKRRHSSAEVCYAGSLSPHHSPVPSPGHSPRGSVTEDTWLNASVHGGSGLGPAVFPFQYCVETDIPLKTRKTSEDQAAILPGKLELCSDDQGSLSPARETSIDDGLGSQYPLKKDSCGDQFLSVPSPFTWSKPKPGHTPIFRTSSLPPLDWPLPAHFGQCELKIEVQPKTHHRAHYETEGSRGAVKASTGGHPVVKLLGYNEKPINLQMFIGTADDRYLRPHAFYQVHRITGKTVATASQEIIIASTKVLEIPLLPENNMSASIDCAGILKLRNSDIELRKGETDIGRKNTRVRLVFRVHIPQPSGKVLSLQIASIPVECSQRSAQELPHIEKYSINSCSVNGGHEMVVTGSNFLPESKIIFLEKGQDGRPQWEVEGKIIREKCQGAHIVLEVPPYHNPAVTAAVQVHFYLCNGKRKKSQSQRFTYTPVLMKQEHREEIDLSSVPSLPVPHPAQTQRPSSDSGCSHDSVLSGQRSLICSIPQTYASMVTSSHLPQLQCRDESVSKEQHMIPSPIVHQPFQVTPTPPVGSSYQPMQTNVVYNGPTCLPINAASSQEFDSVLFQQDATLSGLVNLGCQPLSSIPFHSSNSGSTGHLLAHTPHSVHTLPHLQSMGYHCSNTGQRSLSSPVADQITGQPSSQLQPITYGPSHSGSATTASPAASHPLASSPLSGPPSPQLQPMPYQSPSSGTASSPSPATRMHSGQHSTQAQSTGQGGLSAPSSLICHSLCDPASFPPDGATVSIKPEPEDREPNFATIGLQDITLDDDQFISDLEHQPSGSAEKWPNHSVLSCPAPFWRI

SEQ ID NO: 4588 - DNA, 4094 bp, Homo sapiens
ggcacgagggcaccattggatgcttactttcaggtgagcaggacccagcctgacttgccagctaccacttatgattcagagactaggaatcctgtatctgaagagttgcaggtgtctagtagttctgattctgacagtgacagctctgcagagtatggaggggttgttgaccaggcagaggaatctggagctgtcattttagaagagcaactagcaggtgtctcagcagagcaagaagttacatgtatcgatggaggcaagaccctccccaaacagccatctccccagaagtctgagcctctgctaccttctgcttctatggatgaggaagaaggggacacttgtacaatatgtctggaacagtggaccaatgctggggaccaccggctctcagcattacgctgtgggcatctctttgggtataggtgcatttccacgtggcttaaaggacaagtacgaaaatgtccccagtgcaacaagaaagccaggcacagtgacattgtcgtcctttatgcccgaaccctgagagctttggacactagtgaacaggagcgcatgaaaagttccctactgaaggaacagatgctaaggaaacaggccgagttagaatcagcacagtgccgactccaactgcaggtcctcactgataagtgcactaggcttcaaaggcgtgttcaggacttgcaaaaacttacgtcacatcaaagtcagaatttacagcaacccaggggctcccaagcatgggtcctgagctgctcaccctccagccagggccagcacaagcacaagtaccacttccaaaagaccttcacagtatctcaggcaggaaactgccggatcatggcatactgtgatgctctgagctgcctggtgatatcacagccttctcctcaggcctcttttcttccaggctttggtgttaagatgttgagtactgccaacatgaagagcagtcagtacattccgatgcatggcaaacagatccgtggactggcgtttagcagttacctcagaggcttgctactctctgcttccctagacaacactattaaactgaccagcctggagacaaataccgtggtccagacttataatgctggacgtcctgtctggagctgttgctggtgtcttgatgaggctaactacatctatgctggactggccaatggttcaattctggtatatgacgtgcgaaacacgagcagtcatgtgcaggagttagtagctcagaaagccagatgcccactggtctccctgtcatacatgcccagagctgcctcagctgcatttccatatggtggggtgctggctggaaccttggaggatgcttcattctgggaacagaaaatggacttttctcattggcctcatgtgctgcccttggagccagggggctgcatagactttcagacagagaacagctcccggcactgtcttgtgacctacaggcctgataaaaatcacaccaccatacgaagtgtgctgatggaaatgtcctaccgactggatgacactggaaatccaatctgctcctgccagcctgtacatacattttttggaggacctacttgcaaactattgaccaaaaatgccattttccaaagcccagagaatgatggcaacatcctggtgtgtactggggatgaagcagcaaattctgccctgctgtgggatgctgccagtggctcgttgctccaggacctacagaccgatcagcctgtgttggacatctgcccatttgaggtgaaccgtaacagctacttggctaccttaacagagaagatggtccacatctataagtgggagtgactgtggtctcgaaaccttgaaggcatgctgctggttagatgttgtttgctagcgcctagcagccccaagcaagatccctgtttattgtctgcagtctagaacattgggaatcatggtttgtttgcattagtatgattctaggaccctaggtcactgagacactacagattgtgtatctgttatgtccactaaaagagtaattgatgggtactttatctacattatccatttcttgggtttaaagccttcattaaccattattgtatgttggaaattcttattttctttattttctgtgtgactttctggaccttagagagtgtcctctcatcatctaggatgtgagtgggcatcaagcattttctggggaatatgacatcccatctgagttgtcctgtcacttaagtatccttgaagggactaaccatcgtcttggtactgatttgatgcaacgtagatgtaaaagagtattattcagttgaacacaagagggcactgtagaaccttgtgtccggtttatttctgaccttgaaggctgacaatcttttagtaacttgtctcatctccacacaagtgtgtgatagcacacctgggtgtgctttgtggcaataacacttgtgttccaggtgtgaagtgctgggacattggcaggcccagtgatggaagcagctagtgaacgattccctttgctaatgcctagtgcattaagttcattgctttgcgaaaggtaaggaaagaggccagttgtttgagcggtggggaagattttgttttttctagccagcttaggatctcaggattggttttatccaagctagtgctttgaagaacactatctcttgccaggaaaagatgagtgataggtcaaagcttttacttgagtctcccctagtgtcagagatcaggagaaaagacataagagaatttacaaaagctattcagactgctattgaaaacatgagaagaacttgtctcccattttgagagttcctatctaaataaagccaattcctcagactgaggggctgttcttaagtgttctttatacattccagttatccagttaaagccttccccatgtgaagctgatgtttgattccagtttcctttgatttgcctccctaaccttttctagggctcagtttgtatttctttgccttgcctcagactactttgccaacccacttccacaacagaatatgcttcaagatgtgggcaggtcagtgtcctgttcatgggagaaaatggcttaacagtctgattttctcaaatgattattgaagagttgttatcgtttttattataaaacacttctgacctgtcaattcaagagctgtttctaggatctttctctccggcaaggggttgttgcactagatttccccagagttccaagttctagttgtgccttttaatgaccctttaatattttaggacataattttttccttttttaaatttttttgtagaaatagatgtttcactacgttgtccaggctggtcttggactcctggcctcaagcaatcctcccacctcagcctcctaaagtgccaaaattataggcgtgagccactgcacccggcccctatttgaagacgtcttttgtaaaagctagcttctagaacctgagaaaagctcttttctcagaggagatactccttttgatatgttaatgattaagagtggttgcccaggcctagtttcagtggcagaataggattggaattaaaaagcagaactcatctggcttcagcagattgccaccaagaggatacaggtggtcaggtcctggctggctttgtctttgggcctgggcaggcttaggatttgactttctttgaagtacctgatgctgattgattccactaatagtaggaagcaagagacttaactatgagggacgttatgtgaatcttaagtcttaccagtccttgcattagtacattaaatttggatgttttggaagcaaattcatacgatcgtgagtgatttctccaaagaaaaaaagccttgtccagcctgaccaacatggtgaaaccccatctctactaaaaatacaaaaattaactgggtgcagtggtgcgcatgcctgtagtcccagctacttgggaggctgaggcaggagaattgcttgaaccctgggaggcagaggttgcagtgagtcgagatcgcgccactgcactccagcctcggtgacagagcaagactccatctcaaaaaaaaaaaaaaaaaaaaaaaaaaaaaaaaaaaaaaaaaaaaaaaaaaaaaaaaaaaaaaaaaaaaa

SEQ ID NO: 4589 - protein, 417 aa, Homo sapiens
MKSSLLKEQMLRKQAELESAQCRLQLQVLTDKCTRLQRRVQDLQKLTSHQSQNLQQPRGSQAWVLSCSPSSQGQHKHKYHFQKTFTVSQAGNCRIMAYCDALSCLVISQPSPQASFLPGFGVKMLSTANMKSSQYIPMHGKQIRGLAFSSYLRGLLLSASLDNTIKLTSLETNTVVQTYNAGRPVWSCCWCLDEANYIYAGLANGSILVYDVRNTSSHVQELVAQKARCPLVSLSYMPRAASAAFPYGGVLAGTLEDASFWEQKMDFSHWPHVLPLEPGGCIDFQTENSSRHCLVTYRPDKNHTTIRSVLMEMSYRLDDTGNPICSCQPVHTFFGGPTCKLLTKNAIFQSPENDGNILVCTGDEAANSALLWDAASGSLLQDLQTDQPVLDICPFEVNRNSYLATLTEKMVHIYKWE

SEQ ID NO: 4590 - DNA, 1341 bp, Homo sapiens
atgaacttcaccactcgctccaccttctccaccaactaccggtccctgggctttgtccaggcgcccagctacagtgcccggccagtcagcagcatggccagcgtctatgcaggcaccaggggctctggttcctggatctccatgtcccactccgccagcttctggggcggcatggggtctgggggcctgtccgcggggatggctgggggtcttgcaagaatgggaggcatccagaacaagaaggagaccatgcaaagcctgaagtactgcctgacctcctacctgaacacagtgaggaacctggagatggagaactggaagctagagagcaaaatccgggagcacctggagaagaagggaccccagttcagagactggagccgttacttccagaccatcaaggacctgagggctcagatcttcgcaaatactgtggacaatgcctgcatcgttctgcagattgacagtgcccgtcttgcagctgatgattttagatctgtggagaatgacatccatgggctctgcaaggtcattgatgacaccagtgtcacttggctgcagctggagacagagatcaaggctcgcaaggaagagctgctcttcatgaagaagaaccacggagaggaagtaaaaggcctacaagcccagattgccagctctgggttgaccttggaggacctcgccaagatcatggcagacatctgggcccaatatgacaagctggctcggaagaacagagaggagctggacaagtactggtctcagcagattgaggagagcaccacggtggtcaccacgcagtccgtcaaggttggagctgctgagacgacactcacggagctgagatatacagtccagtccttggagactgacctggactcaatgagaaatctgaaggccagcttggagaacagcctgagggaggtggaggcccgctacaccctgcagatggagcagctcaacgggatcctgctttacctggagtcagagctggcacagacccgggcagaggggtccttcttactgatgtgttgctcttcttcatggctcgtgaaaactattagagtcatccaagattctaagttcctgactcagaatcttactgttgtgaacctttacacccaggtttggagacagaaaggagcaccgccaagtgaggcagagcagtctcagaaacataggaaaatggtgggaagagagatcagcaacgttaactgggtgtcaagaaaacataccgagattgaagccatccacttctgcaggaacaccgaaaagaaaggtacaacgcttggggaaagactggatttcattagggacagtgacaatacctgtttgacatag

SEQ ID NO: 4591 - protein, 446 aa, Homo sapiens
MNFTTRSTFSTNYRSLGFVQAPSYSARPVSSMASVYAGTRGSGSWISMSHSASFWGGMGSGGLSAGMAGGLARMGGIQNKKETMQSLKYCLTSYLNTVRNLEMENWKLESKIREHLEKKGPQFRDWSRYFQTIKDLRAQIFANTVDNACIVLQIDSARLAADDFRSVENDIHGLCKVIDDTSVTWLQLETEIKARKEELLFMKKNHGEEVKGLQAQIASSGLTLEDLAKIMADIWAQYDKLARKNREELDKYWSQQIEESTTVVTTQSVKVGAAETTLTELRYTVQSLETDLDSMRNLKASLENSLREVEARYTLQMEQLNGILLYLESELAQTRAEGSFLLMCCSSSWLVKTIRVIQDSKFLTQNLTVVNLYTQVWRQKGAPPSEAEQSQKHRKMVGREISNVNWVSRKHTEIEAIHFCRNTEKKGTTLGERLDFIRDSDNTCLT

SEQ ID NO: 4592 - DNA, 4251 bp, Homo sapiens
ataatggccgctttcaaggtgtggattttggctccttgagcctgtctgagcgaggggtggcagcgccggcgccccagaatccgggacagaagggtcccaagagtcgcgcttggtgagagaaatcccagatcctgtgatgggggacaccagtgaggatgcctcgatccatcgattggaaggcactgatctggactgtcaggttggtggtcttatttgcaagtccaaaagtgcggccagcgagcagcatgtcttcaaggctcctgctccccgcccttcattactgggactggacttgctggcttccctgaaacggagagagcgagaggagaaggacgatggggaggacaagaagaagtccaaagtctcctcctacaaggactgggaagagagcaaggatgaccagaaggatgctgaggaagagggcggtgaccaggctggccaaaatatccggaaagacagacattatcggtctgctcgggtagagactccatcccatccgggtggtgtgagcgaagagttttgggaacgcagtcggcagagagagcgggagcggagggaacatggtgtctatgcctcgtccaaagaagaaaaggattggaagaaggagaaatcgcgggatcgagactatgaccgcaagagggacagagatgagcgggatagaagtaggcacagcagcagatcagagcgagatggagggtcagagcgtagcagcagaagaaatgaacccgagagcccacgacatcgacctaaagatgcagccaccccttcaaggtctacctgggaggaagaggacagtggctatggctcctcaaggcgctcacagtgggaatcgccctccccgacgccttcctatcgggattctgagcggagccatcggctgtccactcgagatcgagacaggtctgtgaggggcaagtactcggatgacacgcctctgccaactccctcctacaaatataacgagtgggccgatgacagaagacacttggggtccaccccgcgtctgtccaggggccgaggaagacgtgaggagggcgaagaaggaatttcatttgacacggaggaggagcggcagcagtgggaagatgaccagaggcaagccgatcgggattggtacatgatggacgagggctatgacgagttccacaacccgctggcctactcctccgaggactacgtgaggaggcgggagcagcacctgcataaacagaagcagaagcgcatttcagctcagcggagacagatcaatgaggataacgagcgctgggagacaaaccgcatgctcaccagtggggtggtccatcggctggaggtggatgaggactttgaagaggacaacgcggccaaggtgcatctgatggtgcacaatctggtgcctccctttctggatgggcgcattgtcttcaccaagcagccggagccggtgattccagtgaaggatgccacttctgacctggccatcattgctcggaaaggcagccagacagtgcggaagcacagggagcagaaggagcgcaagaaggctcagcacaaacactgggaactggcggggaccaaactgggagatataatgggcgtcaagaaggaggaagagccagataaagctgtgacggaggatgggaaggtggactacaggacagagcagaagtttgcagatcacatgaagagaaagagcgaagccagcagtgaatttgcaaagaagaagtccatcctggagcagaggcagtacctgcccatctttgcagtgcagcaggagctgctcactattatcagagacaacagcatcgtgatcgtggttggggagacggggagtggtaagaccactcagctgacgcagtacctgcatgaagatggttacacggactatgggatgattgggtgtacccagccccggcgtgtagctgccatgtcagtggccaagagagtcagtgaagagatggggggaaaccttggcgaggaggtgggctatgccatccgctttgaagactgcacttcagagaacaccttgatcaaatacatgactgacgggatcctgctccgagagtccctccgggaagccgacctggatcactacagtgccatcatcatggacgaggcccacgagcgctccctcaacactgacgtgctctttgggctgctccgggaggtagtggctcggcgctcagacctgaagctcatcgtcacatcagccacgatggatgcggagaagtttgctgccttttttgggaatgtccccatcttccacatccctggccgtaccttccctgttgacatcctcttcagcaagaccccacaggaggattacgtggaggctgcagtgaagcagtccttgcaggtgcacctgtcgggggcccctggagacatccttatcttcatgcctggccaagaggacattgaggtgacctcagaccagattgtggagcatctggaggaactggagaacgcgcctgccctggctgtgctgcccatctactctcagctgccttctgacctccaggccaaaatcttccagaaggctccagatggcgttcggaagtgcatcgttgccaccaatattgccgagacgtctctcactgttgacggcatcatgtttgttatcgattctggttattgcaaattaaaggtcttcaaccccaggattggcatggatgctctgcagatctatcccattagccaggccaatgccaaccagcggtcagggcgagccggcaggacgggcccaggtcagtgtttcaggctctacacccagagcgcctacaagaatgagctcctgaccaccacagtgcccgagatccagaggactaacctggccaacgtggtgctgctgctcaagtccctcggggtgcaggacctgctgcagttccacttcatggacccgcccccggaggacaacatgctcaactctatgtatcagctctggatcctcggggccctggacaacacaggtggtctgacctctaccgggcggctgatggtggagttcccgctggaccctgccctgtccaagatgctcatcgtgtcctgtgacatgggctgcagctccgagatcctgctcatcgtttccatgctctcggtcccagccatcttctacaggcccaagggtcgagaggaggagagtgatcaaatccgggagaagttcgctgttcctgagagcgatcatttgacctacctgaatgtttacctgcagtggaagaacaataattactccaccatctggtgtaacgatcatttcatccatgctaaggccatgcggaaggtccgggaggtgcgagctcaactcaaggacatcatggtgcagcagcggatgagcctggcctcgtgtggcactgactgggacatcgtcaggaagtgcatctgtgctgcctatttccaccaagcagccaagctcaagggaatcggggagtacgtgaacatccgcacagggatgccctgccacttgcaccccaccagctccctttttggaatgggctacaccccagattacatagtgtatcacgagttggtcatgaccaccaaggagtatatgcagtgtgtgaccgctgtggacggggagtggctggcggagctgggccccatgttctatagcgtgaaacaggcgggcaagtcacggcaggagaaccgtcgtcgggccaaagaggaagcctctgccatggaggaggagatggcgctggccgaggagcagctgcgagcccggcggcaggagcaggagaagcgcagccccctgggcagtgtcaggtctacgaagatctacactccaggccggaaagagcaaggggagcccatgacccctcgccgcacgccagcccgctttggtctgtgagctgaggctgtccccagagaggatggcagcaggtattgggtcctcagccttctggcgggagccctgaggctgcggacaaagccctttcatctgaggactttcatctgtgcatatcacggccccccagggcagttcctgctggaccagactctctggcagaggaggtggagttcttccatgcaggagcacggcatggcgggagcggggctgcagagtatccgaggtgctgccggggcagcgggaggtggctggacccatcgcatctaaaactggcccaggacacttggtgtatgcgtgacttggctgtggctgtcttttttaatccttgtgtaaagcagcaaaaaagacctaaagggaattgtaatttggttataattcaggatttggaaataaatttattatttgtaaaacaaaaaaaaaaaaaaaaaaaa

SEQ ID NO: 4593 - protein, 1227 aa, Homo sapiens
MGDTSEDASIHRLEGTDLDCQVGGLICKSKSAASEQHVFKAPAPRPSLLGLDLLASLKRREREEKDDGEDKKKSKVSSYKDWEESKDDQKDAEEEGGDQAGQNIRKDRHYRSARVETPSHPGGVSEEFWERSRQRERERREHGVYASSKEEKDWKKEKSRDRDYDRKRDRDERDRSRHSSRSERDGGSERSSRRNEPESPRHRPKDAATPSRSTWEEEDSGYGSSRRSQWESPSPTPSYRDSERSHRLSTRDRDRSVRGKYSDDTPLPTPSYKYNEWADDRRHLGSTPRLSRGRGRREEGEEGISFDTEEERQQWEDDQRQADRDWYMMDEGYDEFHNPLAYSSEDYVRRREQHLHKQKQKRISAQRRQINEDNERWETNRMLTSGVVHRLEVDEDFEEDNAAKVHLMVHNLVPPFLDGRIVFTKQPEPVIPVKDATSDLAIIARKGSQTVRKHREQKERKKAQHKHWELAGTKLGDIMGVKKEEEPDKAVTEDGKVDYRTEQKFADHMKRKSEASSEFAKKKSILEQRQYLPIFAVQQELLTIIRDNSIVIVVGETGSGKTTQLTQYLHEDGYTDYGMIGCTQPRRVAAMSVAKRVSEEMGGNLGEEVGYAIRFEDCTSENTLIKYMTDGILLRESLREADLDHYSAIIMDEAHERSLNTDVLFGLLREVVARRSDLKLIVTSATMDAEKFAAFFGNVPIFHIPGRTFPVDILFSKTPQEDYVEAAVKQSLQVHLSGAPGDILIFMPGQEDIEVTSDQIVEHLEELENAPALAVLPIYSQLPSDLQAKIFQKAPDGVRKCIVATNIAETSLTVDGIMFVIDSGYCKLKVFNPRIGMDALQIYPISQANANQRSGRAGRTGPGQCFRLYTQSAYKNELLTTTVPEIQRTNLANVVLLLKSLGVQDLLQFHFMDPPPEDNMLNSMYQLWILGALDNTGGLTSTGRLMVEFPLDPALSKMLIVSCDMGCSSEILLIVSMLSVPAIFYRPKGREEESDQIREKFAVPESDHLTYLNVYLQWKNNNYSTIWCNDHFIHAKAMRKVREVRAQLKDIMVQQRMSLASCGTDWDIVRKCICAAYFHQAAKLKGIGEYVNIRTGMPCHLHPTSSLFGMGYTPDYIVYHELVMTTKEYMQCVTAVDGEWLAELGPMFYSVKQAGKSRQENRRRAKEEASAMEEEMALAEEQLRARRQEQEKRSPLGSVRSTKIYTPGRKEQGEPMTPRRTPARFGL

SEQ ID NO: 4594 - DNA, 2540 bp, Homo sapiens
attgggctgttgagcgggggccgaccgacggccaggagtttcttttctgcgcttgtgcgttttctgttcggtttccttcccgctagcggggccacgagggttgctaggcaacagcccctgggtgacttggtcttagggtcctgtccggcttggggctgatgaaaggagctgtccgcgcccgggctcttccgagaagtggttgctgacagccacaaagtgaaagggagtgaggcggcgtggacgagtaaggagtgacagtgaggattcacatttgggttatttcaagatgagcttcctactgcccaagctgactagcaaaaaggaagtagaccaggcgataaaaagtactgctgagaaggtgttggttctcaggtttgggagagatgaagatcctgtctgtctgcagctagatgatattctttctaagacctcttctgacttaagtaaaatggctgctatatacctggtggatgtggaccaaactgcagtttatacacagtattttgacatcagttatattccatctactgtctttttcttcaatgggcagcatatgaaagtggattatggatctccagatcacactaagtttgtgggaagcttcaaaaccaaacaagacttcatagatttgattgaagtaatctatcgaggagcaatgagggggaagcttattgtccaaagtcctattgatcccaagaatattcccaaatatgaccttctctatcaagacatttagtacattaattgctgtcaaagatgaagaagaaggcacatcttgacacagtacctgaatccagctgtgctgtgtttctggagtcctttggaaacatgtgtcccagaggagaagaggtttgacttgcgtgtagaaaacccggcccctgaggaaaagaccccactggttctctgatgacctgggatgcctaactgtctactccctgcaagcctcagagcagccaagtcattggtgttcattttccccacagtgatttttgtaacttctctttctaatgtttttctttatccctttaatacagaaccctcccaaacattggctagtacaacttgatttcatcatgttcatttgatacacaagtgaactggaaagtcacttcccatagaagcaaaagtacttattttctaccctagctgggtgcatgtgtgtgcacacacacacacacacacacccccacacccctttgccggttcctcgactcatacatccctcgtgctttcccatctccagtctgtattactgtaggttctcttcaaataattaattgagcagacaagtttgttttattttggagcctttttggctctggcttttaaacattgtcctggttggctcatttaattttttttttttttttgagaccgagtcactcttgtcacccaggctggagtgcagtggcgcgatctcggctcactgcaagctccacctcctgggttcatgccattctcctgcttcagcctcctgagtagctgggactacaggcgcccgccaccatgcccagctaattttttgtatttttatagaggcgcagtttcaccgtgttagccaagatggtctcgatctcctgacctcgtgatctgccctcctcagcctcccaggtgctgggattataggcgtgagccaccgcgcgcaccccatttaattattttttatgttataaaatttaatatggaaagtgagaatttgaaccttcaccatccaccactctattcaggtaaaacaatgaatgagccaccttagcaggagcagatttttcccagaagctgctgcctcttcctgaggcagaaaattggattactaaggctcaaaactaaaagagatgtcagcattgttggatagaaatgtcacctatatgggatttgcctgttttaataactttgtaaggaattcttgctcttctaggggtgcctggcgcaaccgtgggcaagttactgctcctctttaaacctcgtggtggttattgaaacagatttattagaaggagagggtaggtgcagagctggagagccatgggtgaggcagcttgtgacctgcctagcagccgctgaccacctctccaacagaagcctagtcctgttcagagcagcactgtcactgcaagtccagccccctttgccaggggctccattccacccctttcctgcagggaggggtgccatgagtcttgcttttggctcatacaggagagagggaaggctgccaggcactgcttgtatccctgctgataagaggagggagtcactccaggaataagacaaaaggagaggaggaggccatcacctctggcctcttccatcgtacacttcctgtctctggtttaatcatgatgcatggagctacaacagccatcttaggtccccgaggtgcccagcatcacgtaaaacatcgatatgctaagaagaacaaaaagagcccaatctctgatgttattgagctcctgcatgaactctggacctgcctgcctcagacttctgtgaaagaataaaatttctttttgcctaaaaaaaaaaaaaaaaaaaaaaaaaaa

SEQ ID NO: 4595 - protein, 149 aa, Homo sapiens
MSFLLPKLTSKKEVDQAIKSTAEKVLVLRFGRDEDPVCLQLDDILSKTSSDLSKMAAIYLVDVDQTAVYTQYFDISYIPSTVFFFNGQHMKVDYGSPDHTKFVGSFKTKQDFIDLIEVIYRGAMRGKLIVQSPIDPKNIPKYDLLYQDI

SEQ ID NO: 4596 - DNA, 1412 bp, Homo sapiens
ctcttccagaggcaagaccaaccaagatgagtgccctgggagctgtcattgccctcctgctctggggacagctttttgcagtggactcaggcaatgatgtcacggatatcgcagatgacggctgcccgaagccccccgagattgcacatggctatgtggagcactcggttcgctaccagtgtaagaactactacaaactgcgcacagaaggagatggagtatacaccttaaatgataagaagcagtggataaataaggctgttggagataaacttcctgaatgtgaagcagatgacggctgcccgaagccccccgagattgcacatggctatgtggagcactcggttcgctaccagtgtaagaactactacaaactgcgcacagaaggagatggagtgtacaccttaaacaatgagaagcagtggataaataaggctgttggagataaacttcctgaatgtgaagcagtatgtgggaagcccaagaatccggcaaacccagtgcagcggatcctgggtggacacctggatgccaaaggcagctttccctggcaggctaagatggtttcccaccataatctcaccacaggtgccacgctgatcaatgaacaatggctgctgaccacggctaaaaatctcttcctgaaccattcagaaaatgcaacagcgaaagacattgcccctactttaacactctatgtggggaaaaagcagcttgtagagattgagaaggttgttctacaccctaactactcccaggtagatattgggctcatcaaactcaaacagaaggtgtctgttaatgagagagtgatgcccatctgcctaccttcaaaggattatgcagaagtagggcgtgtgggttatgtttctggctgggggcgaaatgccaattttaaatttactgaccatctgaagtatgtcatgctgcctgtggctgaccaagaccaatgcataaggcattatgaaggcagcacagtccccgaaaagaagacaccgaagagccctgtaggggtgcagcccatactgaatgaacacaccttctgtgctggcatgtctaagtaccaagaagacacctgctatggcgatgcgggcagtgcctttgccgttcacgacctggaggaggacacctggtatgcgactgggatcttaagctttgataagagctgtgctgtggctgagtatggtgtgtatgtgaaggtgacttccatccaggactgggttcagaagaccatagctgagaactaatgcaaggctggccggaagcccttgcctgaaagcaagatttcagcctggaagagggcaaagtggacgggagtggacaggagtggatgcgataagatgtggtttgaagctgatgggtgccagccctgcattgctgagtcaatcaataaagagctttcttttgaccca

SEQ ID NO: 4597 - DNA, 1569 bp, Homo sapiens
atgctgtctgtgtgtgtctccgcggccgtagcccgtgacctcactcgtaaggaaggaggtatagtgaagaggacaggaaccattgtggacgttccagtcggtgaggagctgttgggtcgtgtagttgatgcccttggtaatgctattgatggaaagggtccaatgggttccaagacccataaaatcattcctcgaacttcagtgtgggaaccaatgccgactggcattaaggctgtggatagcttggtgccaattggtcgtggtcagcatgagctcattattggtgaccgaaggactgggaaaacctcaattgctattgacacaatcattaaccagaaacatttcaatgatagatctgaagaaaagaagaagctgtactgtatctatgttgctattggtcgaaagagatccactgttgctcagttggtgaagagacttacagatgcagatgccgtgaagtacaccactgtggtgtcagctatggcctcagatgctgccctacttcagtacctggctccttactctgactgttccatgggagagtattttagagacgatggcaaatatactttgatcatctatgacgacttatccaaacaggctgtcgcttactgtcagatgtctctgttgctccaccgacccccctggtcgactatgaagcaggcggcaggtaccatgaagctggaattggctcaggatcgtgaggttgctgcttttgcccagtttggttctgacctcaatgctcccactcaacaactattgagtcgcggtgtgcgtctaactgagttgctgaagcaaggacagtatcctcccatggttactgaacaacaagtggctgttatctgtgcgggtggagagaatatagaggacattccaaaggaagtgctgacagactgcgcccaccttgtgaaggccaatagcactcaaggctgcaagaacaacgttaatgtggtaaatactccacggtctaacctgaagaaaacagctgacgtggatgtgaggcagataggctttcacaggcagaaggatgtaaaaattgtgacaatggagaagaaaagaggattcctagctcatatttggaacaaggaagttcaagatctcatccgggactatctggaagaaggaaagaagtggtggattgggcaaaatgtaatgccattgaaaaagcatcaagacaacaaatacccagcagacgttgcagccaacgggcccccaaagcccctcagctgcacctacctgtccagaaacttcattcggatctcatccaaaggggacaagtgcttactgaaatactatttcatttgccagactggtgactttttggacggagatgcccattatgaaagaaatggaaataattcccatttgtaccagagacacaagaagacaaaaagaggagttgcaatagcaagagacaaaatgcccccagactttcaggatcatgtgattcctggccaagaaataaaagcaaaatcattttattccccagtggattcggatgaaaccggtgataaaatcaggtacaactccaagaggagacactggagaacaggcatgctgggtctgtaa

SEQ ID NO: 4598 - protein, 522 aa, Homo sapiens
MLSVCVSAAVARDLTRKEGGIVKRTGTIVDVPVGEELLGRVVDALGNAIDGKGPMGSKTHKIIPRTSVWEPMPTGIKAVDSLVPIGRGQHELIIGDRRTGKTSIAIDTIINQKHFNDRSEEKKKLYCIYVAIGRKRSTVAQLVKRLTDADAVKYTTVVSAMASDAALLQYLAPYSDCSMGEYFRDDGKYTLIIYDDLSKQAVAYCQMSLLLHRPPWSTMKQAAGTMKLELAQDREVAAFAQFGSDLNAPTQQLLSRGVRLTELLKQGQYPPMVTEQQVAVICAGGENIEDIPKEVLTDCAHLVKANSTQGCKNNVNVVNTPRSNLKKTADVDVRQIGFHRQKDVKIVTMEKKRGFLAHIWNKEVQDLIRDYLEEGKKWWIGQNVMPLKKHQDNKYPADVAANGPPKPLSCTYLSRNFIRISSKGDKCLLKYYFICQTGDFLDGDAHYERNGNNSHLYQRHKKTKRGVAIARDKMPPDFQDHVIPGQEIKAKSFYSPVDSDETGDKIRYNSKRRHWRTGMLGL

SEQ ID NO: 4599 - DNA, 2556 bp, Homo sapiens
ctgtggctggcctccccgcgcccagagcgaaattaagggcatgcccccagcagctgactcagtcggcgtggcgcttcccccaacgtctgccgtgcccccgccgcgggaagtagtccccggccgcgccgactccaaaggaaaccgagggagggtgccccgagtcagcgcgtgggtcccggcagcggcgatcgcgcagccaatccctggaaaggagggcgtggctatatcggccccgtggatccctccgcccgcgcttgttgtgctgaggccgagggagtcgccattttggatggtgaaccctgaagtcggtgtctgctgcgttcacggcaggattcggttaggaggaacagcacagcatgctgggctctggatttaaagctgagcgcttaagagtgaatttgagattagtcataaatcgccttaaactattggagaaaaagaaaacggaactggcccagaaagcaaggaaggagattgctgactatctggctgctgggaaagatgaacgagctcggatccgtgtggagcacattatccgggaagactacctcgtggaggccatggagatcctggagctgtactgtgacctgctgctggctcggtttggccttatccagtctatgaaggaactagattctggtctggctgaatctgtgtctacattgatctgggctgctcctcgactccagtcagaagtggctgagttgaaaatagttgctgatcagctctgtgccaagtatagcaaggaatatggcaagctatgtaggaccaaccagattggaactgtgaatgacaggctaatgcacaagctgagtgtggaagccccacccaaaatcctggtggagagatacctgattgaaattgcaaagaattacaacgtaccctatgaacctgactctgtggtcatggcagaagctcctcctggggtagagacagatcttattgatgttggattcacagatgatgtgaagaaaggaggccctggaagaggagggagtggtggcttcacagcaccagttggtggacctgatggaacggtgccaatgcccatgcccatgcccatgcctatgccatctgcaaatacgcctttctcatatccactgccaaagggaccagtagatgacattaatgctgataagaatatctcttctgcacagattgttggtcctggacccaagccagaagcctctgcaaagcttccttccagacctgcagataactatgacaactttgtcctaccagagttgccatctgtgccagacacactaccaactgcatctgctggtgccagcacctcagcatctgaagacattgactttgatgatctttcccggaggtttgaagagctgaaaaagaaaacataggtctcttaaaccaggcaactttcacgttttgggagttgagactgagcaatttctccttgtaacaaagaatctccatgaaattctgtttcatctgttaaccgtcactcagcacaacactccctctgggctctcttcctgctcctccagattctgctgctttccagttctctgttgatcctgagactaacaattggagactgaggccagagcaactggctcctggcagctgtgcttgtccgtttcctgtcagagtgatcccaggtttcctcctggcccgtcccatggtccctccacaggagtgtgagaggatgggggaagcactgtgggaagaccaccaaagatggctggacagtgggagagagcacgttgtgaagcatcccagcctcgtgttgaggttccagacttagaaacagacccctctgtacagggggattgtggtgagtgagaatcaaggccaccttgtgtgttttctcactctcgaatgcaagtgggagagggaaaatgactcgggacgccattgtaacggttcctggaagctgggccctctcattggcatatacagtactcctcgctgcagggcactgtcccaccgggatccagttgcaaagtttgtcttgacagttgaaggcctcgcttagttgtactggattctcagggagccctctgtggccttttgctttgcgtgctgtttcccttgtaccagagggcggcaccgtggaaattctgttttccctgtagcatattgtgttggattgcattactggcagagaaaggacaaggtgccattcaagtcctagggtgggcttccagctgccttaatagaagtactcaagtcttttgggtagtgagctggaaagcctacaggaaaagaggggtacctgttttcatttgaaaactttgattcatggaacctttaaaactaatctcagaaaaatttttggtgcccatgcagctgtagttgttcactgctttcctggatggatgggactcttatgtcataacttctgttactcctttggcccatagctaaggtcatccttccccacaggggtggctttgggattggatgatacagcttttgcttctgtgtagtatacctgtacatacttgtttcaggcagcctttctttaatgttttcagttggtttgtattctgtagctcagtagctgctaataaagttaaagatcctgtg

SEQ ID NO: 4600 - DNA, 4240 bp, Homo sapiens
cggcgctgagtgacccgagtcgggacgcgggctgcgcgcgcgggaccccggagcccaaacccggggcaggcgggcagctgtgcccgggcggcacggccagcttcctgatttctcccgattccttccttctccctggagcggccgacaatgtccaccacggtcaatgtagattcccttgcggaatatgagaagagccagatcaagagagccctggagctggggacggtgatgactgtgttcagcttccgcaagtccacccccgagcggagaaccgtccaggtgatcatggagacgcggcaggtggcctggagcaagaccgctgacaagatcgagggcttcttggatatcatggaaataaaagaaatccgcccagggaagaactccaaagatttcgagcgagcaaaagcagttcgccagaaagaagactgctgcttcaccatcctatatggcactcagttcgtcctcagcacgctcagcttggcagctgactctaaagaggatgcagttaactggctctctggcttgaaaatcttacaccaggaagcgatgaatgcgtccacgcccaccattatcgagagttggctgagaaagcagatatattctgtggatcaaaccagaagaaacagcatcagtctccgagagttgaagaccatcttgcccctgatcaactttaaagtgagcagtgccaagttccttaaagataagtttgtggaaataggagcacacaaagatgagctcagctttgaacagttccatctcttctataaaaaacttatgtttgaacagcaaaaatcgattctcgatgaattcaaaaaggattcgtccgtgttcatcctggggaacactgacaggccggatgcctctgctgtttacctgcatgacttccagaggtttctcatacatgaacagcaggagcattgggctcaggatctgaacaaagtccgtgagcggatgacaaagttcattgatgacaccatgcgtgaaactgctgagcctttcttgtttgtggatgagttcctcacgtacctgttttcacgagaaaacagcatctgggatgagaagtatgacgcggtggacatgcaggacatgaacaaccccctgtctcattactggatctcctcgtcacataacacgtaccttacaggtgaccagctgcggagcgagtcgtccccagaagcttacatccgctgcctgcgcatgggctgtcgctgcattgaactggactgctgggacgggcccgatgggaagccggtcatctaccatggctggacgcggactaccaagatcaagtttgacgacgtcgtgcaggccatcaaagaccacgcctttgttacctcgagcttcccagtgatcctgtccatcgaggagcactgcagcgtggagcaacagcgtcacatggccaaggccttcaaggaagtatttggcgacctgctgttgacgaagcccacggaggccagtgctgaccagctgccctcgcccagccagctgcgggagaagatcatcatcaagcataagaagctgggcccccgaggcgatgtggatgtcaacatggaggacaagaaggacgaacacaagcaacagggggagctgtacatgtgggattccattgaccagaaatggactcggcactactgcgccattgccgatgccaagctgtccttcagtgatgacattgaacagactatggaggaggaagtgccccaggatataccccctacagaactacattttggggagaaatggttccacaagaaggtggagaagaggacgagtgccgagaagttgctgcaggaatactgcatggagacggggggcaaggatggcaccttcctggttcgggagagcgagaccttccccaatgactacaccctgtccttctggcggtcaggccgggtccagcactgccggatccgctccaccatggagggcgggaccctgaaatactacttgactgacaacctcaccttcagcagcatctatgccctcatccagcactaccgcgagacgcacctgcgctgcgccgagttcgagctgcggctcacggaccctgtgcccaaccccaacccccacgagtccaagccgtggtactatgacagcctgagccgcggagaggcagaggacatgctgatgaggattccccgggacggggccttcctgatccggaagcgagaggggagcgactcctatgccatcaccttcagggctaggggcaaggtaaagcattgtcgcatcaaccgggacggccggcactttgtgctggggacctccgcctattttgagagtctggtggagctcgtcagttactacgagaagcattcactctaccgaaagatgagactgcgctaccccgtgacccccgagctcctggagcgctacaatatggaaagagatataaactccctctacgacgtcagcagaatgtatgtggatcccagtgaaatcaatccgtccatgcctcagagaaccgtgaaagctctgtatgactacaaagccaagcgaagcgatgagctgagcttctgccgtggtgccctcatccacaatgtctccaaggagcccgggggctggtggaaaggagactatggaaccaggatccagcagtacttcccatccaactacgtcgaggacatctcaactgcagacttcgaggagctagaaaagcagattattgaagacaatcccttagggtctctttgcagaggaatattggacctcaatacctataacgtcgtgaaagcccctcagggaaaaaaccagaagtcctttgtcttcatcctggagcccaagcagcagggcgatcctccggtggagtttgccacagacagggtggaggagctctttgagtggtttcagagcatccgagagatcacctggaagattgacaccaaggagaacaacatgaagtactgggagaagaaccagtccatcgccatcgagctctctgacctggttgtctactgcaaaccaaccagcaaaaccaaggacaacttagaaaatcctgacttccgagaaatccgctcctttgtggagacgaaggctgacagcatcatcagacagaagcccgtcgacctcctgaagtacaatcaaaagggcctgacccgcgtctacccaaagggacaaagagttgactcttcaaactacgaccccttccgcctctggctgtgcggttctcagatggtggcactcaatttccagacggcagataagtacatgcagatgaatcacgcattgttttctctcaatgggcgcacgggctacgttctgcagcctgagagcatgaggacagagaaatatgacccgatgccacccgagtcccagaggaagatcctgatgacgctgacagtcaaggttctcggtgctcgccatctccccaaacttggacgaagtattgcctgtccctttgtagaagtggagatctgtggagccgagtatgacaacaacaagttcaagacgacggttgtgaatgataatggcctcagccctatctgggctccaacacaggagaaggtgacatttgaaatttatgacccaaacctggcatttctgcgctttgtggtttatgaagaagatatgttcagcgatcccaactttcttgctcatgccacttaccccattaaagcagtcaaatcaggattcaggtccgttcctctgaagaatgggtacagcgaggacatagagctggcttccctcctggttttctgtgagatgcggccagtcctggagagcgaagaggaactttactcctcctgtcgccagctgaggaggcggcaagaagaactgaacaaccagctctttctgtatgacacacaccagaacttgcgcaatgccaaccgggatgccctggttaaagagttcagtgttaatgagaaccagctccagctgtaccaggagaaatgcaacaagaggttaagagagaagagagtcagcaacagcaagttttactcatagaagctggggtatgtgtgtaagggtattgtgtgtgtgcgcatgtgtgtttgcatgtaggagaacgtgccctattcacactctgggaagacgctaatctgtgacatcttttcttcaagcctgccatcaaggacatttcttaagacccaactggcatgagttggggtaatttcctattattttcatcttggacaactttcttaacttatattctttatagaggattccccaaaatgtgctcctcatttttggcctctcatgttccaaacctcattgaataaaagcaatgaaaaccttg

SEQ ID NO: 4601 - protein, 1265 aa, Homo sapiens
MSTTVNVDSLAEYEKSQIKRALELGTVMTVFSFRKSTPERRTVQVIMETRQVAWSKTADKIEGFLDIMEIKEIRPGKNSKDFERAKAVRQKEDCCFTILYGTQFVLSTLSLAADSKEDAVNWLSGLKILHQEAMNASTPTIIESWLRKQIYSVDQTRRNSISLRELKTILPLINFKVSSAKFLKDKFVEIGAHKDELSFEQFHLFYKKLMFEQQKSILDEFKKDSSVFILGNTDRPDASAVYLHDFQRFLIHEQQEHWAQDLNKVRERMTKFIDDTMRETAEPFLFVDEFLTYLFSRENSIWDEKYDAVDMQDMNNPLSHYWISSSHNTYLTGDQLRSESSPEAYIRCLRMGCRCIELDCWDGPDGKPVIYHGWTRTTKIKFDDVVQAIKDHAFVTSSFPVILSIEEHCSVEQQRHMAKAFKEVFGDLLLTKPTEASADQLPSPSQLREKIIIKHKKLGPRGDVDVNMEDKKDEHKQQGELYMWDSIDQKWTRHYCAIADAKLSFSDDIEQTMEEEVPQDIPPTELHFGEKWFHKKVEKRTSAEKLLQEYCMETGGKDGTFLVRESETFPNDYTLSFWRSGRVQHCRIRSTMEGGTLKYYLTDNLTFSSIYALIQHYRETHLRCAEFELRLTDPVPNPNPHESKPWYYDSLSRGEAEDMLMRIPRDGAFLIRKREGSDSYAITFRARGKVKHCRINRDGRHFVLGTSAYFESLVELVSYYEKHSLYRKMRLRYPVTPELLERYNMERDINSLYDVSRMYVDPSEINPSMPQRTVKALYDYKAKRSDELSFCRGALIHNVSKEPGGWWKGDYGTRIQQYFPSNYVEDISTADFEELEKQIIEDNPLGSLCRGILDLNTYNVVKAPQGKNQKSFVFILEPKQQGDPPVEFATDRVEELFEWFQSIREITWKIDTKENNMKYWEKNQSIAIELSDLVVYCKPTSKTKDNLENPDFREIRSFVETKADSIIRQKPVDLLKYNQKGLTRVYPKGQRVDSSNYDPFRLWLCGSQMVALNFQTADKYMQMNHALFSLNGRTGYVLQPESMRTEKYDPMPPESQRKILMTLTVKVLGARHLPKLGRSIACPFVEVEICGAEYDNNKFKTTVVNDNGLSPIWAPTQEKVTFEIYDPNLAFLRFVVYEEDMFSDPNFLAHATYPIKAVKSGFRSVPLKNGYSEDIELASLLVFCEMRPVLESEEELYSSCRQLRRRQEELNNQLFLYDTHQNLRNANRDALVKEFSVNENQLQLYQEKCNKRLREKRVSNSKFYS

SEQ ID NO: 4602 - DNA, 1086 bp, Homo sapiens
gggcgggcccgcacccctgcgaacatggcgctgcgagtggtgcggagcgtgcgggccctgctctgcaccctgcgcgcggtcccgttacccgccgcgccctgcccgccgaggccctggcagctgggggtgggcgccgtccgtacgctgcgcactggacccgctctgctctcggtgcgtaaattcacagagaaacacgaatgggtaacaacagaaaatggcattggaacagtgggaatcagcaattttgcacaggaagcgttgggagatgttgtttattgtagtctccctgaagttgggacaaaattgaacaaacaagatgagtttggtgctttggaaagtgtgaaagctgctagtgaactctattctcctttatcaggagaagtaactgaaattaatgaagctcttgcagaaaatccaggacttgtaaacaaatcttgttatgaagatggttggctgatcaagatgacactgagtaacccttcagaactagatgaacttatgagtgaagaagcatatgagaaatacataaaatctattgaggagtgaaaatggaactcctaaataaactagtatgaaataacgcaagccagcagagttgtcttaaattagtggtggatagaagacttagaatagaaacttttagtattaccgatggggaaaaaaaaactactgttaacactgctaatgaaagaaaatgccctttaactttctaatgattatagataaatataatatgcgtctttttcacaatatcctatgatttttagactaggctctagtgttcagaattcatgaaattatccatggtaaaaactagttataaaaattacataattcaaagataacattgttattcttaagccttatataatattgtaacttgcatgtatccatacctggatttgggatgaaatacttaatgatctttccattggaaataactggaagtgaagaggttttgttgcttgtacagtgtcagatgaggaacaccactatcttaattttgcgatacactgcatttgctggtgctatttttatacagtgaagcaacagctttgcagcaaaataataaaatacttcttcgtt

SEQ ID NO: 4603 - protein, 173 aa, Homo sapiens
MALRVVRSVRALLCTLRAVPLPAAPCPPRPWQLGVGAVRTLRTGPALLSVRKFTEKHEWVTTENGIGTVGISNFAQEALGDVVYCSLPEVGTKLNKQDEFGALESVKAASELYSPLSGEVTEINEALAENPGLVNKSCYEDGWLIKMTLSNPSELDELMSEEAYEKYIKSIEE

SEQ ID NO: 4604 - DNA, 716 bp, Homo sapiens
acggtggagcggtggagggcgtcactgggtttcggcgtctggcaagcggttcagctgtctgctccctagcagccggccttcgggtcgggcgtctccgcggctactgccgcttcagttctcccggtgtggccacgagtcgggttgcactgctgtgatccatcctcatctcctaaagatgcatcctgacttatctccacacttgcacactgaagaatgcaacgtcttgattaacttgcttaaggaatgtcacaaaaatcacaacattctgaaattttttggttattgtaatgatgttgatcgggagttgagaaaatgcctgaagaatgagtacgtagaaaacaggaccaagagcagggagcatggcattgcaatgcgaaagaaactttttaatcctccagaggaatccgaaaaataaattgtattttcactcgatgccttggctgagagaagacctaaagactctgggttgatacctgaaagaatcctgtcttatttggtctccataatcctttgaatggaaagtgacctgtgagagattgaaccatggagaaatatgaaaaccctggattctgagtatttgttgggcagggcgtttagtactgtctcccctttaccagcaaacctgacttcaccatgtttattccctttgcctacaaccagttaatatctgagtaacttatctccttcaataaaataatttaaataaaaaaaaaaaa

SEQ ID NO: 4605 - protein, 79 aa, Homo sapiens
MHPDLSPHLHTEECNVLINLLKECHKNHNILKFFGYCNDVDRELRKCLKNEYVENRTKSREHGIAMRKKLFNPPEESEK

SEQ ID NO: 4606 - DNA, 3347 bp, Homo sapiens
gcgcaggcgcggcggccgatgcgagtgtgtatgtgcgggcgagaagatggcggcggcgggggaagcagcgtgagcagccggaggatcgcggagtcccaatgaaacgggcagccatggccctccacagcccgcagtatatttttggagattttagccctgatgaattcaatcaattctttgtgactcctcgatcttcagttgagcttcctccatacagtggaacagttctgtgtggcacacaggctgtggataaactacctgatggacaagaatatcagagaattgagtttggtgtcgatgaagtcattgaacccagtgacactttgccgagaacccccagctacagtatttcaagcacactgaaccctcaggcccctgaatttattctcggttgtacagcttccaaaataacccctgatggtatcactaaagaagcaagctatggctccatcgactgccagtacccaggctctgccctcgctttggatggaagttctaatgtggaggcggaagttttggaaaatgatggtgtctcaggtggtcttggacaaagggagcgtaaaaagaagaaaaagcggccacctggatattacagctatttgaaagatggtggcgatgatagtatctccacagaagccctggtcaatggccatgccaattcagcagtcccgaacagtgtcagtgcagaggatgcagaatttatgggtgacatgcccccgtcagttacgcccaggacttgtaacagcccccagaactccacagactctgtcagtgacattgtgcctgacagtcctttccccggagcactcggcagtgacaccaggactgcagggcagccagaggggggccccggggctgattttggtcagtcctgcttccctgcagaggctggcagagacaccctgtcaaggacagctggggctcagccctgcgttggtaccgatactactgaaaaccttggagttgctaatggacaaatacttgaatcctcgggtgagggcacagctaccaacggggtggagttgcacaccacggaaagcatagacttggacccaaccaaacccgagagtgcatcacctcctgctgacggcacgggctctgcatcaggcacccttcctgtcagccagcccaagtcctgggccagcctctttcatgattctaagccctcttcctcctcgccggtggcctatgtggaaactaagtattcccctcccgccatatctcccctggtttctgaaaagcaggttgaagtcaaagaagggcttgttccggtttcagaggatcctgtagccataaagattgcagagttgctggagaatgtaaccctaatccataaaccagtgtcgttgcaaccccgtgggctgatcaataaagggaactggtgctacattaatgctacactgcaggcattggttgcttgcccgccgatgtaccacctgatgaagttcattcctctgtattccaaagtgcaaaggccttgtacgtcaacacccatgatagacagctttgttcggctaatgaatgagttcactaatatgccagtacctccaaaaccccgacaagctcttggagataaaatcgtgagggatattcgccctggagctgcctttgagcccacatatatttacagactcctgacagttaacaagtcaagcctgtctgaaaagggtcgacaagaagatgctgaggaatacttaggcttcattctaaatggacttcatgaggaaatgttgaacctaaagaagcttctctcaccaagtaatgaaaaacttacgatttccaacggccccaaaaaccactcggtcaatgaagaagagcaggaagaacaaggtgaaggaagcgaggatgaatgggaacaagtgggcccccggaacaagacttccgtcacccgccaggcggattttgttcagactccaatcaccggcatttttggtggacacatcaggtctgtggtttaccagcagagttcaaaagaatctgccactttgcagccatttttcacgttgcagttggatatccagtcagacaagatacgcacagtccaggatgcactggagagcttggtggcaagagaatctgtccaaggttataccacaaaaaccaaacaagaggttgagataagtcgaagagtgactctggaaaaactccctcctgtcctcgtgctgcacctgaaacgattcgtttatgagaagactggtgggtgccagaagcttatcaaaaatattgaatatcctgtggacttggaaattagtaaagaactgctttctccaggggttaaaaataagaattttaaatgccaccgaacctatcggctgtttgcagtggtctaccatcacggcaacagtgcgacgggcggccattacactacagacgtcttccagatcggtctgaatggctggctgcgcatcgatgaccagacagtcaaggtgatcaaccagtaccaggtggtgaaaccaactgctgaacgcacagcctacctcctgtattaccgccgagtggacctgctgtaaaccctgtgtgcgctgtgtgtgcgcccagtgcccgcttcgtaggacaccacctcacactcacttcccgcctctctttagtggctctttagagagaaactctttctccctttgcaaaaatgggctagaatgaaaaggagatgccttggggttcgtgcacaacacagcttctgttgactctaacttccaaatcaaaatcatttggttgaaacagactgttgcttgattttagaaaatacacaaaaacccatatttctgaaataatgctgattcctgagataagaaagtggatttgatccccagtctcattgcttagtagaataaatcctgcaccagcaacaacacttgtaaatttgtgaaaatgaattttatctttccttaaaaaagaaattttttaatccatcacacttttcttccctaccctttagtttttgataaatgataaaaatgagccagttatcaaagaagaactagttcttacttcaaaagaaaaataaacataaaaaataagttgctggttcctaacaggaaaaattttaataattgtactgagagaaactgcttacgtacacattgcagatcaaatatttggagttaaaatgttagtctacatagatgggtgattgtaactttattgccattaaaagatttcaaattgcattcatgcttctgtgtacacataatgaaaaatgggcaaataatgaagatctctccttcagtctgctctgtttaattctgctgtctgctcttctctaatgctgcgtccctaattgtacacagtttagtgatatctaggagtataaagttgtcgcccatcaataaaaatcacaaagttggttt

SEQ ID NO: 4607 - protein, 798 aa, Homo sapiens
MALHSPQYIFGDFSPDEFNQFFVTPRSSVELPPYSGTVLCGTQAVDKLPDGQEYQRIEFGVDEVIEPSDTLPRTPSYSISSTLNPQAPEFILGCTASKITPDGITKEASYGSIDCQYPGSALALDGSSNVEAEVLENDGVSGGLGQRERKKKKKRPPGYYSYLKDGGDDSISTEALVNGHANSAVPNSVSAEDAEFMGDMPPSVTPRTCNSPQNSTDSVSDIVPDSPFPGALGSDTRTAGQPEGGPGADFGQSCFPAEAGRDTLSRTAGAQPCVGTDTTENLGVANGQILESSGEGTATNGVELHTTESIDLDPTKPESASPPADGTGSASGTLPVSQPKSWASLFHDSKPSSSSPVAYVETKYSPPAISPLVSEKQVEVKEGLVPVSEDPVAIKIAELLENVTLIHKPVSLQPRGLINKGNWCYINATLQALVACPPMYHLMKFIPLYSKVQRPCTSTPMIDSFVRLMNEFTNMPVPPKPRQALGDKIVRDIRPGAAFEPTYIYRLLTVNKSSLSEKGRQEDAEEYLGFILNGLHEEMLNLKKLLSPSNEKLTISNGPKNHSVNEEEQEEQGEGSEDEWEQVGPRNKTSVTRQADFVQTPITGIFGGHIRSVVYQQSSKESATLQPFFTLQLDIQSDKIRTVQDALESLVARESVQGYTTKTKQEVEISRRVTLEKLPPVLVLHLKRFVYEKTGGCQKLIKNIEYPVDLEISKELLSPGVKNKNFKCHRTYRLFAVVYHHGNSATGGHYTTDVFQIGLNGWLRIDDQTVKVINQYQVVKPTAERTAYLLYYRRVDLL

SEQ ID NO: 4608 - DNA, 1836 bp, Homo sapiens
ggaagccgacgccgcgctcgcatgctcgcaggcgccgcgtagccgtcgccaccgccgccagcccgtgcgccctcggcgcgtacccgccgcgctcccatccccgccgccggccaggggcgcgctcggccgccccggacagtgtcccgctgcggctccgcggcgatggccaccaagatcgacaaagaggcttgccgggcggcgtacaacctggtgcgcgacgacggctcggccgtcatctgggtgacttttaaatatgacggctccaccatcgtccccggcgagcagggagcggagtaccagcacttcatccagcagtgcacagatgacgtccggttgtttgccttcgtgcgcttcaccaccggggatgccatgagcaagaggtccaagtttgccctcatcacgtggatcggtgagaacgtcagcgggctgcagcgcgccaaaaccgggacggacaagaccctggtgaaggaggtcgtacagaatttcgctaaggagtttgtgatcagtgatcggaaggagctggaggaagatttcatcaagagcgagctgaagaaggcggggggagccaattacgacgcccagacggagtaaccccagcccccgccacaccaccccttgccaaagtcatctgcctgctccccgggggagaggaccgccggcctcagctactagcccaccagcccaccagggagaaaagaagccatgagaggcagcgcccgccaccctgtgtccacagcccccaccttcccgcttcccttagaaccctgccgtgtcctatctcatgacgctcatggaacctctttctttgatcttctttttcttttctccccctcttttttgttctaaagaaaagtcattttgatgcaaggtcctgcctgccatcagatccgaggtgcctcctgcagtgaccccttttcctggcatttctcttccacgcgacgaggtctgcctagtgagatctgcatgacctcacgttgctttccagagcccgggcctattttgccatctcagttttcctggaccctgcttcctgtgtaccactgaggggcagctgggccaggagctgtgcccggtgcctgcagccttcataagcacacacgtccattccctactaaggcccagacctcctggtatctgccccgggctccctcatcccacctccatccggagttgcctaagatgcatgtccagcataggcaggattgctcggtggtgagaaggttaggtccggctcagactgaataagaagagataaaatttgccttaaaacttacctggcagtggctttgctgcacggtctgaaaccacctgttcccaccctcttgaccgaaatttccttgtgacacagagaagggcaaaggtctgagcccagagttgacggagggagtatttcagggttcacttcaggggctcccaaagcgacaagatcgttagggagagaggcccagggtggggactgggaatttaaggagagctgggaacggatcccttaggttcaggaagcttctgtgtaagctgcgaggatggcttgggccgaagggttgctctgcccgccgcgctagctgtgagctgagcaaagccctgggctcacagcaccccaaaagcctgtggcttcagtcctgcgtctgcaccacacattcaaaaggatcgttttgttttgtttttaaagaaaggtgagattggcttggttcttcatgagcacatttgatatagctctttttctgtttttccttgctcatttcgttttggggaagaaatctgtactgtattgggattgtaaagaacatctctgcactcagacagtttacagaaataaatgttttttttgtttttcag

SEQ ID NO: 4609 - protein, 142 aa, Homo sapiens
MATKIDKEACRAAYNLVRDDGSAVIWVTFKYDGSTIVPGEQGAEYQHFIQQCTDDVRLFAFVRFTTGDAMSKRSKFALITWIGENVSGLQRAKTGTDKTLVKEVVQNFAKEFVISDRKELEEDFIKSELKKAGGANYDAQTE

SEQ ID NO: 4610 - DNA, 1182 bp, Homo sapiens
gcggccggcggcgtctcctcccgggacgctgaggggcccgaggagaccgtgaggctctggcctgcagctcgcgccgccatggacgctgccgaggtcgaattcctcgccgagaaggagctggttaccattatccccaacttcagtctggacaagatctacctcatcgggggggacctggggccttttaaccctggtttacccgtggaagtgcccctgtggctggcgattaacctgaaacaaagacagaaatgtcgcctgctccctccagagtggatggatgtagaaaagttggagaagatgagggatcatgaacgaaaggaagaaacttttaccccaatgcccagcccttactacatggaacttacgaagctcctgttaaatcatgcttcagacaacatcccgaaggcagacgaaatccggaccctggtcaaggatatgtgggacactcgtatagccaaactccgagtgtctgctgacagctttgtgagacagcaggaggcacatgccaagctggataacttgaccttgatggagatcaacaccagcgggactttcctcacacaagcgctcaaccacatgtacaaactccgcacgaacctccagcctctggagagtactcagtctcaggacttctagagaaaggcctggtgcaggcggcttgctgggggatgtgagcgctcaggatgtgatgaggtactcgtggttctggagctctagaaacacttctgatgcatgaaaaatgtgtgatggtgcaaggaatggattcaggatgttgttggagaaacaagtttgtgattagtccttaaaacttagctccctgggacattcttcaattccacatctgtttctagaaaccagccctttttccccccacttttgagaaataaaaaagccttaggtaaataagtcattctccctagcagagccacttgggtctcctgcatggaagccgtcacacttgggcaggtgttcagtgactggtaggtgtagatacagcaggagtggccatgtggtccacggctttttaccccttcttgatcctgatttcttgggctgaatttagactctctcacagaggtggctcacagagaaggatggcagatggtgcagccaacaatgctgaccggtgcttatcctctaagccctgatccacaataaaaatggacccaactcaaaaaaaaa

SEQ ID NO: 4611 - protein, 185 aa, Homo sapiens
MDAAEVEFLAEKELVTIIPNFSLDKIYLIGGDLGPFNPGLPVEVPLWLAINLKQRQKCRLLPPEWMDVEKLEKMRDHERKEETFTPMPSPYYMELTKLLLNHASDNIPKADEIRTLVKDMWDTRIAKLRVSADSFVRQQEAHAKLDNLTLMEINTSGTFLTQALNHMYKLRTNLQPLESTQSQDF

SEQ ID NO: 4612 - DNA, 1950 bp, Homo sapiens
ggcacgaggcttcccagaggcgcgagtcgcttttccaggagccgaggcccaaacggggccgggcctgaagggtcccccgccagcccgcggccgcgccatcaatcgccgccgcctcgtcccgcttctcggctgaggcgccgcgcggccaggcagcgggtccaggcctcagccgcgcgcccaggggcctccggggccctcccgggtcagcatgcccggggtgaaactgaccacccaggcctactgcaagatggtgctgcacggcgccaagtacccgcactgcgccgtcaacgggctcctggtggccgagaagcagaagccgcgtaaggagcacctccccctgggcggccccggcgcccaccacaccctcttcgtggactgcatccccctcttccacggcaccctggccctcgcccccatgctggaggtggctctcaccctgattgattcatggtgcaaagatcatagctacgtgattgctggttattatcaagctaatgagcgagtaaaggatgccagtccaaaccaggttgcagagaaggtggcctccagaatcgccgagggcttcagcgacactgcgctcatcatggtagacaacaccaagtttacgatggactgcgtagcgcctacgatccacgtgtacgagcaccatgagaacagatggcggtgcagagacccacaccatgactactgtgaagactggccagaggcacagaggatctcagcctcgctcctggacagccggtcctacgagacgctcgtggatttcgataaccacctggatgacattcggaatgactggacaaacccagagatcaataaagctgtcctacacttgtgctaggcaggcaccgctgtgactgggctccgggcctttccactacgttgaagaagaaaacctatttttaaatgtaaataaaatatctggtagcctgtgtggaaagctgaccgttttaagaagtggcatgtgccttgaaagggggcagaatgttcagtcggtcgtgtttttaacacagagtctctagaagaggtgcagacatcccgtctgactgtccctgtggactctctcagttgtatgttgctataatcctccaaatcaaagctctttctgcttgtgcaagattgttcctattaaacagttttaactaaccttttataatctggagagaatactttttaaggcttttgaactatctttttttaaaaaaaaaaaaaagcccacatcttatactccaatgagtgtgtttgtgagtttttatcctgtttgaattttgatgtcgtccaggcgtcctgggatcagggtagacacgtggagtgctggtgctgagctgtttgagaagctctgtgtgggtgtttctgtggtcaggtaggctgggctgtgaacagcactgctccacatggtgtcggctcacagagccaccgcaactctgcccagcgggagtgacaccactgatgccacagaagcctttatcgttaggggcaaaagcagacatctctggtagcaggagctcagtgtggtgctcttcagccacgcagaaagctcacgtgcctgcagggccaggaaagggaaatgatcgtttcttttgtattaggaaaaacaagacttagacttcccgagttgtgcagagtgacgtctgtactttttatacttagaacatttggtcaagttttgtaaccaaaccttagggaattgagagggaaactttatggtacgtttaccttttttcctttttatatgaattattttgtacaaagttcagagagcggtacctttcctactgtcttttctttgactccatggaggaatttgtaacgatcggtgtgacctgaaagggtttgtgatacagcggtcactattttctcttaacacataggaaaaaagttcagacatcgctacaataaatgtgctttatttgatccaaaaaaaaaaaaaaaaaaaaaaaaaaaaaaaaa

SEQ ID NO: 4613 - protein, 210 aa, Homo sapiens
MPGVKLTTQAYCKMVLHGAKYPHCAVNGLLVAEKQKPRKEHLPLGGPGAHHTLFVDCIPLFHGTLALAPMLEVALTLIDSWCKDHSYVIAGYYQANERVKDASPNQVAEKVASRIAEGFSDTALIMVDNTKFTMDCVAPTIHVYEHHENRWRCRDPHHDYCEDWPEAQRISASLLDSRSYETLVDFDNHLDDIRNDWTNPEINKAVLHLC

SEQ ID NO: 4614 - DNA, 802 bp, Homo sapiens
cgacgttcgcagcgctacccttttccgctccacggtgacctccgtgcggccgggtgcgggcggagtcttcctcgatcccgtggtgctccgcggcgcggccttgctctcttccggtcgcgggacaccgggtgtagagggcggtcgcggcgggcagtggcggcagaatgttggctaccagggtatttagcctagttggcaagcgagcaatttccacctctgtgtgtgtacgagctcatgaaagtgttgtgaagagcgaagacttttcgctcccagcttatatggatcggcgtgaccaccccttgccggaggtggcccatgtcaagcacctgtctgccagccagaaggcactgaaggagaaggagaaggcctcctggagcagcctctccatggatgagaaagtcgagttgtatcgcattaagttcaaggagagctttgctgagatgaacaggggctcgaacgagtggaagacggttgtgggcggtgccatgttcttcatcggtttcaccgcgctcgttatcatgtggcagaagcactatgtgtacggccccctcccgcaaagctttgacaaagagtgggtggccaagcagaccaagaggatgctggacatgaaggtgaaccccatccagggcttagcctccaagtgggactacgaaaagaacgagtggaagaagtgagagatgctggcctgcgcctgcacctgcgcctggctctgtcaccgccatgcaactccatgcctatttactggaaacctgttatgccaaacagttgtaccactgctaataaatgaccagtttacctgaaa

SEQ ID NO: 4615 - protein, 169 aa, Homo sapiens
MLATRVFSLVGKRAISTSVCVRAHESVVKSEDFSLPAYMDRRDHPLPEVAHVKHLSASQKALKEKEKASWSSLSMDEKVELYRIKFKESFAEMNRGSNEWKTVVGGAMFFIGFTALVIMWQKHYVYGPLPQSFDKEWVAKQTKRMLDMKVNPIQGLASKWDYEKNEWKK

SEQ ID NO: 4616 - DNA, 3943 bp, Homo sapiens
gttctagaacattctcatcacccatatttacatttatttttaataactctcatgtgtaagctgagtgttttaaactttagagacttctggggggtgctgaacttgataaaaatattcagtatacaagtgttctttatagttcactcatcattttcatagaattagggttttaaaattagaaagtaatttaggccatttccatctcctgtccctcaaatcccagctcagttttgggatgaggtgtcaagtataagtttgtaagtatgccagtcatttgcacggctaagagaaacatctagagaagtctatatacgacttgcttaaagctgaatgttgatttactgttcacatgatttgggtgattttagtcactgggactgagctaatggagttgaagcattgttgcgggcattgtacctccagaccagtgtgtaatacaaagagttcttgcagacataggacagaattggagaaacagcttctaacagtgggaagactctcagtacaaccaagctattccttacctttctgatttctgaacttttttccatgtgatacctgctgctttgaaggcactaaaataacagaagcagatagagcagaaatcctcactcagatcttcctccttcctacctgtataacagtttgtggcttgccttgtctgttttgtgcgtttcgttacgcgtatgtgagtatgtgcacgtgatttccagaaaggagaagcgcacgatactgcccgtgctctgtgactcctgagtgcacgcttcctctgcatttgggctcctaggtcggcctcgtcctgtggacgttgccccttgtttcgtgccatccacacattcctgatgccccgctgctctactctttctccagagtactttttccaaacatgtgatttgcacatttgttatgtttattgtttgttttccacttctagaagtgtgccactaggcaggaatgtttgatttgttcactgatgatcccagatctctagaaccctgccttgcctgtagagggtgcttggtaaatgtgctctgaatgaatggctccatgatcctcgtttctaagagctagcacgatttctcactcagtcctggttggacacaggttccctggaacagtgctgttgtggttatcttctcacgtgtctttgtttctgaacttgaaacgctttgagttttttattgtttttgttcttcctcattagtttgagtcccttgcagataggctttcattttgtccagtcacctgttcagggagccctgagggccttggcccacgtctgcaggtaactggtttttttatttttatttttttattttgagacgaagtctcgctctgtcaccaggctggagtgcagcggtgcgatctcagctcactgcaacctccgcctcctgcgttcaagcgattctcctgcctcagccttccgagtagctgggactataggcacgtgccgccacgcccggctaattttttgtatttttagtagagacggggtttcaccatgttagccaggatggtctcgatctcctgacatcgtgatccgcctgcctgggcctcccaaagtgctgggattacaggtgtgagccaccgcgcccagccctgcaggtaactgttaatgtaggaagtgctgcctctgggcaccttggccccagggttcattagcagttgcccctggtgggtttttgttggctgtgatgagaagtgcttctgttccccctccaccacactcctgcaactgtttaaacagtggctgtgaccccctgagatgatccagggtttcaaggcgtgcacatgtctgtgtttcggttttcagaagtatcaccttggggtgactctcaacttacatggattttcaaagatttattcaatatgtttttcagaaagtgttgtgaagagcgaagacttttcgctcccagcttatatggatcggcgtgaccaccccttgccggaggtggcccatgtcaagcacctgtctgccagccagaaggcattgaaggagaaggagaaggcctcctggagcagcctctccatggatgagaaagtcgagtgtgggtattgaagggacccacaggcgcgcccagcagctctcggaagcgtgtgtgtgacagagcctctgctcacttctgggcctactgtctagaggcagtcttgcacaggagggttgctctgctgggtttcggggtcactgtgccagggccccagtttatgtgctcaccagtcacttagctctgccagctgacaggatcttttgctaggcccccttctctgtgctgagtggaggtagcctctcagcatatctgctgggtaagacatagttaactgtaaattattgaaagaaactcagcaaaatgcatagtgtttggtatgaaaggggcagaaaaataacaagattaaatagaccctaatactgtaattcaagtaagaaataattttgcagttttaatttgcacctgaagcgaactgtatgcattttcttctttccttgccctgtcacatgcctgcgtgggcacgtgtgtgcacgtacgtgcgtgaacatgatgtggcctgggttggtgtatccttcagctctgtgtttcctccttcacaagtgtggttttggggagaagtggttgaatgttgcagaggagggagctgctgacctttgtgcctgtaaatggctgtcctctctgcccccagtgtatcgcattaagttcaaggagagctttgctgagatgaacaggggctcgaacgagtggaagacggttgtgggcggtgccatgttcttcatcggtttcaccgcgctcgttatcatgtggcagaagcactatggtgagtagagagggaggaaggcatgggcgcctggactggggctccagcctgcagtgcccattggtgggctgtcggggacctccataccttgaggctatgagatagggactgcattccagagttcatctcaggattgtttccaggccttggtgacctggagaactgaagtcgtgggaggttagtttataagccagcatctgattattcatagccatgcttgttgggtggtgaaataccttaactactttgtacagcacaccacgttttcagtagcaatttatgtgctcaccagtcacttagcgaaagatgacttcgtgaaggttcgagcaaggataaggggactcattcattgaatgactgtctggactgttgtgaggactgcatctcaacagccagcatctgggggtcccgacctgatagtttgtgtgtgggcattgccgggttgctcgctcgtggtaatgactcttccccgaggttctttctgtccaggcagaacaggcatttttgcattctgaataggtatattctcgtacttttggtttgaatgtggatgtgggttaataacagacccgaatctatttgatcttccaggtcaccttgggctctgtttgtcagatcctgttatccatagcctttagagaggaccttctgcttttagcttattttgttgctaactttttacaaacaaagggctaattttaaaatgtcagtgttgtcagtggtcagaaaccgtgtgtttgagcgggtgttgagtggcaggtggctctgctgacctggtggctggtgtgtcgggaggatttaacctgtgtgagggattggcctagaaacaacctgttgagatagtcttgccccataacctgtctcacaccgtagtgtacggccccctcccgcaaagctttgacaaagagtgggtggccaagcagaccaagaggatgctggacatgaaggtgaaccccatccagggcttagcctccaagtgggactacgaaaagaacgagtggaagaagtgagagatgctggcctgcgcctgcacctgcgcctggctctgtcaccgccatgcaactccatgcctatttactggaaacctgttatgccaaacagttgtaccactgctaataaatgaccagtttacctg

SEQ ID NO: 4617 - DNA, 1888 bp, Homo sapiens
gccgttttctttcctggtgtcccgtcgcggcttgggacccggcaagatgggcaagaagggcaagaaggagaagaagggccgcggcgcggagaagacggccgccaagatggagaagaaggtgtctaagcgctcgcggaaggaggaggaagacctggaagcgctcatagcccatttccagacactcgatgccaagaggactcagactgtggaacttccgtgccccccaccctcaccaaggttaaatgcctccctctcggttcatcctgagaaagatgagttaatcctttttggaggtgaatatttcaacggccaaaaaacttttttgtataacgagctctatgtctacaataccagaaaggacacctggaccaaagttgacatccccagtccacctccgaggcgctgtgctcaccaggcggtggtagtgcctcaaggtggcggacagctgtgggtctttggaggggagtttgcctctcccaacggagagcagttctaccactacaaggatctctgggtcctgcatttggccaccaagacctgggaacaagtcaaatcaacaggcggtccttcgggtcggagtggacatcggatggtggcctggaagagacaattgatcctgtttggtggcttccatgaaagtacacgggattacatctactacaacgacgtgtatgcctttaatctggacaccttcacatggagcaagctgtccccgtcagggacggggcccacacccagatcaggctgccagatgtccgtcactccccagggcggcatcgtcgtctatgggggctactcgaaacagagagttaagaaagacgtggacaagggcacacggcactcagacatgttcctgctgaagccagaggacggaagagaagacaagtgggtttggactcggatgaacccttcgggggtcaagcccaccccacggtctggcttttccgtggccatggccccgaatcaccagacactgttcttcgggggtgtctgtgacgaggaagaggaggagagcctgtcgggcgagttcttcaacgatctgtacttctacgacgccaccaggaaccgttggtttgagggacagctgaagggacccaagtctgaaaagaagaaacgcaggcggggcagaaaagaggagcccgaaggtggtagcaggccggcgtgtgggggagctggcacccaggggcctgtgcagctggtcaaggaggtggtggccgaggatggcaccgtggtcaccattaagcaggtgctcaccgcgccaggctcggcggggcagccccggtctgaggacgaagacagccttgaggaggccggcagccccgcacctgggccgtgtccacgctccaacgccatgctggctgtgaagcatggggtgctctacgtctatgggggcatgtttgaggccggcgaccgccaggtcaccctcagcgacctgcactgcctggacctgcacaggatggaggcgtggaaggccttggtggagatggacccagaaactcaggagtggctggaggagacggactcggaagaggacagtgaggaggttgagggcgccgagggtggggtcgacgacgaagacagcggagaggagagcggtgcggaggactgagaagagcccctgccaggggcgcctggcaagtgctgtgcccacgtccgcccaggacccagccgtgttgagtgaagctcttggggccagcgtgcgtcctgacgcacaggagagagctgaaggtgggtggcccaggccagggtgtgaactttctcccatggtttagtctctgacgcggcactgggccggaagttcaactgagtgcagtgcaggtggattccctcagcagcctgtgtgttgtgtgaaataaattggacttgaaacaagaaaaaaaaaaaaaaa

SEQ ID NO: 4618 - protein, 520 aa, Homo sapiens
MGKKGKKEKKGRGAEKTAAKMEKKVSKRSRKEEEDLEALIAHFQTLDAKRTQTVELPCPPPSPRLNASLSVHPEKDELILFGGEYFNGQKTFLYNELYVYNTRKDTWTKVDIPSPPPRRCAHQAVVVPQGGGQLWVFGGEFASPNGEQFYHYKDLWVLHLATKTWEQVKSTGGPSGRSGHRMVAWKRQLILFGGFHESTRDYIYYNDVYAFNLDTFTWSKLSPSGTGPTPRSGCQMSVTPQGGIVVYGGYSKQRVKKDVDKGTRHSDMFLLKPEDGREDKWVWTRMNPSGVKPTPRSGFSVAMAPNHQTLFFGGVCDEEEEESLSGEFFNDLYFYDATRNRWFEGQLKGPKSEKKKRRRGRKEEPEGGSRPACGGAGTQGPVQLVKEVVAEDGTVVTIKQVLTAPGSAGQPRSEDEDSLEEAGSPAPGPCPRSNAMLAVKHGVLYVYGGMFEAGDRQVTLSDLHCLDLHRMEAWKALVEMDPETQEWLEETDSEEDSEEVEGAEGGVDDEDSGEESGAED

SEQ ID NO: 4619 - DNA, 1848 bp, Homo sapiens
ggctgtgactagcgggccggcccgggccaggacagcgggcggcgggcggcgcgggcctggccccgggatggctatgttccgcagcctggtggcctcggctcagcagcggcagccgccggccgggccggcgggcggcgacagcggcctggaggcgcagtacacctgccccatctgcctggaggtctatcaccggcccgtggccatcggcagctgcggccacacgttctgcggggagtgtctccagccctgcctgcaggtgccatccccgctgtgcccactgtgccgcatgcccttcgaccccaagaaggtggacaaggccacccacgtggagaagcagctctcatcctacaaagcgccctgtcgaggctgcaacaaaaaggtgaccctggcaaagatgagagtgcacatttcgtcctgcctgaaggtccaggagcagatggccaactgccccaagttcgtccccgtggtgcccacatcacagcctatccccagcaacatccccaacaggtccaccttcgcctgcccgtactgtggtgcccgcaacctggaccagcaggagctggtgaagcactgtgtggaaagccaccgcagcgaccccaaccgcgtggtgtgccccatctgctcggcaatgccctggggggaccccagctacaagagcgccaacttcctgcagcacctgcttcaccgacacaagttctcctacgacacctttgtggactacagtattgacgaggaggccgccttccaggctgctctggccctgtctctctctgagaactgaagggaagcgcagccacccgcctgcgtctggggtcagggatgtccccgctcctgtgtcgcacctggcacctgctcgggagtgcacctcaccggactgagctcacaggaggagcctgcacccgcgcagaaggggagccggggccgagcctccgggcctgaatacgggccagccgccgaggccgccagagcagggccgcctggtcccaccggcgtcgctgggttcttcggtgcttctggccgagcaggcggcctacttgggcagggctggacgctgagacctggagctgccaccgtctcttcaagccatgataccccctcgtgggaagaagggaccgacgcgcgagtcgcggctgcgcagtcgagcccgggaggaacccaggctgctgccctggccagcccgaccctgccccggccccacttccaccttgcgcatttggtactggcttttgtgatacttaggaaccctggcatcttttctatattatccagtgtgataatcttttcacgttttatagagcaaagacagagcagttactcttcatattgcaatatctgtgtttgactaggaataatagtatttttatggaacatttacaaaattatattttttaagaaaacaatcaaaacaagcattgggggattggggcaaggatggaaggagcagtggggcagctgccagagctcaggcgagccatggggtctgctgtggggtctgccctggccacccactgtgtgtctgggtccttgaggtttgtacgtttctctttgatgaccaggaagaaatcccagcaccccagccacaggctgtggctgctcccagcagaggcggggccggcagagaaggggcctcctccacccagagtcctggccttggcccgctgtcaccttcaaagctgactgtgccccgctgcgggaggggacggcaccccagtggtggcagagcttgggggcctgggcaggggcccgcttggcgggccgggcaacacgtcaacattcttttctgttcttggcattaattattgctgtcttttttttaaaaaaaaaagtttaaataaaatgtctcagagc

SEQ ID NO: 4620 - protein, 237 aa, Homo sapiens
MAMFRSLVASAQQRQPPAGPAGGDSGLEAQYTCPICLEVYHRPVAIGSCGHTFCGECLQPCLQVPSPLCPLCRLPFDPKKVDKATHVEKQLSSYKAPCRGCNKKVTLAKMRVHISSCLKVQEQMANCPKFVPVVPTSQPIPSNIPNRSTFACPYCGARNLDQQELVKHCVESHRSDPNRVVCPICSAMPWGDPSYKSANFLQHLLHRHKFSYDTFVDYSIDEEAAFQAALALSLSEN

SEQ ID NO: 4621 - DNA, 1666 bp, Homo sapiens
ctccgacgtcatcggggcgcgccctcgcgctgtcgccgccacagtctgcgacgggacccggcgtgcccatgtgtcaggtgggcgaggactacggggagccggcgcctgaggagccgcccccggcgccgcggcccagggactgtttcaaggccttctacgtccacaagttcagagccatgctgggcaagaaccggctcatctttccaggcgagaaggtgctcttggcgtggtctggggggccttcgtccagctccatggtctggcaggttcttgagggcctgagccaagattctgccaaaagactgcgctttgtggcaggagtcatctttgttgacgagggagcagcctgtggccagagcctagaggagagatcaaagaccctggccgaagtgaagcccattctgcaagcaactgggttcccatggcatgtggtggccttagaggaggtgttcagcctgccaccgtcggtgctttggtgctctgcccaggagctagtgggatccgagggggcctacaaggcggccgtggacagcttcctccagcagcagcatgtgctgggggccgggggtggtcctggcccgactcaaggggaggaacagccaccccagcccccgctggacccccagaacctggcaagaccgcctgcccctgcccagactgaggctctttcccaactgttctgctcagtgaggacactgactgccaaggaggagcttctgcagaccctgcggacccacctgatcctccacatggcccgagcccacggctactccaaggtcatgactggggacagctgcacacgcttggctatcaagctcatgaccaacctggcgctgggtcgaggggccttcctggcctgggatacgggcttctcggatgagcggcacggggacgtggtggtggtgcggcccatgcgggaccacaccctgaaggaggtcgctttctacaaccgcctgttctctgttccttctgtcttcacaccagccgtcgacaccaaggcccctgaaaaggccagcatccaccggctgatggaggccttcatcctcaggctgcagacccagttcccctccactgtcagcactgtgtacaggacaagtgagaagctggtgaagggcccccgggatggccctgctgctggcgactccggcccccgctgcctcctctgcatgtgtgccctggacgtcgacgccgctgacagtgccacggcttttggggctcagacctcctcgcgtctctcccagatgcagtcacccatccccctgactgagacccggacacccccggggccctgctgttctccaggggtgggctgggcccagcgctgcggccagggggcctgtaggagggaggacccccaagcctgcattgaggagcagctgtgctacagctgccgcgtgaacatgaaggacttgccctcactggaccccctgccgccgtacatcctggctgaggcccagctccgcacacagagggcctggggcttgcaggagatccgggactgtctgattgaggacagtgacgacgaggcgggccagagctgagcgtgaggacgtgcttgccgggacagcaggcagtggccacctggtacaccacactggagccggaaggcaaggacgggggactggcctctgattgtccatttgtataaataaaacattttttaatt

SEQ ID NO: 4622 - DNA, 1888 bp, Homo sapiens
cgcgcactccgccgccatggagcagcgccgcgtcaccgacttcttcgcgcgccgccgccccgggcccccccgcatcgcggcgcccaagctggcctgccgcacccccagccccgccaggcccgcactccgcgccccggcctccgctaccagtggcagccgcaagcgcgcccgcccgcccgccgcccccggacgcgaccaggccaggacaccggcccgcaggagactgcggctgtcggtggacgaggtttccagccccagtacccccgaggccccagacatcccagcctgcccttctccgggccagaagataaagaaatccaccccggcagcaggtcagccgccccacctgacatccgcgcaggaccaggacaccatctctgagcttgcgtcatgcctgcaacgggcccgggagctgggggcaagagtccgggcgctgaaggccagtgcccaggatgctggggagtcctgcaccccagaggccgagggccgccctgaggagccatgtggcgagaaggcgcccgcctaccagcgcttccatgccctggcccagcccggcctgccgggactcgtgctgccctacaagtaccaggtgctggcggagatgttccgcagcatggacaccatcgtgggcatgctccacaaccgctccgagacgcccacctttgccaaggtccagcggggcgtccaggacatgatgcgtaggcgttttgaggagtgcaatgttggccagatcaaaaccgtgtacccggcctcctaccgcttccgccaggagcgcagtgtccccaccttcaaggatggcaccaggaggtcagattaccagctcaccatcgagccactgctggagcaggaggctgacggagcagccccccagctcacggcctcgcgcctcctgcagcgacggcagatcttcagccagaagctggtggagcatgtcaaggagcaccacaaggccttcctggcctccctgagccccgccatggtggtgccggaggaccagctgacccgctggcacccgcgcttcaacgtggatgaagtacccgacatcgagccggccgcgctgccccagccacccgccacggagaagctcaccactgctcaggaggtgctggcccgggcccgcaacctgatttcacccaggatggagaaggccttgagtcaattggccctgcgctctgctgcgcccagcagccccgggtctcccaggccagcactgccggctaccccaccagccaccccgcctgcagcctctcccagtgctctgaagggggtgtcccaggatctgctggagcggatccgagccaaggaggcacagaagcagctggcacagatgacgcggtgcccggagcaggagcagcggctgcagcgcttagaacggctgcctgagctggcccgcgtgctgcggagcgtctttgtgtccgaacgcaagcctgcgctcagcatggaggtggcctgtgccaggatggtgggcagctgttgtactatcatgagccctggggaaatggagaagcacctgctgctcctctccgagctgctgccggactggctcagcctccaccgcatccgcaccgacacctacgtcaagctggacaaggccgcggacctcgcccacatcactgcacgcctggcccaccagacacgtgctgaggaggggctgtgagcctgggggccactgtggacagacgtgggcttcagaagctcgctggcctgggcccaccagcattttcttttatgaacatgatacactttggccttcctttccccagcgcccctgagggccagaggcagatgtgggctgcaggctgcacagcccgagggtctctggctgcgggcggtgggccccttcatggggctcacctggtggattcacattaaaccggtttctgtgggc

SEQ ID NO: 4623 - protein, 351 aa, Homo sapiens
MFRSMDTIVGMLHNRSETPTFAKVQRGVQDMMRRRFEECNVGQIKTVYPASYRFRQERSVPTFKDGTRRSDYQLTIEPLLEQEADGAAPQLTASRLLQRRQIFSQKLVEHVKEHHKAFLASLSPAMVVPEDQLTRWHPRFNVDEVPDIEPAALPQPPATEKLTTAQEVLARARNLISPRMEKALSQLALRSAAPSSPGSPRPALPATPPATPPAASPSALKGVSQDLLERIRAKEAQKQLAQMTRCPEQEQRLQRLERLPELARVLRSVFVSERKPALSMEVACARMVGSCCTIMSPGEMEKHLLLLSELLPDWLSLHRIRTDTYVKLDKAADLAHITARLAHQTRAEEGL

SEQ ID NO: 4624 - DNA, 624 bp, Homo sapiens
agcccggggcagccagcagtaccgggccctgaccgtgcccgagctcacccagcagatgttcgatgccaagaacatgatggcgccgcatgtccatgaaggaggtggacgagcagatgctggccatccagagcaagaacagcagctacttcgtggagtggatccccaacaacgtgaaggtggccgtgtgtgacatcccgccccgcggcctcaagatgtcctccaccttcatcgggaacagcacggccatccaggagctgttcaagcgcatctccgagcagttcacggccatgttccggcgcaaggccttcctgcactggtacacgggcgagggcatggacgagatggagttcaccgaggccgagagcaacatgaacgacctggtgtccgagtaccagcagtaccaggacgccacggccgaggaagagggcgagatgtacgaagacgacgaggaggagtcggaggcccagggccccaagtgaagctgctcgcagctggagtgagaggcaggtggcggccggggccgaagccagcagtgtctaaacccccggagccatcttgctgccgacaccctgctttcccctcgccctagggctcccttgccgccctcctgcagtatttatggcc

SEQ ID NO: 4625 - protein, 797 aa, Homo sapiens
MAVQGSQRRLLGSLNSTPTAIPQLGLAANQTGARCLEVSISDGLFLSLGLVSLVENALVVATIAKNRNLHSPMYCFICCLALSDLLVSGSNVLETAVILLLEAGALVARAAVLQQLDNVIDVITCSSMLSSLCFLGAIAVDRYISIFYALRYHSIVTLPRARRAVAAIWVASVVFSTLFIAYYDHVAVLLCLVVFFLAMLVLMAVLYVHMLARACQHAQGIARLHKRQRPVHQGFGLKGAVTLTILLGIFFLCWGPFFLHLTLIVLCPEHPTCGCIFKNFNLFLALIICNAIIDPLIYAFHSQELRRTLKEVLTCSCSQDRALVSWDVKSLGGSVCQELLPQQPQEKGLCDQKASSTALQRLLQKEFWEVISDEHGIDPSGNYVGDSDLQLERISVYYNEASSHKYVPRAILVDLEPGTMDSVRSGAFGHLFRPDNFIFGQSGAGNNWAKGHYTEGAELVDSVLDVVRKECENCDCLQGFQLTHSLGGGTGSGMGTLLISKVREEYPDRIMNTFSVVPSPKVSDTVVEPYNATLSIHQLVENTDETYCIDNEALYDICFRTLKLATPTYGDLNHLVSATMSGVTTSLRFPGQLNADLRKLAVNMVPFPRLHFFMPGFAPLTARGSQQYRALTVPELTQQMFDAKNMMAACDPRHGRYLTVATVFRGRMSMKEVDEQMLAIQSKNSSYFVEWIPNNVKVAVCDIPPRGLKMSSTFIGNSTAIQELFKRISEQFTAMFRRKAFLHWYTGEGMDEMEFTEAESNMNDLVSEYQQYQDATAEEEGEMYEDDEEESEAQGPK

SEQ ID NO: 4626 - DNA, 1270 bp, Homo sapiens
ggagagggtgtgagggcagatctgggggtgcccagatggaaggaggcaggcatgggggacacccaaggccccctggcagcaccatgaactaagcaggacacctggaggggaagaactgtggggacctggaggcctccaacgactccttcctgcttcctggacaggactatggctgtgcagggatcccagagaagacttctgggctccctcaactccacccccacagccatcccccagctggggctggctgccaaccagacaggagcccggtgcctggaggtgtccatctctgacgggctcttcctcagcctggggctggtgagcttggtggagaacgcgctggtggtggccaccatcgccaagaaccggaacctgcactcacccatgtactgcttcatctgctgcctggccttgtcggacctgctggtgagcgggagcaacgtgctggagacggccgtcatcctcctgctggaggccggtgcactggtggcccgggctgcggtgctgcagcagctggacaatgtcattgacgtgatcacctgcagctccatgctgtccagcctctgcttcctgggcgccatcgccgtggaccgctacatctccatcttctacgcactgcgctaccacagcatcgtgaccctgccgcgggcgcggcaagccgttgcggccatctgggtggccagtgtcgtcttcagcacgctcttcatcgcctactacgaccacgtggccgtcctgctgtgcctcgtggtcttcttcctggctatgctggtgctcatggccgtgctgtacgtccacatgctggcccgggcctgccagcacgcccagggcatcgcccggctccacaagaggcagcgcccggtccaccagggctttggccttaaaggcgctgtcaccctcaccatcctgctgggcattttcttcctctgctggggccccttcttcctgcatctcacactcatcgtcctctgccccgagcaccccacgtgcggctgcatcttcaagaacttcaacctctttctcgccctcatcatctgcaatgccatcatcgaccccctcatctacgccttccacagccaggagctccgcaggacgctcaaggaggtgctgacatgctcctggtgagcgcggtgcacgcgctttaagtgtgctgggcagagggaggtggtgatattgtgtggtctggttcctgtgtgaccctgggcagttccttacctccctggtccccgtttgtcaaagaggatggactaaatgatctctgaaagtgttgaag

SEQ ID NO: 4627 - protein, 317 aa, Homo sapiens
MAVQGSQRRLLGSLNSTPTAIPQLGLAANQTGARCLEVSISDGLFLSLGLVSLVENALVVATIAKNRNLHSPMYCFICCLALSDLLVSGSNVLETAVILLLEAGALVARAAVLQQLDNVIDVITCSSMLSSLCFLGAIAVDRYISIFYALRYHSIVTLPRARQAVAAIWVASVVFSTLFIAYYDHVAVLLCLVVFFLAMLVLMAVLYVHMLARACQHAQGIARLHKRQRPVHQGFGLKGAVTLTILLGIFFLCWGPFFLHLTLIVLCPEHPTCGCIFKNFNLFLALIICNAIIDPLIYAFHSQELRRTLKEVLTCSW

SEQ ID NO: 4628 - DNA, 2267 bp, Homo sapiens
gcataggctaggtagcgaggccgcgtgtgaatcggccgaggccgagtttctgcgcttccttctccctctctccagacgtcgtggtcgttcggtcctatgtcgcgccgggccctccggaggctgaggggggaacagcgcggccaggagcccctcgggcccggcgccttgcatttcgatctccgtgatgacgatgacgcggaagaagaagggcccaagcgggagcttggtgtccggcgtcccgggggcgcagggaaggagggcgtccgagtcaacaaccgcttcgagctgataaacattgacgatcttgaggatgaccctgtggtgaacggggagaggtctggctgtgcgctcacagacgctgtggcaccagggaacaaaggaaggggtcagcgtggaaacacagagagcaagacggatggagatgacaccgagacagtgccctcagagcagtctcatgcaagtggcaaactccggaagaagaaaaaaaaacagaaaaacaagaaaagcagcacgggagaagcatcggaaaacggactagaagatatcgatcgcatcctagagaggattgaggacagcactgggttgaaccgtcccggcccagctcccctgagctccaggaagcacgttctctacgtggagcacagacacttgaatccagacacagaactgaaaaggtattttggtgcccgggcaatcctgggggagcaaaggccacggcagagacaacgtgtgtaccccaagtgcacatggctgaccacccctaaaagcacctggccccgctacagcaaaccaggtctgtccatgcggctgctggaatcaaaaaaaggcctctccttctttgcgtttgagcacagtgaggagtaccagcaggctcagcacaagttcctggtggccgtggagtctatggagccgaacaacatcgtggttctgctccagacgagcccttaccacgttgactcactcctgcagctcagcgatgcctgccgctttcaagaggatcaggagatggctcgagacctcgtagagagagcgctgtacagcatggaatgtgcgttccaccccctgttcagtctcaccagtggggcctgccggctggattaccgcagacccgagaacaggagcttctacctggccctctacaagcagatgagcttcctggagaagcgaggctgcccgcgcacggcgctggagtactgcaagctcatcctgagtctcgagccggatgaggaccccctctgcatgctgctgctcatcgaccacctggccttgcgggcccggaactacgagtacctgatccgcctcttccaggagtgggaggctcatcggaacctgtcccagctccctaattttgccttctctgttccactggcgtatttcctgctgagccagcagacagacctccctgagtgtgagcagagctctgccaggcagaaggcctctctcctgatacagcaggcgctcaccatgttccctggagtcctcctgcccctgctcgagtcttgcagtgtgcggcccgacgccagcgtttccagtcaccgcttctttggacccaatgctgaaataagccagccccctgccctgagccagctggtgaacctgtaccttgggaggtcacactttctctggaaagagcccgccaccatgagctggctggaggagaacgtccacgaggttctgcaagcagtggacgccggggacccagccgtggaagcctgtgagaaccggcggaaggtgctctaccagcgtgcacccaggaatatccaccgccatgtgatcctctctgagatcaaggaagccgtcgctgccctgcccccggacgtgaccacgcagtctgtgatggggtttgatcctctgcctccttcggacacaatctactcctacgtcaggccagagaggctaagtcctatcagccatggaaacaccattgctctcttcttccggtcactgttgccaaactataccatggagggggagaggcccgaggaaggagtggctgggggtctgaaccgcaaccagggcctgaacaggctgatgctggctgtgcgcgacatgatggccaacttccacctcaacgacctggaggcgccgcacgaggacgacgctgagggggagggggagtgggactgagcgtccgcagaggtgaccgaaaagccgtatgatgatgttcccgatttctctgttggtcggagtcggccagttgcctgaagtagggaagctgagtgtgtcgctccctggtccactgtttctcctataaatgtaaatgggtc

SEQ ID NO: 4629 - protein, 676 aa, Homo sapiens
MSRRALRRLRGEQRGQEPLGPGALHFDLRDDDDAEEEGPKRELGVRRPGGAGKEGVRVNNRFELINIDDLEDDPVVNGERSGCALTDAVAPGNKGRGQRGNTESKTDGDDTETVPSEQSHASGKLRKKKKKQKNKKSSTGEASENGLEDIDRILERIEDSTGLNRPGPAPLSSRKHVLYVEHRHLNPDTELKRYFGARAILGEQRPRQRQRVYPKCTWLTTPKSTWPRYSKPGLSMRLLESKKGLSFFAFEHSEEYQQAQHKFLVAVESMEPNNIVVLLQTSPYHVDSLLQLSDACRFQEDQEMARDLVERALYSMECAFHPLFSLTSGACRLDYRRPENRSFYLALYKQMSFLEKRGCPRTALEYCKLILSLEPDEDPLCMLLLIDHLALRARNYEYLIRLFQEWEAHRNLSQLPNFAFSVPLAYFLLSQQTDLPECEQSSARQKASLLIQQALTMFPGVLLPLLESCSVRPDASVSSHRFFGPNAEISQPPALSQLVNLYLGRSHFLWKEPATMSWLEENVHEVLQAVDAGDPAVEACENRRKVLYQRAPRNIHRHVILSEIKEAVAALPPDVTTQSVMGFDPLPPSDTIYSYVRPERLSPISHGNTIALFFRSLLPNYTMEGERPEEGVAGGLNRNQGLNRLMLAVRDMMANFHLNDLEAPHEDDAEGEGEWD

SEQ ID NO: 4630 - DNA, 2190 bp, Homo sapiens
atggtgacgcacgccgctggcgcgaggaccttttgtgaggagcaaaagaagggatccacctattcagttccaaaatctaaggagaagttgatggagaagcattcccaggaagccaggcaggcagacagggagtcggagaagcctgtggacagcctccacccgggggccgggacagccaagcacccgccgccggcagcttcgctggaagagaaacctgatgtaaagcaaaagtccagcaggaagaaagtggtcgttccacagatcatcatcacgcgagcgtcgaatgagacgctagtcagttgcagttccagcgggagtgaccagcagagaaccattcgggagccggaggactggggcccctaccggcggcacaggaaccccagtacagcagacgcctataattcacatctcaaagaataaacaagcacctttgcatggcactcgctactccctgcgataggcgtctcgggaacagccgcctcaccctgtgagaagccgaggccccttctccagtgctctcggggaggttgcaccaggcccaccccaccctgtgagaaactgcagcccccttctccagtgctttcggggagggtgcaccaggcccgccccaccttgtgagaagccgtggcccccttctccagtgctctcagggagggtgcaccaggcctgcccccgccgtgagaaactgcagtccccttctccagtgctctcggggagggtgcaccaggcccaccccaccctgtgagaacctgcagcccccttctccaatgctctcggggagggtacaccagggttgccccaccctgtgagaagccaccgcccccttctccagtgctctcggggagggtgcaccagggctgccccacgctgtaagaagccgccgcccccttctccagtgctctccagcccgccccaccctgtgagaagccatggccccttctccagtgcttttggggagggtgcaccagggccaccccaccctgtgagaagccgtggcccccttctccagtgctttcggggagggtacaccaggcccgccccaccctgtgagaagccgtggcccccttctcccgtgctctcagggagggtgcaccaggcctgcccccgccttgagaaactgcagcccccttctccagtgctctgggggagggtgcaccaggcctgcccaccctgtgagaaactgcacccccttctccagtgctctcggggagggtgcaccaggcccgccccaccctgtgagaagccgcagcccgttctccattgccatttggtcctgccttccccagagctgctagcagctcggtcgaggcaagagtgactggctcagagagcgagctttgtggtattgataaatgaataaattagtatgttcatgttggaagtggctggctctgcagagtgatggacagcaggtggcatcttacattgtgatttgtggtgcacagttaaaacacttcccttcgtttcagaaggagacaatgtgaatacttggaaattatagtgaataagatgcctcccaaacttgaggaaaaggtcagattctaagagctaaacgttaagatgtaatgttccagaacaaagaggcccagagtcactgaacggggccccagggctcctagcttgagtgtaatctgagtcagcttatgaaaaggccccaaagaagaaagtggaatgtgtgctgggcacatgggacagccatggcactgagactttggaagtggccttgccagcgctgtcctgtctttctggcccacagatgagggctcctgattgtggaaggccacggaagggacctgaacacgatggcacgagacaagttatctcctgtgactgctcctctccagcaaccctcagctcaggctagactttccccctgtgttgagaatgccctgccctgtgtggaagcctgatgcatttagtgacagtgtgttagctttgttagtttctagtctggccagcaggctttccatgtgatctgccattggcttgcttcagtggccagtggagccaggggtgtccaccagagtcttggacacagacttctgaggtggcagcgggagggagcctgctccctgccacacacgtacaatttctaatccatacaggcctatgtagtatatacacacatacgcagagccttaggaattgtgaaaggccaatcaaaacttggggccctaatttcactctgcc

SEQ ID NO: 4631 - protein, 139 aa, Homo sapiens
MVTHAAGARTFCEEQKKGSTYSVPKSKEKLMEKHSQEARQADRESEKPVDSLHPGAGTAKHPPPAASLEEKPDVKQKSSRKKVVVPQIIITRASNETLVSCSSSGSDQQRTIREPEDWGPYRRHRNPSTADAYNSHLKE

SEQ ID NO: 4632 - DNA, 2456 bp, Homo sapiens
agcgactcacaaaaggtcctcgcgccagcggcgtgcgtcaccatggcgaccgcgcgccgcgcagccgcgccccgcccctctggcgggaccggccaccatcctctcgcgagagcatcccgtgcgaccggaagtggggcggcgaccccggaagtccccgccgggtgcagcttggtcggttcgatcgccgccgggacctgacaccgcccggagttggcgtcccttctccctctccgagtgctgctcctgtcattgtggccatggacgttcacggcgaagcagctggagaagctggccaagaaggcggagaaggactccaaggcggagcaggccaaagtgaagaaggcccttctgcagaaaaatgtagagtgtgcccgtgtgtatgccgagaacgccatccgcaagaagaacgaaggtgtgaactggcttcggatggcgtcccgcgtagacgcagtggcctccaaggtgcagacagctgtgactatgaagggggtgaccaagaatatggcccaggtgaccaaagccctggacaaggccctgagcaccatggacctgcagaaggtctcctcagtgatggacaggttcgagcagcaggtgcagaacctggacgtccatacatcggtgatggaggactccatgagctcggccaccaccctgaccacgccgcaggagcaggtggacagcctcatcatgcagatcgccgaggagaatggcctggaggtgctggaccagctcagccagctgcccgagggcgcctctgccgtgggcgagagctctgtgcgcagccaggaggaccagctgtcacggaggttggccgccttgaggaactagccgtgccccgccggtgtgcaccgcctctgccccgtgatgtgctggaaggctcctgtcctctccccaccgcgtcttgcctttgtgctgaccccgcggggctgcggccggcagccactctgcgtctctcacctgccaggcctgcgtggccttagggttgttcctgttcttttaggttgggcggtgggtctgtgtcctggtgttgagtttctgcaaatttctgggggtgatttctgtgactctgggcccacagcggggaggccaagaggggccctgtggactttcacccagcactgtgggggccttcagactctggggcagcagacatgctgcttcccatcagccagagggggtcagggctgccctgttgccaaacaactccctgaggcctctccgcaccacctcagcgggcaggaggtcccaccatgtggacagacatagcccaaggaggcaccacaggtctatgtgtgctgggggatgtcaggtgccacccaacgctgtcctggtggtatttacaatgacatcctcctcctccatcactccaggggtggtgtctcggccgcccctaccagctggctgagccccctggcctcctgcgctccctcacttccctcagttcccaaagctgcccagtccatggggacagaaccgtcactcagatccacattcaagtgtgcccaccctgcagtcttcatcctcactcagctgctgcctctggaggtgcctttggccacatgtgctgtgctgtttgtctcctcgacagggagcctgtccaccagcaggctgcggtcccagcgggtgcgtctgcagctcctccccttgggcagcctggttctcccggaggacctttccttggggccctgcttcatgacgatgctgcctgtgtcaccctctaccatctgtaaacaactgggtgccttccccgaccacaccccaatgccttcccagcttggaagccaaggcagctgatgaagggagctcaggagagccgtcttcagctgggctggggttggggctgctgtgaggaaaacctgccattgtggccctggagagtcaccagcagctcttgggaaggacttgctgggaggctgagagaggctttgggcacagcctgctgtcttttccatttcctaaagtttacttcattgtcttgaggcttccaggttttgtttttgtttttgccaaagtagaaaaggcaggtggtgggcggctggcagggagtgcgggtccccgcccctcttcagtcctgccctcccctcctcagtcctgcccaccccgtgcagcccatgctgaggctgcagtggtgtcgtgggtgttacgtgcaggaacgtggagaccctgacgtgggctcactgcgtttggttttcttttcagaacttgggagcccccagggaggggctagtgttggtaggtcctagacgtggatccctccagcctccccaaaatcaaccctggtgttgagagaacgtccttctgtccatcgtgggtaacagccttggggagggtgcagagctctgcagagccatgggccaggtggggctgcctcagtcctgtccccttgggcactgaggagaggggcccattcacctttctcctagaatgctgttgtaaataaacaaatggatccctgg

SEQ ID NO: 4633 - DNA, 1110 bp, Homo sapiens
ctttccgctcggctgttttcctgcgcaggagccgcagggccgtaggcagccatggcgcccagccggaatggcatggtcttgaagccccacttccacaaggactggcagcggcgcgtggccacgtggttcaaccagccggcccgtaagatccgcagacgtaaggcccggcaagccaaggcgcgccgcatcgccccgcgccccgcgtcgggtcccatccggcccatcgtgcgctgccccacggttcggtaccacacgaaggtgcgcgccggccgcggcttcagcctggaggagctcagggtggccggcattcacaagaaggtggcccggaccatcggcatttctgtggatccgaggaggcggaacaagtccacggagtccctgcaggccaacgtgcagcggctgaaggagtaccgctccaaactcatcctcttccccaggaagccctcggcccccaagaagggagacagttctgctgaagaactgaaactggccacccagctgaccggaccggtcatgcccgtccggaacgtctataagaaggagaaagctcgagtcatcactgaggaagagaagaatttcaaagccttcgctagtctccgtatggcccgtgccaacgcccggctcttcggcatacgggcaaaaagagccaaggaagccgcagaacaggatgttgaaaagaaaaaataaagccctcctggggacttggaatcagtcggcagtcatgctgggtctccacgtggtgtgtttcgtgggaacaactgggcctgggatggggcttcactgctgtgacttcctcctgccaggggatttggggctttcttgaaagacagtccaagccctggataatgctttactttctgtgttgaagcactgttggttgtttggttagtgactgatgtaaaacggttttcttgtggggaggttacagaggctgacttcagagtggacttgtgttttttctttttaaagaggcaaggttgggctggtgctcacagctgtaatcccagcactttgaggttggctgggagttcaagaccagcctggccaacatgtcagaactactaaaaataaagaaatcagccatgaaaaaaaaaaaaaaaaaaaaaaaaa

SEQ ID NO: 4634 - protein, 211 aa, Homo sapiens [sequence omitted]

SEQ ID NO: 4635 - DNA, 1296 bp, Homo sapiens
ctgggtcctggcctttgggcatcatccagcgccatcggcctggcgcttcagccaacgcgggagtggatgggccccttcttcttcgcagacagcgttcggccgctgcccgggctctaggcgcggccggacggcccagtctggagggttcggggcggaggcccgggggggtgcgcgcgcccggggtccggcctctcactcgctcccctctcgtccgcagccgcagggccgtaggcagccatggcgcccagccggaatggcatggtcttgaagccccacttccacaaggactggcagcggcgcgtggccacgtggttcaaccagccggcccgtaagatccgcagacgtaaggcccggcaagccaaggcgcgccgcatcgccccgcgccccgcgtcgggtcccatccggcccatcgtgcgctgccccacggttcggtaccacacgaaggtgcgcgccggccgcggcttcagcctggaggagctcagggtggccggcattcacaagaaggtggcccggaccatcggcatttctgtggatccgaggaggcggaacaagtccacggagtccctgcaggccaacgtgcagcggctgaaggagtaccgctccaaactcatcctcttccccaggaagccctcggcccccaagaagggagacagttctgctgaagaactgaaactggccacccagctgaccggaccggtcatgcccgtccggaacgtctataagaaggagaaagctcgagtcatcactgaggaagagaagaatttcaaagccttcgctagtctccgtatggcccgtgccaacgcccggctcttcggcatacgggcaaaaagagccaaggaagccgcagaacaggatgttgaaaagaaaaaataaagccctcctggggacttggaatcagtcggcagtcatgctgggtctccacgtggtgtgtttcgtgggaacaactgggcctgggatggggcttcactgctgtgacttcctcctgccaggggatttggggctttcttgaaagacagtccaagccctggataatgctttactttctgtgttgaagcactgttggttgtttggttagtgactgatgtaaaacggttttcttgtggggaggttacagaggctgacttcagagtggacttgtgttttttctttttaaagaggcaaggttgggctggtgctcacagctgtaatcccagcactttgaggttggctgggagttcaagaccagcctggccaacatgtcagaactactaaaaataaagaaatcagccatgaaaaaaaaaaaaaaaaaaaaaaaaa

SEQ ID NO: 4636 - protein, 211 aa, Homo sapiens [sequence omitted]

SEQ ID NO: 4637 - DNA, 3184 bp, Homo sapiens
tagttttatctctatacccaaaatggaggttaaaagttacactaaaaataacacgattgcaccaaagaaagcgtcccatcgtatcctgtcagacacgtcggacgaggaggacgcgagtgtcaccgtggggacaggagagaagctgagactctcggcacatacgatattgcctggtagtaagacacgagagccttctaatgccaagcagcagaaggaaaaaaataaagtgaaaaagaagcgaaagaaagaaacaaaaggcagagaggttcgcttcggaaagcggagcgacaagttctgctcctcggagtcggagagcgagtcctcagagagtggggaggatgacagggactctctggggagctctggctgcctcaaggggtccccgctggtgctgaaggacccctccctgttcagctccctctctgcctcctccacctcgtctcacgggagctctgccgcccagaagcagaaccccagccacacagaccagcacaccaagcactggcggacagacaattggaaaaccatttcttccccggcttggtcagaggtcagttctttatcagactccacaaggacgagactgacaagcgagtctgactactcctctgagggctccagtgtggaatcgctgaagccagtgaggaagaggcaggagcacaggaagcgagcctccctgtcggagaagaagagccccttcctgtccagcgcggagggcgctgtccccaaactggacaaggaggggaaagttgtcaaaaaacataaaacaaaacacaaacacaaaaacaaggagaagggacagtgttccatcagccaagagctgaagttgaaaagttttacttacgaatatgaggactccaagcagaagtcagataaggctatactgttagagaatgatctttccactgaaaacaagctaaaagtgttaaagcacgatcgcgaccactttaaaaaagaagagaaacttagcaaaatgaaattagaagaaaaagaatggctctttaaagatgaaaaatcactgaagagaatcaaagacacaaacaaagacatcagcaggtctttccgagaagagaaagaccgttcgaataaagcagaaaaggagagatcgctgaaggaaaagtctccgaaagaagaaaaactgagactgtacaaagaggagagaaagaagaaatcaaaagaccggccctcaaaattagagaagaagaatgatttaaaagaggacaaaatttcaaaagagaaggagaagatttttaaagaagataaagaaaaactcaaaaaagaaaaggtttatagggaagattctgcttttgacgaatattgtaacaaaaatcagtttctggagaatgaagacaccaaatttagcctttctgacgatcagcgagatcggtggttttctgacttgtccgattcatcctttgatttcaaaggggaggacagctgggactcgccagtgacagactacagggacatgaagagcgactctgtggccaagctcatcttggagacggtgaaggaggacagcaaggagaggaggcgggacagccgggcccgggagaagcgagactacagagagcccttcttccgaaagaaggacagggactatttggataaaaactctgagaagaggaaagagcagactgaaaagcataaaagtgtccctggctacctttcggaaaaggacaagaagaggagagagtccgcagaggccgggcgggacagaaaggacgccctggagagctgcaaggagcgcagggacggcagggccaagcccgaggaggcgcaccgggaggagctgaaggagtgtggctgcgagagtggcttcaaggacaagtccgacggcgactttgggaagggcctggagccgtgggaacggcaccacccagcacgagagaaggagaagaaggatggccccgataaggaaaggaaggagaagacaaaaccagaaagatacaaagagaaatccagtgacaaggacaaaagtgagaaatcaatcctggaaaaatgtcagaaggacaaagaatttgataaatgttttaaagagaaaaaagataccaaggaaaaacataaagacacacatggcaaagacaaagaaaggaaagcgtctctcgaccaagggaaagagaagaaggagaaggctttccctgggatcatctcagaagacttctctgaaaaaaaagatgacaagaaaggcaaagagaaaagctggtacatcgcagacatcttcacagatgagagtgaggacgacagagacagctgcatggggagcgggttcaagatgggagaggccagcgacttgccgaggacggacggcctccaggagaaggaggaaggacgggaggcctatgcctccgacagacacaggaagtcttctgacaagcagcaccctgagaggcagaaggacaaggagcccagagacaggagaaaggaccgaggggctgccgacgcggggagagacaaaaaagagaaagtctttgaaaagcacaaggagaagaaggataaagagtccacagaaaagtacaaggacaggaaggacagagcctcagtggactccacgcaagataagaaaaataaacagaagctccccgagaaggctgaaaagaagcacgctgccgaagacaaggctaaaagcaaacacaaagagaagtcggacaaagaacattccaaggagaggaagtcctcgagaagtgccgacgcggaaaaaagcctgcttgaaaagttggaagaagaggctctccatgagtacagagaagactccaacgataaaatcagcgaggtctcctctgacagcttcacggaccgagggcaggagccggggctgactgccttcctggaggtctctttcacggagccacctggagacgacaagccgagggagagcgcctgcctccctgagaagctgaaagagaaggagaggcacagacactcctcatcttcatccaagaagagccacgaccgagagcgagccaagaaagagaaggccgagaagaaagagaagggcgaagattacaaggagggcggtagcaggaaggactccggccagtacgaaaaggacttcctggaggcggatgcttacggagtttcttacaacatgaaagctgacatagaagatgagctagataaaaccattgaattgttttctaccgaaaagaaagataaaaatgattccgagagagaaccttccaag

SEQ ID NO: 4638 - DNA, 2875 bp, Homo sapiens
acttgcgctgtcactcagcctggacgcgcttcttcgggtcgcgggtgcactccggcccggctcccgcctcggccccgatggacgccgcgttcctcctcgtcctcgggctgttggcccagagcctctgcctgtctttgggggttcctggatggaggaggcccaccaccctgtacccctggcgccgggcgcctgccctgagccgcgtgcggagggcctgggtcatccccccgatcagcgtatccgagaaccacaagcgtctcccctaccccctggttcagatcaagtcggacaagcagcagctgggcagcgtcatctacagcatccagggacccggcgtggatgaggagccccggggcgtcttctctatcgacaagttcacagggaaggtcttcctcaatgccatgctggaccgcgagaagactgatcgcttcaggctaagagcgtttgccctggacctgggaggatccaccctggaggaccccacggacctggagattgtagttgtggatcagaatgacaaccggccagccttcctgcaggaggcgttcactggccgcgtgctggagggtgcagtcccaggcacctatgtgaccagggcagaggccacagatgccgacgaccccgagacggacaacgcagcgctgcggttctccatcctgcagcagggcagccccgagctcttcagcatcgacgagctcacaggagagatccgcacagtgcaagtggggctggaccgcgaggtggtcgcggtgtacaatctgaccctgcaggtggcggacatgtctggagacggcctcacagccactgcctcagccatcatcacccttgatgacatcaatgacaatgcccccgagttcaccagggatgagttcttcatggaggccatagaggccgtcagcggagtggatgtgggacgcctggaagtggaggacagggacctgccaggctccccaaactgggtggccaggttcaccatcctggaaggcgaccccgatgggcagttcaccatccgcacggaccccaagaccaacgagggtgttctgtccattgtgaaggccctggactatgagagctgtgaacactacgaactcaaagtgtcggtgcagaatgaggccccgctgcaggcggctgcccttagggctgagcggggccaggccaaggtccgcgtgcatgtgcaggacaccaacgagccccccgtgttccaggagaacccacttcggaccagcctagcagagggggcacccccaggcactctggtggccaccttctctgcccgggaccctgacacagagcagctgcagaggctcagctactccaaggactacgacccggaagactggctgcaagtggacgcagccactggccggatccagacccagcacgtgctcagcccggcgtcccccttcctcaagggcggctggtacagagccatcgtcctggcccaggatgacgcctcccagccccgcaccgccaccggcaccctgtccatcgagatcctggaggtgaacgaccatgcacctgtgctggccccgccgccgccgggcagcctgtgcagcgagccacaccaaggcccaggcctcctcctgggcgccacggatgaggacctgcccccccacggggcccccttccacttccagctgagccccaggctcccagagctcggccggaactggagcctcagccaggtcaacgtgagccacgcgcgcctgcggccgcgacaccaggtccccgaaggcctgcaccgcctcagcctgctgctccgggactcggggcagccgccccagcagcgcgagcagcctctgaacgtgaccgtgtgccgctgcggcaaggacggcgtctgcctgccgggggccgcagcgctgctggcggggggcacaggcctcagcctgggcgcactggtcatcgtgctggccagcgccctcctgctgctggtgctggtcctgctcgtggcactccgggcgcggttctggaagcagtctcggggcaaggggctgctgcacggcccccaggacgaccttcgagacaatgtcctcaactacgatgagcaaggaggcggggaggaggaccaggacgcctacgacatcagccagctgcgtcacccgacagcgctgagcctgcctctgggaccgccgccacttcgcagagatgccccgcagggccgcctgcacccccagccaccccgagtgctgcccaccagccccctggacatcgccgacttcatcaatgatggcttggaggctgcagatagtgaccccagtgtgccgccttacgacacagccctcatctatgactacgagggtgacggctcggtggcggggacgctgagctccatcctgtccagccagggcgatgaggaccaggactacgactacctcagagactgggggccccgcttcgcccggctggcagacatgtatgggcacccgtgcgggttggagtacggggccagatgggaccaccaggccagggagggtctttctcctggggcactgctacccagacacagaggccggacagcctgaccctggggcgcaactggacatgccactccccggcctcgtggcagtgatggcccctgcagaggcagcctgaggtcaccgggcccgacccccctgggcctggggcagcctccttcctgtaggcgagggcccaagtctgggggcagaacctgagtgtggatggggcggccaggaagaggccccttcctgccggggtgggaagagtttctctccatcggccccatgcgggtcacctccctagtcccacctttgcctcctaccagtgaacctcatctttgtatgaaagacagcaacctcctgggtaaatctgaatgaaaaacgtgctagtctctttcatgcaaaaaaaaaaaaaaaaa

SEQ ID NO: 4639 - protein, 814 aa, Homo sapiens
MDAAFLLVLGLLAQSLCLSLGVPGWRRPTTLYPWRRAPALSRVRRAWVIPPISVSENHKRLPYPLVQIKSDKQQLGSVIYSIQGPGVDEEPRGVFSIDKFTGKVFLNAMLDREKTDRFRLRAFALDLGGSTLEDPTDLEIVVVDQNDNRPAFLQEAFTGRVLEGAVPGTYVTRAEATDADDPETDNAALRFSILQQGSPELFSIDELTGEIRTVQVGLDREVVAVYNLTLQVADMSGDGLTATASAIITLDDINDNAPEFTRDEFFMEAIEAVSGVDVGRLEVEDRDLPGSPNWVARFTILEGDPDGQFTIRTDPKTNEGVLSIVKALDYESCEHYELKVSVQNEAPLQAAALRAERGQAKVRVHVQDTNEPPVFQENPLRTSLAEGAPPGTLVATFSARDPDTEQLQRLSYSKDYDPEDWLQVDAATGRIQTQHVLSPASPFLKGGWYRAIVLAQDDASQPRTATGTLSIEILEVNDHAPVLAPPPPGSLCSEPHQGPGLLLGATDEDLPPHGAPFHFQLSPRLPELGRNWSLSQVNVSHARLRPRHQVPEGLHRLSLLLRDSGQPPQQREQPLNVTVCRCGKDGVCLPGAAALLAGGTGLSLGALVIVLASALLLLVLVLLVALRARFWKQSRGKGLLHGPQDDLRDNVLNYDEQGGGEEDQDAYDISQLRHPTALSLPLGPPPLRRDAPQGRLHPQPPRVLPTSPLDIADFINDGLEAADSDPSVPPYDTALIYDYEGDGSVAGTLSSILSSQGDEDQDYDYLRDWGPRFARLADMYGHPCGLEYGARWDHQAREGLSPGALLPRHRGRTA

SEQ ID NO: 4640 - DNA, 1829 bp, Homo sapiens
agttctgtggagcagcggtggccggctaggatgggctgtctctggggtctggctctgccccttttcttcttctgctgggaggttggggtctctgggagctctgcaggccccagcacccgcagagcagacactgcgatgacaacggacgacacagaagtgcccgctatgactctagcaccgggccacgccgctctggaaactcaaacgctgagcgctgagacctcttctagggcctcaaccccagccggccccattccagaagcagagaccaggggagccaagagaatttcccctgcaagagagaccaggagtttcacaaaaacatctcccaacttcatggtgctgatcgccacctccgtggagacatcagccgccagtggcagccccgagggagctggaatgaccacagttcagaccatcacaggcagtgatcccgaggaagccatctttgacaccctttgcaccgatgacagctctgaagaggcaaagacactcacaatggacatattgacattggctcacacctccacagaagctaagggcctgtcctcagagagcagtgcctcttccgacggcccccatccagtcatcaccccgtcacgggcctcagagagcagcgcctcttccgacggcccccatccagtcatcaccccgtcacgggcctcagagagcagcgcctcttccgacggcccccatccagtcatcaccccgtcatggtccccgggatctgatgtcactctcctcgctgaagccctggtgactgtcacaaacatcgaggttattaattgcagcatcacagaaatagaaacaacaacttccagcatccctggggcctcagacatagatctcatccccacggaaggggtgaaggcctcgtccacctccgatccaccagctctgcctgactccactgaagcaaaaccacacatcactgaggtcacagcctctgccgagaccctgtcctcagccctctctgttgagacaccaagttacgtcaaagtctcaggagcagctccggtctccatagaggctgggtcagcagtgggcaaaacaacttcctttgctgggagctctgcttcctcctacagcccctcggaagccgccctcaagaacttcaccccttcagagacaccgaccatggacatcgcaaccaaggggcccttccccaccagcagggaccctcttccttctgtccctccgactacaaccaacagcagccgagggacgaacagcaccttagccaagatcacaacctcagcgaagaccacgatgaagcccccaacagccacgcccacgactgcccggatcgaggccgaccacagacgtgagtgcaggtgaaaatggaggtttcctcctcctgcggctgagtgtggcttccccggaagacctcactgaccccagagtggcagaaaggctgatgcagcagctccaccgggaactccacgcccacgcgcctcacttccaggtctccttactgcgtgtcaggagaggctaacggacatcagctgcagccaggcatgtcccgtatgccaaaagagggtgctgcccctagcctgggcccccaccgacagactgcagctgcgttactgtgctgagaggtacccagaaggttcccatgaagggcagcatgtccaagcccctaaccccagatgtggcaacaggaccctcgctcacatccaccggagtgtatgtatggggaggggcttcacctgttcccagaggtgtccttggactcaccttggcacatgttctgtgtttcagtaaagagagacctgatcacccatctgtgtgcttccatcctgcattaaaattcactcagtgtggcccag

SEQ ID NO: 4641 - DNA, 2464 bp, Homo sapiens
cagaggctgggaggcggcagaatgcagccagaggagggcacaggctggctgctggagctgctgtccgaggtgcagctgcaacagtacttcctgcggctccgagatgacctcaacgtcacccgcctgtcccactttgagtacgtcaagaatgaggacctggagaagatcggcatgggtcggcctggccagcggcggctgtgggaggctgtgaagaggaggaaggccttgtgcaaacgcaagtcgtggatgagtaaggtgagtgtggctgtgaagtgcctgaagcccgatgtcctgagccagccagaagccatggacgacttcatccgggaggtcaatgccatgcactcgctcgaccaccgaaacctcatccgcctctacggggtggtgctcacgccgcccatgaagatggtgacagagctggcacctctgggatcgttgttggaccggctacgtaagcaccagggccacttcctcctggggactctgagccgctacgctgtgcaggtggctgagggcatgggctacctggagtccaagcgctttattcaccgtgacctggctgcccgcaatctgctgttggctacccgcgacctggtcaagatcggggactttgggctgatgcgagcactacctcagaatgacgaccattacgtcatgcaggaacatcgcaaggtgcccttcgcctggtgtgcccccgagagcctgaagacacgcaccttctcccatgccagcgacacctggatgttcggggtgacactgtgggaaatgttcacctacggccaggagccctggatcggcctcaacggcagtcagatcctgcataagatcgacaaggagggggagcggctgccccggcccgaggactgtccccaggacatctacaacgtcatggtccagtgctgggctcacaagccagaggacagacccacgtttgtggccctgcgggacttcctgctggaggcccagcccacagacatgcgggcccttcaggactttgaggaaccggacaagctgcacatccagatgaatgatgtcatcaccgtcatcgagggaagggccgagaactactggtggcgtggccagaacacacggacgctgtgtgtggggcccttccctcgcaacgtggtgacctccgtggccggcctgtcggcccaggacatcagccagcccctgcagaacagcttcatccacacagggcatggcgacagtgacccccgccactgctggggcttcccggacaggattgacgaactgtatctgggaaaccccatggacccccccgacctcctgagcgtggaactgagcacctcccggcccccccagcatctaggaggggtgaaaaaaccaacctatgaccctgtgagcgaggaccaagaccccttgtccagcgacttcaagaggctgggcctgcggaagccaggcctgccccgagggctgtggctggcgaagccctcggcgcgggtgccgggcaccaaggccagccgaggcagcggggctgaggtcacgctcatcgacttcggtgaggagcccgtggtcccggccctacggccctgcgcgccctccctggcgcagctggccatggacgcctgctccctgctggacgagaccccgcctcagagccccacgcgggcactgccccggcccctgcaccccacgcctgtggtggactgggacgcacgcccgctgccccccccgcccgcctatgacgacgtggcccaggatgaggatgactttgagatctgctccatcaacagcaccctcgtgggcgcgggggtccctgccgggcccagccagggccagaccaactacgcctttgtgcctgagcaggcgcggccgccccctcccctggaggacaacctgttcctcccgccccagggtgggggcaagccgcccagctccgcacagaccgcagagatcttccaggcgctacagcaggagtgcatgaggcaactgcaggctccggccggctccccggccccctctcccagcccggggggtgacgacaagccccaggtgcctcctcgggtacccatcccccctcggcccacgcgcccacacgtccagctgtctccagcccccccgggcgaggaggagaccagccagtggcctggacctgcttcccctccccgggtgcctccgcgggagcccctgtcccctcaaggctcgaggacacccagccccctggtaccacctggcagctccccgctgccaccccggctctcaagctcacctgggaagaccatgcccaccacccagagctttgcctcagaccccaagtacgccaccccccaggtgatccaggcccctggcccgcgggctggtccctgcatccttgcccatctgtcctgggattgtgcaagaaggtcagcagcacccactattacttgcttgcccgagcgaccatcctacctggagctgctaccagcgcttcctgcgtgagtgccagagccccgatgagcctacc

SEQ ID NO: 4642 - DNA, 1776 bp, Mus musculus
gcggagcgagaggctgagagagtcggagacactatccgcttccatccgtcgcgcagaccctgccggagccgctgccgctatggatgatcgagaggatctggtgtaccaggcgaagctggccgagcaggctgagcgatacgacgaaatggtggagtcaatgaagaaagtagcagggatggatgtggagctgacagttgaagaaagaaacctcctatctgttgcatataagaatgtgattggagctagaagagcctcctggagaataatcagcagcattgaacagaaagaagaaaacaagggaggagaagacaagctaaaaatgattcgggaatatcggcaaatggttgagactgagctaaagttaatctgttgtgacattctggatgtactggacaaacacctcattccagcagctaacactggcgagtccaaggttttctattataaaatgaaaggggactaccacaggtatctggcagaatttgccacaggaaacgacaggaaggaggctgcggagaacagcctagtggcttataaagctgctagtgatattgcaatgacagaacttccaccaacgcatcctattcgcttaggtcttgctctcaatttttccgtattctactacgaaattcttaattcccctgaccgtgcctgcaggttggcaaaagcagcttttgatgatgcaattgcagaactggatacgctgagtgaagaaagctataaggactctacacttatcatgcagttgttacgtgataatctgacactatggacttcagacatgcagggtgacggtgaagagcagaataaagaagcgctgcaggacgtggaagacgaaaatcagtgagacataagccaacaagagaaaccatctctgaccaccccctcctccccatcccaccctttggaaactccccattgtcactgagaaccaccaaatctgacttttacatttggtctcagaatttaggttcctgccctgttggttttttttttttttttttttaaacagttttcaaaagttcttaaaggcaagagtgaatttctgtggattttactggtcccagcttttaggttctttaagacactaacaggactacatagaggctttttcagcattactgtgtcgtctccgtgccagatgtggcaagatcaccattagcaaatggaaattacatttgaaagccattagacttataggtgatgcaagcatctaagagagaggttaatcacactatagaggcataagtggtatcagttttcatttttctaattgtttaaactgtgttttataccagtgtttgcaagtaattgggtgttagcttgagatggttaaaggtggtttggggagggacttcgttgtaatggttttgctgtaaaaaatgtttccaactccgctgaaatgttgctgaaaagcatggtgctggtaacagttcaacaatccgtggctgctcattcttgcctactttactctcccactgaagcaggttagcgttgaaggtggtatggaaaagcctgcatgcctgttcaattcttttgtttcttctccttccccctccccctacctccttcccctcactcctcccctccttcgctcgctcaacctcttttgttcagtatgtgtaacttgaagctaatttgtactactggatatctgactggagccacagatacagaatctgtattgttcttactgaaacacagcatggaattaacattaaacttaaataaaacaaacctaaattaaaaaaaaaaaaaaaaaaaaaaaaaaaaaaa

SEQ ID NO: 4643 - protein, 255 aa, Mus musculus
MDDREDLVYQAKLAEQAERYDEMVESMKKVAGMDVELTVEERNLLSVAYKNVIGARRASWRIISSIEQKEENKGGEDKLKMIREYRQMVETELKLICCDILDVLDKHLIPAANTGESKVFYYKMKGDYHRYLAEFATGNDRKEAAENSLVAYKAASDIAMTELPPTHPIRLGLALNFSVFYYEILNSPDRACRLAKAAFDDAIAELDTLSEESYKDSTLIMQLLRDNLTLWTSDMQGDGEEQNKEALQDVEDENQ

SEQ ID NO: 4644 - DNA, 5248 bp, Homo sapiens
ctcgcccctccgcgctcgcaacttcggcctcccccggctcccgcccgctctccctcctttgttgcgcgatgagggtcgggtttcggatctgaccgagccgccgccgcgggatggagccgctcagccaccggggcctgccgcgcctgtcctggatcgacaccctctacagcaacttcagctacgggacggacgagtacgacggagaggggaatgaggagcagaaggggcccccggagggctcagagaccatgccgtacatcgatgagtcgcccaccatgtccccgcagctcagcgcccgcagccagggcgggggggatggcgtctccccgactccacctgagggactggctcctggggtggaagcagggaaaggcctggagatgaggaagctggttctctcggggttcttggccagcgaagagatctacattaaccagctggaagccctgttgctgcccatgaaacccctgaaggccaccgccaccacctcccagcccgtgctcaccatccagcagatcgagaccatcttctacaagatccaggacatctatgagatccacaaggagttctatgacaacctgtgccccaaggtgcaacagtgggacagccaggtcaccatgggccacctcttccagaagctggccagccagctcggtgtgtacaaagcgtttgtcgataactataaagtcgctctggagacagctgagaagtgcagccagtccaacaaccagttccagaagatctcagaggaactcaaagtgaaaggtcccaaggactccaaggacagccacacgtctgtcaccatggaagctctgctctacaagcccattgaccgggtcactcggagcaccctagtcctacacgacctgctgaagcacacacctgtggaccaccccgactacccgctgctgcaggatgccctccgcatctcccagaacttcctgtccagcatcaacgaggacatcgacccccgccggactgcagtgacaacgcccaagggggagacgcgacagctggtgaaggacggcttcctggtggaagtgtcagaggcctcccggaagctgcggcacgtcttcctctttacagatgtcctactgtgtgccaagctgaagaagacctctgcagggaagcaccagcagtatgactgtaagtggtacatccccctggccgacctggtgtttccatcccccgaggaatctgaggccagcccccaggtgcaccccttcccagaccatgagctggaggacatgaagatgaagatctctgccctcaagagtgaaatccagaaggagaaagccaacaaaggccagagccgggccatcgagcgcctgaagaagaagatgtttgagaatgagttcctgctgctgctcaactcccccacaatcccgttcaggatccacaatcggaatggaaagagttacctgttcctactgtcctcggactacgagaggtcagagtggagagaagcaattcagaaactacagaagaaggatctccaggcctttgtcctgagctcagtggagctccaggtgctcacaggatcctgtttcaagcttaggactgtacacaacattcctgtcaccagcaataaagacgacgatgagtctccaggactctatggcttccttcatgtcatcgtccactctgccaagggatttaagcaatcagccaacctgtactgtaccctggaggtggattccttcggctattttgtcagcaaagccaaaaccagggtgttccgggacacagcggagcccaagtgggatgaggagtttgagatcgagctggagggctcccagtccctgaggatcctgtgctatgagaagtgctatgacaagaccaaggtcaacaaggacaacaatgagatcgtggacaagatcatgggcaaaggacagatccagctggacccacaaaccgtggagaccaagaactggcacacggacgtgattgagatgaacgggatcaaagtggaattttccatgaaattcaccagccgagatatgagcctgaagaggaccccgtccaaaaagcagaccggcgtcttcggtgtgaagatcagcgtggtgacgaagcgggagcgctccaaggtgccctacatcgtccggcagtgtgtggaggaggtggagaagaggggtatcgaggaggttggcatctacaggatatcgggcgtggccacggacatccaggcgctcaaggccgtcttcgatgccaataacaaggacatcctgctgatgctgagtgacatggacatcaacgccatcgccgggacgctcaagctgtacttccgggaactgcccgagccgctcctcacggaccgactctacccagccttcatggagggcatcgccctgtcagaccctgctgccaaggaaaactgcatgatgcacctgctccgctccctgcccgaccccaacctcatcaccttcctcttcctgctggaacacttgaaaagggttgccgagaaggagcccatcaacaaaatgtcacttcacaacctggctaccgtgtttggacccacgttactgagaccctcagaagtggagagcaaagcacacctcacctcggctgcggacatctggtcccatgacgtcatggcgcaggtccaggtcctcctctactacctgcagcacccccccatttccttcgcagaactcaagcggaacacactgtacttctccaccgacgtgtagcccgaggcagggtggctgcgggcgggtggtggaaccagcccctccagcctggggtccaactcagacttgaaagactgcaatagaaaactcccaaacccagcactccagactcgagggaagccagcttccaagaactggaatgcgtacgtcttttgtgccaccttgtacaaagccggctgcccagccccagcctcaccaccgcatcccacctcctgccctccatacctctagttgtgtctgatgctccgtgctgttcgggaattgttttatgtacacttgtcaggcagaaaaggtagtgaccggcccggcgtgggcacacagacagcccgctttgttctttcatttcctccagcactttctttccgcctgagtccagcccaaggccttttattttgcgctgtgtaactgctgccagcttctcttggccctgctcccagatggcggtctcctggcagcctcccctcagtcttcctccacccgctcttccttcccagcctgcctgcatgcatgtgcacccttggtcttcgctccatcgccttgaaagctctgaagaggccctgggttgccgcggcagcagtggtctgtttgatgctgccgtttgccgctgccggcccctcctcagactccgcctttgggagcacacctgctttgccttgctgcctgtgcaaatgttggacaagcagacacactcacactcgtccccagcttagcacagagctggagcgcccatttctggaattttccgtttgggaatctccacttctggggtttacctgttcggcctcctgcctatcagtgaggcatctctgactgtttcttctactgcttttcagttcccttccctgctgttctatttcctttgagtgtaaagactcacaggtgacctgctatcgagatagccagagggtcaggagagaatgggggaggaggcggtcaggctgctgaggaaacaccacaggctgaacgggggaggaatgcacatgccacgctgggtgtcccgggtcgcggggaggcagctcagctcttaggagcaagttgtgggggcttttcaagaggggccaggcttcctggagggtgactgatgtggccgaagcaggtgtccaggcaggtaggctgcagccaggagctccctggcaccgcaggacctcgtggtactcttgccttagattttacacacactccacagccaagcactgccacggtcctccaggacctgggaagcaaaggcacaggcccacggtggccagccattgtggtgctgccccagcttctggatacagccttttgggtaaacactgggaactccagaagttgtggggagagtggggaatcagacagccgcctctaggggctgggttctgctggggcctccttgttggtgctgtaggcacccgccagggagcagggacccgacttgcagacgcattgcccggtactaggaaggagtgaggtgtgttcccaccgtacacttcccacacgagctgcggctgccagcctcgggccatcagcctaggagagcagatgcagctccaggggctcgacttatagccagttacagctccccggctcttctgtgtggcagagcgtcgtttccgggccctcagggctggggagctcagttcccattgcttgtgctcagggctgagtcttaaagaagggtttgccggccctaacgctgcagcgcgtgcgcggagagaggccctttttgagcctgtttactcctgtggccttgggcagaacagtaaatactctgtgcacggaggaaagacatgcccaagaggaaggaagtactgaccatcggctgcctgtgagcagcttagcaaggagcccttgctccctgggaaaggcggtgaacttgagtctaaagatgcagtgcctggcccttcctaaggtccctgcctggcatccgagtgtcggtgtgtggcacagaaggctcctgcttgcttccaaagtgatggacaggaaggggcagagtgagtcacggcccagactgggcaccttcgcgtctcagcctcagggagccccacagccccaagctcgctgaggcaacgtgagaacaggctatgggaaggctgcaaaggctgagaaatgcaaaggctcatatttataaatcccacccccagagtggggagggtcaggtgccagacctggactaaactgcaccaaggaaacacccagcagggtctcctgtgagccggggaccatgcagcccgaaacctccagtcactgcgcccggcaggagtcaggagccagggactgtgcagcctggaacctccagtcactgtgcccagcagggtgggctgtgcccagcaggagtcaggctaagaaacgccaggtctgcctgttcttgctgggcaatggctgatggctgccagtttctgctgatacacaggtaggatgggacccttcatgaatatctgactttaataagttggtaaggatatatttttttgtctatgttctgtttcaacttatgtagattattataaattgatgtaaaccacgtgagaggaaaatgttaataaaaaatgcaaagccccatcatttgcacaaaactc

SEQ ID NO: 4645 - DNA, 2417 bp, Homo sapiens
gggaccgaaacccttcagggaagtcattgcagggcccttgcttagaaacaatgggcagtctctggagagcagcagcctggaggggtctcacgtgggcgtctatttctccgcacattggtgtccgccctgccgaagcctcacccgggtcctggtggaatcctaccggaagatcaaggaggcaggccagaacttcgagatcatcttcgttagtgcagacaggtcggaggagtccttcaaacagtacttcagtgagatgccctggctcgccgtcccctacacggatgaggcccggcggtcgcgcctcaaccggctgtacggaatccaaggcatccccacgctcatcatgctggacccgcagggcgaggtgatcacgcggcaggggcgggtggaggtgctgaacgacgaggactgccgggagttcccctggcaccccaagcccgtgctggagctctccgactccaacgccgcgcagcttaacgagggcccctgcctcgtcctttttgtagattctgaggatgacggagagtccgaggcggccaagcagctgattcagccgatagctgagaaaatcattgccaagtacaaagccaaagaggaggaggcaccccttctgttcttcgtagccggggaggatgacatgactgactccctgcgagattacaccaacctgcctgaggctgcccctttgctcaccatcctggacatgtcagcccgggccaagtacgtgatggacgtggaggagatcacccccgccatcgtggaggcctttgtgaatgacttcctagcagagaagctcaaaccggagcccatctagcgtggctccggcctcctgagacgttatttaaaactcagccttctcctcctccccctccttccttccgcccttggacttacccagcgtgccccgaatcccaccacccaagtgtccagcctctctgtggtgccttgtttctgcagtaaactcctcagccagcaccctggggtgtggaatcagcagcggcagagtccaccgtgtttggagactctgtttgggagcacgggatggccgggggcccggccagagcggggctgcatggctttcgcaaagtcactagcttttggtgaaggatctgccagggtgtcctgggcagagtgagcgtggagggccggtgggtcccgctcgggctctgactctgacgtcggcacacacggccccggacggccagaggggaaccgccgggtgacacctgcgtggaggctgagctgagaaagggcctccgcttagagctgcgggtgaggacgtccttttctaagcaacacagtcttcctcggtctgagagaaaagcagcccactcttgtgttctcaggcaggggatctccaaatgcaaaaggaagcttgtagaggttttttgggtgagaagaaaaatgtagctaaggtaatggttcatatcatacaaacagctcccacgatcctgaaattctgttaacgaatccttctctttggacatcttcccaagaaacttagccctgagtcctaggaggagcacctctgcaccagcacggacctctcgctccacccagctctgtgcccaaggcccctgatctctgctgaggtgcccacacccacgttcgatcacccctgccattcccttttattttcttttttttgagatggagtcttgctctgtcgcccaggctggagtgcagtggcaccatcttggctcacttcaacctccgcccccaaggttcaagtgattctcctgcctcagcctcccgagtagctgggattacaggcacccgccaccgtacctggctaatttttgtatttttagtagagatggggtttcaccatgttggccaggctggtctcgaactcctgacctcaggtgatccacccgcctcggcctcccaaagtgctgggattacaggcgtgagccgccgtgcccggcccccttttcttttcaaagcagaactacaaagatgagaaattaccagaagcctcgccttttcctaagcaccagcggaaggagctgtgccccgggatggagtgagggtggagggcgcgtcagccacgggtgggccttgtgtcgccttgtatcggcccaggtaggttgttggcctcttacttgggctgacctgacccccgaaagagaaacagacaactctgttctcaggattggggatggacggcttcggccaagcgttttagcctcattcactcaggccccactcagcactctgccagccaagaccattgatttggaaaatccggtccccacccgctaatgagctgttgacactgttgttccttgctgaattggattgttgacttgtagttcagaggcgtacaactagttggcgattagacttgttatgtgatgttaccagcctgaaatgcgatcaccccgtaggaaataaagcaggcatctctggacctc

SEQ ID NO: 4646 - DNA, 4733 bp, Homo sapiens
  unsure 2233: unknown base
  unsure 3036: unknown base
  unsure 3039: unknown base
  unsure 3677: unknown base
  unsure 3681: unknown base
tggccgtgtgattgctctgtgcccattaccctgtggccgtgtgactgctgctgtgcccattaccctgtggccgtgtgattgctgctgtgcccattaccctgtggccgtgtgattgctctgtgcccattatcctgtggccgtgtgattgctctgtgcccattaccctgtggccgtgtgattgctctgtgcccattaccctgtggccgtgtgattgctctgtgcccattatcctgtggccgtgtgattgctctgtgcccattatcctgtggccgtgtgattgctctgtgcccattatcctgtggccgtgtgattgctctgtgcccattaccctgtggccgtgtgattgctgctgtgcccattaccctgtggccgtgtgattgctctgtgcccattatcctgtggccgtgtgattgctctgtgcccattatcctgtggctgtgtgattgctctgtgcccattatcctgtagccgtgtgattgcttctgtgcccattaccctgtggctgtgtgattgctgctgtgcccattatcctgtggctgtgtgattgctgctgtgcccattaccctgtggctgtgtgattgctctgtgcccattaccctgtggctgtgtgattgctctgtgcccattatcctgtggccgtgtgattgctgctgtgcctgttaccctgtggctgtgtgattgctctgtgcccattaccctgtggctatgctcccttcatctgtcatgagaagctcagctgtcatgtcctgtggtacatgctcagtggcccctgtagtttgtactgtcctcctatttctaaacccctctccccacatcctctgctggcccagcctttgctggagggtctcgcctcagcagcccagctttttcttttcacacacttttcctgaaggatctcattcaccgtcttggttccggtgatcccctctgggcagatacctctcagaatcacatttcccagcttacttccctcctgaacttccacctggcatttccgttgctggaggacatctgtaccttgatggccaaagctgaactcatctttcctcacacctgctctgattctcctccattccctgtatgtgatgtcacctggtggcctcccagttcccaggctggagagctcggaagccattctggattcctcggccaagtccttctgactccagctgtgcagtggctcttgtagtcatcccttctccccgtccgctgatgtcctttaaaacccttgtcatctcaaaccatgacagcctactaacagcagtggccatctggaaacattttcactatactgtcttatttggcttgtctgtgtgcaggacccttgaacatctgtgaagaaatgactattctgcatggaggcttcttgctggccgagcagctgttccaccctaaggcactggcagaattaacaaagtctgactgggaacgtgttggacggcccatcgtggaggccttaagggagatctcctcggctgcagcacactcccagccctttgcctggaagaagaaagccctgatcatcatctgggccaaggttctgcagccgcaccccgtgaccccgtccgacacagagacacggtggcaggaagacctgttcttctcggtgggcaacatgatccccaccatcaaccacaccatcctcttcgagctgctcaaatccctggaagcttctggactctttatccagctcctgatggccctgcccaccaccatctgccatgcagaactagagcgctttctggaacatgtgaccgttgacacttctgccgaagacgtggccttcttcctggacgtctggtgggaggtgatgaagcacaagggtcacccgcaggaccccctgctctcccagtttagtgcaatggcccataagtacctgcctgccttagatgagttcccccatcctccaaagaggcttaggtcagacccagacgcgtgccccaccatgcccctgttggccatgctgctccgcgggctgacacagatccagagtcggatcctgggcccggggaggaagtgctgtgcgctggccaacctggctgacatgctgactgtgtttgcgctgacagaggacgacccccaggaggtgtctgcaaccgtgtatctggacaaactggccacggtgatctctgtgtggaactcggacacccagaatccctaccaccagcaggcgctggcagagaaggtgaaggaggcagaacgggatgtcagcctgacctcgctggccaaactnccccagtgagaccattttcgtgggctgcgagttcctgcaccacctgctgcgggagtggggggaggagttgcaggccgtgctccgcagcagccaggggacaagttacgacagctaccggctgtgcgacagtctgacttccttcagccagaacgcgacgctctacctgaaccgcaccagcctgtccaaggaggacaggcaggtggtctctgagctggcggagtgtgtcagggacttcctgaggaaaacgagcacggtgctgaagaacagggccttggaggatatcacagcttccattgccatggccgtcatccagcagaagatggaccgccatatggaagtgtgctacatttttgcctctgagaagaagtgggccttctcggacgagtgggtagcctgcctggggagtaacagggccctcttccgacagccagacttggtgttgaggctgctggaaacagtgatagacgtcagcacagctgacagagccatccctgagtctcagatccggcaggtgatccacctgatcctggaatgttacgcagacctctccctgccaggtaaaaataaagtccttgcaggtatcctgcgttcctgggggcgaaagggcctctctgaaaagttgctggcttatgtggagggttttcaggaagacctcaatacaacttttaaccagctcactcagagtgcctccgaacagggcttggcaaaagctgtggcctccgtggcccgcctggtcatagtgcacccggaagtcacggtgaagaaaatgtgcagcctggctgtggtcaatctcggcacccacnaangttcctggcccagattctcactgccttccctgcccttaggtttgtggaagagcagggtcccaattcatctgccactttcatggtgtcatgcctcaaagaaaccgtctggatgaagttctctacacccaaggaagaaaagcaatttttagagctcctgaactgcctgatgagtcccgtgaaaccccaagggattccagtggctgctcttcttgagccagacgaggtgctgaaggaatttgtcctgcctttcttgaggttagatgttgaagaggtagacctcagtctgaggatcttcatccagactctagaggcaaacgcgtgccgagaggaatactggctccagacctgctccccgtttccactcctcttcagcttgtgccagctcttggaccgcttcagcaaatactggcagcttcccaaggagaagcggtgcctctctttggataggaaggatctagcgatccatatcctggagctcctgtgtgagattgtatcagccaatgctgagaccttctccccggatgtctggatcaagtccctgtcctggctccaccgcaagttagaacagctagactggactgtgggcctgaggctgaagagcttcttcgaggggcacttcaagtgtgaagtgccagccnacanctttttgagatctgtaagctttcagaagacgagtggacctcccaggcccacccagggtacggggctggcacggggctcctggcctggatggagtgctgctgcgtctccagcggcatctcggagaggatgctgtctctcttggtggtggacgtgggcaatcctgaggaggtcagactgttcagcaaaggctttctggtggccctggtgcaagtcatgccttggtgcagccctcaggagtggcagcgccttcaccagctgaccaggagactgctggagaagcagctcctccatgtcccttatagcctggaatatattcagtttgttcccctgctcaacctgaagccctttgcccaggagttgcaactctccgtcctcttcctgaggactttccagtttctctgcagccatagctgtcgtgattggcttcctctggaaggctggaaccacgtggtcaaactcctctgtggcagtctgacccgcctcctggactcagtcagggcgatacaggcagctggcccttgggttcaaggaccagagcaggacctgacccaggaagccctgtttgtttacacccaggtgttctgccatgctctgcacatcatggccatgctccacccggaggtctgtgagccactctacgttttagccttggaaaccctcacctgctatgagactttgagcaagaccaacccttctgtcagctccttgctccagagggcacacgagcagcgcttcttaaagtccattgctgagggcatcggccctgaagaacggcgccaaaccctgttgcagaagatgagcagcttctgacttggcgtggggagctgggccccaacatggcgggtctgcagaagatcagcagcttcttacctgtgcgggagcgaaaaagctgggcttcaacatggcaggtctgtaggggtcagacccgagcagcctggactttacagttatgtgaaactgtccacaaaaagtcatggcaataatggtgtaaagaaaatagtttcttgggtatttgtaacgtacaaactatcataaaaattctcctctttcgc

SEQ ID NO: 4647 - DNA, 1199 bp, Homo sapiens
ccaacttcggctatgacctgtaccgggtgcgatccagcatgagccccacgaccaacgtgctcctgtctcctctcagtgtggccacggccctctcggccctctcgctgggagcggagcagcgaacagaatccatcattcaccgggctctctactatgacttgatcagcagcccagacatccatggtacctataaggagctccttgacacggtcactgccccccagaagaacctcaagagtgcctcccggatcgtctttgagaagaagctgcgcataaaatccagctttgtggcacctctggaaaagtcatatgggaccaggcccagagtcctgacgggcaaccctcgcttggacctgcaagagatcaacaactgggtgcaggcgcagatgaaagggaagctcgccaggtccacaaaggaaattcccgatgagatcagcattctccttctcggtgtggcgcacttcaaggggcagtgggtaacaaagtttgactccagaaagacttccctcgaggatttctacttggatgaagagaggaccgtgagggtccccatgatgtcggaccctaaggctgttttacgctatggcttggattcagatctcagctgcaagattgcccaactgcccttgaccggaagcatgagtatcatcttcttcctgcccctgaaagtgacccagaatttgaccttgatagaggagagcctcacctccgagttcattcatgacatagaccgagaactgaagaccgtgcaggcggtcctcactgtccccaagctgaagctgagttacgaaggcgaagtcaccaagtccctgcaggagatgaagctgcaatccttgtttgattcaccagactttagcaagatcacaggcaaacccatcaagctgactcaggtggaacaccgggctggctttgagtggaacgaggatggggcgggaaccacccccagcccagggctgcagcctgcccacctcaccttcccgctggactatcaccttaaccagcctttcatcttcgtactgagggacacagacacaggggcccttctcttcattggcaagattctggaccccaggggcccctaatatcccagtttaatattccaataccctagaagaaaacccgagggacagcagattccacaggacacgaaggctgcccctgtaaggtttcaatgcatacaataaaagagctttatccct

SEQ ID NO: 4648 - DNA, 1953 bp, Homo sapiens
atggaagaaggctcggggccgcagccaccccggaccgccggcccagcccccggtacctcctcaccgcaatggccccctcgctcagctggccgaccatggctccaccgccaagacttccccgcggaccccgcaacagctccagcttccccacccggacctgaggatgagctgtttctaaaaagactttctaaaggttacttggtgggaaaggactcggacgctcctcttttctacagagaagaaggaaacaaaaaatttcaggagaaagattacacaggagctgcagtgctgtactctaagggagtgtcacattcaaggcctaacactgaggacatgtcactgtgtcatgctaaccgctcggcagccctcttccacctgggtcagtatgagacgtgtcttaaagacattaacagagcacagacacatgggtatccagaaaggttgcaacccaagattatgttacgtaaagcagaatgtctggtggccctggggagactgcaggaggcaagccagaccatcagtgatcttgaaaggaacttcacagccacaccagccctagcagatgtcctccctcagactctgcagagaaacctccatcgtctgaaaatgaagatgcaagaaaaggacagtctcacagaaagcttcccagcagctctggccaaaacccttgaggatgcagcgctgagggaggagaatgaacaactttccaatgcctcatcatccatcggcttatgcgtagatcctttaaaaggtcgctgtctcgttgccacaaaagatattctcccaggagagctcctggtgcaggaggatgcttttgtgagtgttctcaacccaggagaactgccaccaccgcatcacggcctagacagcaaatgggacaccagagtcaccaatggggacctctattgtcaccgatgtttgaagcacactttggccacagttccgtgtgacggatgcagttatgccaagtattgcagccaggagtgtttgcagcaggcctgggagctctaccacaggacagaatgtcctctgggagggctgcttctcacactgggtgtcttttgccacattgccctgaggttgactcttttggtgggatttgaggatgttcgcaaaatcataacgaagctttgtgataagattagtaacaaggacatctgtttacctgaaagcaacaatcaggtcaagacacttaattatggcctaggggagagtgagaaaaatggcaacatcgttgagaccccaattcctggatgcgatattaatgggaagtatgaaaataattataatgctgtcttcaaccttttgccccacactgaaaaccatagcccagagcacaaattcctctgtgctctctgtgtttctgcactgtgcagacagctagaagcagccagtttacaggccatcccaactgagaggattgtgaactcctctcagcttaaagcagcagtgacacctgaattgtgtcctgacgtgactatttggggagtggcgatgctgagacacatgttacagcttcagtgtaacgctcaggcgatgaccaccatacaacacacagagcgagctgttcagcggctgtcggggtgccagcgtgacgccgagagcttcctgtgggcagagcacgccgtggtgggagagatcgcggatggcctggcccgggcctgtgctgccttaggagactggcaaaagtcagccacccatctacagaggagtctctacgtggtggaggttcgccacgggccgtccagtgttgaaatgggccatgagctcttcaaattggcccagatctttttcaacgggtttgcagtacccgaagccctgagcacaatacagaaagctgaggaggttctgtcgctgcactgtggcccatgggacgatgaaatccaggagctccagaagatgaaatcctgtttgttggacttaccacccacccctgtagggcctgcattgtag

SEQ ID NO: 4649 - protein, 317 aa, Homo sapiens
MSLCHANRSAALFHLGQYETCLKDINRAQTHGYPERLQPKIMLRKAECLVALGRLQEASQTISDLERNFTATPALADVLPQTLQRNLHRLKMKMQEKDSLTESFPAALAKTLEDAALREENEQLSNASSSIGLCVDPLKGRCLVATKDILPGELLVQEDAFVSVLNPGELPPPHHGLDSKWDTRVTNGDLYCHRCLKHTLATVPCDGCSYAKYCSQECLQQAWELYHRTECPLGGLLLTLGVFCHIALRLTLLVGFEDVRKIITKLCDKISNKDICLRESNNQVKTLNYGLGEMLKWAMSSSNWPRSFSTGLQYPKP

SEQ ID NO: 4650 - DNA, 2061 bp, Homo sapiens
  unsure 22: unknown base
  unsure 129: unknown base
  unsure 159: unknown base
  unsure 164: unknown base
  unsure 166: unknown base
  unsure 240: unknown base
  unsure 274: unknown base
  unsure 886: unknown base
  unsure 928: unknown base
agagtagttatcttgatggaanttagaagttttgaagtcagctgaagcagttggagtgaagattggcaatccagtgccctataatgaaggactcgggcagccgcaagtagctcctccagcgccagcagnccagcccagcagcaagcagcaggccccagnccgcnangaatggaagctcgggaatgggttctactgtttctaaggcttatggtgcttcaaagacatttggaaaagctgcanggtcccagcctgtcacacacttctgggggaacancagtccaaagtggtgcccattgccagcctcactccttaccagtccaagtggaccatttgtgctcgtgttaccaacaaaagtcagatccgtacctggagcaactcccgaggggaagggaagcttttctccctagaactggttgacgaaagtggtgaaatccgagctacagctttcaatgagcaagtggacaagttctttcctcttattgaagtgaacaaggtgtattatttctcgaaaggcaccctgaagattgctaacaagcagttcacagctgttaaaaatgactacgagatgaccttcaataacgagacttccgtcatgccctgtgaggacgaccatcatttacctacggttcagtttgatttcacggggattgatgacctcgagaacaagtcgaaagactcacttgtagacatcatcgggatctgcaagagctatgaagacgccactaaaatcacagtgaggtctaacaacagagaagttgccaagaggaatatctacttgatggacacatccgggaaggtggtgactgctacactgtggggggaagatgctgataaatttgatggttctagacagcccgtgttggctatcaaaggagcccgagtctcntgatttcggtggacggagcctctccgtgctgtcttcaagcanctatcattgcgaatcctgacatcccagaggcctataagcttcgtggatggtttgacgcagaaggacaagccttagatggtgtttccatctctgatctaaagagcggcggagtcggagggagtaacaccaactggaaaaccttgtatgaggtcaaatccgagaacctgggccaaggcgacaagccggactactttagttctgtggccacagtggtgtatcttcgcaaagagaactgcatgtaccaagcctgcccgactcaggactgcaataagaaagtgattgatcaacagaatggattgtaccgctgtgagaagtgcgacaccgaatttcccaatttcaagtaccgcatgatcctgtcagtaaatattgcagattttcaagagaatcagtgggtgacttgtttccaggagtctgctgaagctatccttggacaaaatgctgcttatcttggggaattaaaagacaagaatgaacaggcatttgaagaagttttccagaatgccaacttccgatctttcatattcagagtcagggtcaaagtggagacctacaacgacgagtctcgaattaaggccactgtgatggacgtgaagcccgtggactacagagagtatggccgaaggctggtcatgagcatcaggagaagtgcattgatgtgagaggagcagtgccaatcgggcagaagtttgcaaataggcagaatggaatcgatttcctcccacctccgtgtgacgatcccatgttagctacacagtgcagaggctcttgatggtggactaagcaatttcctccctcgtgcgcatctcagaacccatcggtaggcaaaggaaaatacgctcaggtggttgtggtgtagactgtgtcaggcctacggagtcagccagtggctagcgcaagaccagtcactccctctgccttcaggcttctgtcaatttcattatcatcaagcaggaattatgtcgtaagtcactgaccctaactgcagaccatgaagtaaattatgtaactaggtttttgcttctccagtggtgaccacccccccccatccccgctcacaacttgggttcttctcagcggggcgagctgagaagcggtcatgagcacctggggattttagtaagtgtgtcttccta

SEQ ID NO: 4651 - DNA, 1167 bp, Homo sapiens
  unsure 622: unknown base
  unsure 764: unknown base
  unsure 774: unknown base
  unsure 871: unknown base
  unsure 984: unknown base
  unsure 1088: unknown base
gatggctgcgctgttgctgagacacgttggtcgtcattgcctccgagcccactttagccctcagctctgtatcagaaattggtctcttcccatggcgatgtccatctgccaccgtggcactggtattgctttgagtgcaggggtctctctttttggcatgttggccgtgttactccctgggaactttgagtcttatttggaacttgtgaagtccctgtgtctggggccagcactgatccacacagctaagtttgcactcgtcttccctctcatgtatcatacctggaatgggatccgacacttgatgtgggacctaggaaaaggcctgaagattccccagctataccagtctggagtggttgtcctggttcttactgtgttgtcctctatggggctggcagccatgtgaagaaaggaggctcccagcatcatcttcctacacattattacattcacccatctttctgtttgtcattcttatctccagcctgggaaaagttctccttatttgtttagatccttttgtattttcagatctccttggagcagtagagtacctggtagaccttaatagtggaaaagggtctagttttccccttgtttctaaagatgaggtggctgncaaaaactccccttttttgcccacagcttgcctactctcggcctagaagcagttattctctctccatattgggctttgatttgtgctgagggtcagcttttggctccttcttcctgagacagtggaaacaatgccagctctngtggcttctngccctggggacgggccgggtggggggtgggttggtgaggctttgggtgccactacctgtgggttgctggcttaaaggacaattctcttcattggtgnagagcccaggccattaacacctacacagtgttattgaaagaagagaggtgggggtggaggggaattagtctgtcccagctagagggagataaagagggctagttagttcttgngagcagctgcttttgaggagaaaatatatagctttggacacgaggaagatccagaaaattatcattgaacatattaatggttatttctttttcttggatttccnagaaaagcctcttaattttatgctttctcatcgaagtaatgtaccctttttttctgaaactgaattaaatactcatttt

SEQ ID NO: 4652 - protein, 169 aa, Homo sapiens
MAALLLRHVGRHCLRAHFSPQLCIRNAVPLGTTAKEEMERFWNKNIGSNRPLSPHITIYSWSLPMAMSICHRGTGIALSAGVSLFGMSALLLPGNFESYLELVKSLCLGPALIHTAKFALVFPLMYHTWNGIRHLMWDLGKGLKIPQLYQSGVVVLVLTVLSSMGLAAM

SEQ ID NO: 4653 - DNA, 514 bp, Homo sapiens
  unsure 458: unknown base
gatggctgcgctgttgctgagacacgttggtcgtcattgcctccgagcccactttagccctcagctctgtatcagaaattggtctcttcccatggcgatgtccatctgccaccgtggcactggtattgctttgagtgcagatgtgggacctaggaaaaggcctgaagattccccagctataccagtctggagtggttgtcctggttcttactgtgttgtcctctatggggctggcagccatgtgaagaaaggaggctcccagcatcatcttcctacacattattacattcacccatctttctgtttgtcattcttatctccagcctgggaaaagttctccttatttgtttagatccttttgtattttcagatctccttggagcagtagagtacctggtagaccttaatagtggaaaagggtctagttttccccttgtttctaaagatgaggtggctgncaaaaactccccttttttgcccacagcttgcctactctcggcctagaagcagttat

SEQ ID NO: 4654 - DNA, 1010 bp, Homo sapiens
atggccgcgcagcgacccctgcgggtcctgtgcctggcgggcttccggcagagcgagcggggcttccgtgagaagaccggggcgctgaggaaggcgctgcggggtcgcgccgagctcgtgtgcctcagcggcccgcacccggtccccgaccccccgggccccgagggcgccagatcagacttcgggtcctgccctccggaggagcagcctcgaggctggtggttttcagagcaggaggccgacgttttctccgcattggaagagcccgccgtctgcaggggcctggaggaatcactggggatggtggcacaggcactgaacaggctggggccttttgacggccttcttggtttcagccaaggggctgcgctagcagcccttgtgtgtgccctgggccaggcaggcgatccccgcttccccttgccacggtttatcctcttggtgtctggtttctgtccccggggcattgggttcaaggaatccatcctgcaaaggcccttgtcattgccttcgctccatgtttttggggacactgacaaagtcatcccctctcaggagagtgtgcaactggccagccaatttcccggagccatcaccctcacccactctggtggccacttcattccagcagctgcaccccagcgtcaggcctacctcaagttcttggaccagtttgcagagtgaaagatcaagaaatgtctctgctcctacatccagctcctctaggggcagcctccgtcatccatgccctcccaggaccctccactcactgctgtgagtgcgcctcaccagaaccagttaagagacaactatcaattcttgagacccaaattataagggccctgccctgtactgaagaaaaggggagcacaaggccttaatggacattgacttgtgaaaacgcaaacatgaatatggttggagagccctggattaggagggtgacatggggaaggcagaggctggcacgatggtgactgccacataataaagtggtgatttggattttg

SEQ ID NO: 4655 - protein, 227 aa, Homo sapiens
MAAQRPLRVLCLAGFRQSERGFREKTGALRKALRGRAELVCLSGPHPVPDPPGPEGARSDFGSCPPEEQPRGWWFSEQEADVFSALEEPAVCRGLEESLGMVAQALNRLGPFDGLLGFSQGAALAALVCALGQAGDPRFPLPRFILLVSGFCPRGIGFKESILQRPLSLPSLHVFGDTDKVIPSQESVQLASQFPGAITLTHSGGHFIPAAAPQRQAYLKFLDQFAE

SEQ ID NO: 4656 - DNA, 4608 bp, Homo sapiens
gcggcgagggcgcgggggctctgaggaccgctcggcgccgcctcctgccacaccatgggcagcgcagaggacgcagtcaaagagaaactgctgtggaacgtgaagaaggaggtgaagcaaatcatggaggaggctgtcaccaggaagtttgtgcatgaagacagcagccacatcattgctttatgtggtgcagtggaggcttgcctcttgcatcagctgagacgccgtgccgctggcttcctgcgcagtgacaagatggcagccctgttcaccaaggtggggaagacgtgcccagtggcgggggagatttgccacaaggtacaggagctgcagcaacaagcagagggcaggaaaccctcaggggtcagccaggaggccctgcggagacagggctcagccagcgggaaggccccggccctcagccctcaggccttgaaacacgtatgggtacgcacggcgctcatcgagaaagttctggacaaggtcgtgcaatacctggcggaaaactgcagcaagtactacgagaaggaggcactgctggcagaccctgtgttcggcccgatcctggcctctcttctagtgggaccctgtgccttggaatacactaagctcaagacagccgatcactactggactgacccctctgctgatgagctggtccagcggcaccgcatccggggtccacctactcgccaggactcccctgcaaagcgcccagccctggggatccggaaacggcactcaagcggcagcgcgtcggaggacaggctggctgcctgtgcccgcgagtgtgtggagtccctgcaccagaactcacggacgcggctgctctatggcaagaaccacgtgctggtgcagccgaaggaggatatggaggcggtccctggctacctctccctgcaccagtctgcagagagcctgactctgaagtggacccccaaccagctcatgaatgggactctgggggactccgagctggaaaagagcgtttactgggactatgccctcgtggtgcccttcagccaggtcgtgtgcatccactgccaccagcaaaagagcggtggcacgcttgtgctggtgagccaggatggcatccagaggccgccgctgcatttcccacagggaggacacctgctgtcctttctgtcctgtctggagaatgggctgctgcctcggggacagctagagcccccgctgtggacccagcaagggaaggggaaagtgttccccaagctacggaaacgaagcagcattcgctccgtggatatggaggagatgggcacggggcgggccaccgactatgtgttccggatcatctaccccggccacaggcacgagcacaacgctggtgacatgatcgagatgcagggctttgggcccagcctgccagcctggcacctggagcccctgtgcagtcagggctcctcctgcctctcctgctcctccagcagctccccacatgcaacccccagccactgtagctgcatccccgaccggttgccgctcaggctactgtgtgagagtatgaagaggcagatcgtgtcccgggccttctacggctggctggcacactgccgccacctgtccacggtgcggacccacctgtcggcgctggtgcaccatagcgttatcccacctgaccggcccccgggggcctccgcgggcctcaccaaggacgtgtggagcaagtatcagaaggacaaaaagaactacaaagagctggagctgctgcggcaagtttactacggaggcatagagcacgagatccgcaaggacgtctggccctttctgcttggccactacaagttcggcatgagcaagaaggagatggagcaggtggacgcagtggtggcagcaaggtaccagcaggtgttggcagagtggaaggcctgcgaggtggtggtgaggcagcgggagcgggaggcccacccagccacacgcaccaagttctcctcaggcagcagcatcgacagccacgtgcagcgcctcatccaccgagactccaccatcagcaacgatgtgtttatctcagtggatgatctggaacccccggagccccaggaccctgaagattccagaccaaaacctgagcaggaagcaggacccgggactccgggcaccgccgtggtggagcagcagcattccgtggagttcgactctccagactcaggactgccctcctctcgcaattactccgtggcctcgggcatccagtcaagcctagatgaggggcagagcgtgggcttcgaagaggaggacggcggtggggaggaaggctccagtgggcccggccctgcagctcacactttgagggagccccaggatcccagccaggagaagcctcaggccggagaactggaggccggagaggagcttgcggctgtgtgtgcggctgcctacactatagaattactggacactgtggccttaaacctgcaccgcatagacaaggatgtgcagaggtgtgaccgcaactactggtacttcacgccccccaacctcgagaggctcagagacgtcatgtgcagctacgtgtgggagcacctggacgtgggctatgtgcagggcatgtgcgatctgctggcgcctctcctggtcaccctcgacaatgatcagctggcctacagctgcttcagccacctcatgaagaggatgagccagaacttccccaacgggggtgccatggacacccactttgccaacatgcgctccctcatccagatcctggactcagagctgtttgagctgatgcatcagaatggagactacacccacttctacttctgttatcgctggttcctgctggattttaagagagaactgctgtatgaggatgtgtttgctgtgtgggaggtgatctgggcagccaggcacatctcatcggagcactttgtcctgttcatcgccctcgccctggtggaggcctaccgagagatcatccgtgacaacaacatggacttcactgacatcatcaagtttttcaatgaacgtgctgagcatcacgatgcccaggagatcctgcggattgcccgggacctcgtccacaaggtgcagatgctcatagagaacaagtgagctggggccaggaggcagcagccgtgcagagcctgggctccggcagggagaggtgcaggggagtcaccgcccagacctccccagccaccaaccgaccccacctctgttcctaacaaagcggttgtgagcctggatccgactcccggcagtgctgaccctgcagggcaagtcaggggccaggatgccctcggatcagggccgggatgggaggggtcagcctcagggagcagctgccttgggggacacacctactctgctcccctctcacacatctgggagtagccccactgccacctgcagccgcagcctggactgctgcccacgagtgaacctggggccccacaggattaacaggggctatagcggcctgggccctactcagctggggtggcagagggcgagaggctctgtgctgtgtcccttctgagggtccctttgcagtcccagtatattgtgcgtgcaccagccccagctggagcaaccaaaactgcttctggtttaggcacacgtcacgggtgcgggagacccgggcacgggagacccgggccgccttcaggccgctcccccgagattctggggcagtcggaagatgtgggccctgggtgggagcagcccacttcagcagcactgccactgcctttggccacctgaggtgacccccaggcctccccggccttgtacagtgtacctctgtgtatctgtacagcctcgctcctgccaccccacccttgcgttctgcattaggtacttccctgaaaaccacgtgtaagaagtgatgcttttgccagtggatgatctggaatgcgaccggagcacttgctctgaggaatcccagggtgactctgtcggggaagaatccggtcacagcctcccctcagagacaggcctcagttcgagggcagcccattatctgtcgcagacatctgccatgtccctgagactgcgggaggcaggggatgcatgggtgtccccatctgtccctggtgagaagcaaggctagctctgccttccacatgcttctcaggatgccaagaggcctaggaacccagaaacccccttggaggagctgtgtatgcgggggtgccaggaagggcatagctcctgcccccaggcctaggcatgctgcttgctcggccatccccacttcctcctctaccccaacacatgcaggctaggccttgccctggaacatggaggccctgcccggggctggggcctagtccagcagccaccaaagtctggcagactttctgcatttgagaaacatgacaaagggccccgcagcccttctgcacccagcacagcctgcccagcccagccctgcccccgggcactgcacagcctgtctgggggccagaccaccccattgtccatccttgttgtccgtgagtccttggcctccaccaagcacgtgtggccattgtgtgcctgccttagtgactccgtggttttgtgaggagcagagtgtgtatgatttttgcctcagaaactatactcttctgtgtaacagaccaataaacaacatttgtcaac

SEQ ID NO: 4657 - protein, 1006 aa, Homo sapiens
MGSAEDAVKEKLLWNVKKEVKQIMEEAVTRKFVHEDSSHIIALCGAVEACLLHQLRRRAAGFLRSDKMAALFTKVGKTCPVAGEICHKVQELQQQAEGRKPSGVSQEALRRQGSASGKAPALSPQALKHVWVRTALIEKVLDKVVQYLAENCSKYYEKEALLADPVFGPILASLLVGPCALEYTKLKTADHYWTDPSADELVQRHRIRGPPTRQDSPAKRPALGIRKRHSSGSASEDRLAACARECVESLHQNSRTRLLYGKNHVLVQPKEDMEAVPGYLSLHQSAESLTLKWTPNQLMNGTLGDSELEKSVYWDYALVVPFSQVVCIHCHQQKSGGTLVLVSQDGIQRPPLHFPQGGHLLSFLSCLENGLLPRGQLEPPLWTQQGKGKVFPKLRKRSSIRSVDMEEMGTGRATDYVFRIIYPGHRHEHNAGDMIEMQGFGPSLPAWHLEPLCSQGSSCLSCSSSSSPHATPSHCSCIPDRLPLRLLCESMKRQIVSRAFYGWLAHCRHLSTVRTHLSALVHHSVIPPDRPPGASAGLTKDVWSKYQKDKKNYKELELLRQVYYGGIEHEIRKDVWPFLLGHYKFGMSKKEMEQVDAVVAARYQQVLAEWKACEVVVRQREREAHPATRTKFSSGSSIDSHVQRLIHRDSTISNDVFISVDDLEPPEPQDPEDSRPKPEQEAGPGTPGTAVVEQQHSVEFDSPDSGLPSSRNYSVASGIQSSLDEGQSVGFEEEDGGGEEGSSGPGPAAHTLREPQDPSQEKPQAGELEAGEELAAVCAAAYTIELLDTVALNLHRIDKDVQRCDRNYWYFTPPNLERLRDVMCSYVWEHLDVGYVQGMCDLLAPLLVTLDNDQLAYSCFSHLMKRMSQNFPNGGAMDTHFANMRSLIQILDSELFELMHQNGDYTHFYFCYRWFLLDFKRELLYEDVFAVWEVIWAARHISSEHFVLFIALALVEAYREIIRDNNMDFTDIIKFFNERAEHHDAQEILRIARDLVHKVQMLIENK

SEQ ID NO: 4658 - DNA, 2053 bp, Homo sapiens
cgccgcccagctcccagccgaggctttctcaaccgcgtcaataaaaggccgccccgacccgcccccgcgccccgcagccctgccggacaccccgggctgcagctgagcgggcgcagacgggccgaggcgggcgccgggcgcgcagggaccgagggaccgagtgctccccatgagcgcacgtgggccgggcggtccgcaagcccggctgagagcgcgccatggggcaggcgggctgcaaggggctctgcctgtcgctgttcgactacaagaccgagaagtatgtcatcgccaagaacaagaaggtgggcctgctgtaccggctgctgcaggcctccatcctggcgtacctggtcgtatgggtgttcctgataaagaagggttaccaagacgtcgacacctccctgcagagtgctgtcatcaccaaagtcaagggcgtggccttcaccaacacctcggatcttgggcagcggatctgggatgtcgccgactacgtcattccagcccagaatgaaggcattcctgatggcgcgtgctccaaggacagcgactgccacgctggggaagcggttacagctggaaacggagtgaagaccggccgctgcctgcggagagagaacttggccaggggcacctgtgagatctttgcctggtgcccgttggagacaagctccaggccggaggagccattcctgaaggaggccgaagacttcaccattttcataaagaaccacatccgtttccccaaattcaacttctccaaaagcaatgtgatggacgtcaaggacagatctttcctgaaatcatgccactttggccccaagaaccactactgccccatcttccgactgggctccgtgatccgctgggccgggagcgacttccaggatatagccctggagggtggcgtgataggaattaatattgaatggaactgtgatcttgataaagctgcctctgagtgccaccctcactattcttttagccgtctggacaataaactttcaaagtctgtctcctccgggtacaacttcagatttgccagatattaccgagacgcagccggggtggagttccgcaccctgatgaaagcctacgggatccgctttgacgtgatggtgaacggcaagggtgctttcttctgcgacctggtactcatctacctcatcaaaaagagagagttttaccgtgacaagaagtacgaggaagtgaggggcctagaagacagttcccaggaggccgaggacgaggcatcggggctggggctatctgagcagctcacatctgggccagggctgctggggatgccggagcagcaggagctgcaggagccacccgaggcgaagcgtggaagcagcagtcagaaggggaacggatctgtgtgcccacagctcctggagccccacaggagcacgtgaattgcctctgcttacgttcaggccctgtcctaaacccagccgtctagcacccagtgatcccatgcctttgggaatcccaggatgctgcccaacgggaaatttgtacattgggtgctatcaatgccacatcacagggaccagccatcacagagcaaagtgacctccacgtctgatgctggggtcatcaggacggacccatcatggctgtctttttgccccaccccctgccgtcagttcttcctttctccgtggctggcttcccgcactagggaacgggttgtaaatggggaacatgacttccttccggagtccttgagcacctcagctaaggaccgcagtgccctgtagagttcctagattacctcactgggaatagcattgtgcgtgtccggaaaagggctccatttggttccagcccactcccctctgcaagtgccacagcttccctcagagcatactctccagtggatccaagtactctctctcctaaagacaccaccttcctgccagctgtttgcccttaggccagtacacagaattaaagtgggggagatggcagacgctttctgggacctgcccaagatatgtattctctgacactcttatttggtcataaaacaataaatggtgtcaatttc

SEQ ID NO: 4659 - DNA, 553 bp, Homo sapiens
gaaccgccatcttccagtaattcgccaaaatgacgaacacaaagggaaagaggagaggcaccggatatatgttctctaggccttttagaaaacatggagatgttcctttggccacatatatgtgaatctataagaaaggtgatactgtagacatcaagggaatgggtactgttcaaaaaggaatgccccacaagggttaccatggcaaaactggaagagtctacaatgttccccagcatgctgttggcattgttgtaaacaaacaagttaagggcaagattcttgccaagagaattaatgtgcgtattgagcacataaagcactctaagagccgagatagcttcctggaacgcgtgaaggaaaatgatcagaaaaagaaagaagccaaagagaaaggtacctgggttcaactaaagcaccagcctgctccacccagggaagcacactttgtgagaaccaacgggaaggcgcctgagctgctggaacctattccctatgaattcatggcataataggtgttaaacaaaaaaaaaataaaggatctctgggctac

SEQ ID NO: 4660 - protein, 160 aa, Homo sapiens [sequence omitted]

SEQ ID NO: 4661 - DNA, 796 bp, Homo sapiens
gaaagatggcggctaccttactagctgctcggggagccgggccagcaccggcttgggggccggaggcgttcactccagactgggaaagccgagaagtttccactgggaccactatcatggccgtgcagtttgacgggggcgtggttctgggggcggactccagaacaaccactgggtcctacatcgccaatcgagtgactgacaagctgacacctattcacgaccgcattttctgctgtcgctcaggctcagctgctgatacccaggcagtagctgatgctgtcacctaccagctcggtttccacagcattgaactgaatgagcctccactggtccacacagcagccagcctctttaaggagatgtgttaccgataccgggaagacctgatggcgggaatcatcatcgcaggctgggaccctcaagaaggagggcaggtgtactcagtgcctatggggggtatgatggtaaggcagtcctttgccattggaggctccgggagctcctacatctatggctatgttgatgctacctaccgggaaggcatgaccaaggaagagtgtctgcaattcactgccaatgctctcgctttggccatggagcgggatggctccagtggaggagtgatccgcctggcagccattgcagagtcaggggtagagcggcaagtacttttgggagaccagatacccaaattcgccgttgccactttaccacccgcctgaatcctgggattctagtatgcaataagagatgccctgtactgatgcaaaatttaataaagtttgtcacagag

SEQ ID NO: 4662 - protein, 239 aa, Homo sapiens
MAATLLAARGAGPAPAWGPEAFTPDWESREVSTGTTIMAVQFDGGVVLGADSRTTTGSYIANRVTDKLTPIHDRIFCCRSGSAADTQAVADAVTYQLGFHSIELNEPPLVHTAASLFKEMCYRYREDLMAGIIIAGWDPQEGGQVYSVPMGGMMVRQSFAIGGSGSSYIYGYVDATYREGMTKEECLQFTANALALAMERDGSSGGVIRLAAIAESGVERQVLLGDQIPKFAVATLPPA

SEQ ID NO: 4663 - DNA, 3465 bp, Homo sapiens
  unsure 304: unknown base
  unsure 306: unknown base
  unsure 307: unknown base
  unsure 2390: unknown base
  unsure 3160: unknown base
  unsure 3162: unknown base
  unsure 3164: unknown base
  unsure 3165: unknown base
  unsure 3166: unknown base
gggggaagatggcggcagccgttctgagtgggccctctgcgggctccgcggctggggttcctggcgggaccgggggtctctcggcagtgagctcgggcccgcggctccgcctgctgctgctggagagtgtttctggtttgctgcaacctcgaacggggtctgccgttgctccggtgcatcccccaaaccgctcggccccacatttgcccgggctcatgtgcctattgcggctgcatgggtcggtgggcggggcccagaacctttcagctcttggggcattggtgagtctcagtaatgcacgtcntnncagttccatcaaaactcggtttgagggcctgtgtctgctgtccctgctggtaggggagagccccacagagctattccagcagcactgtgtgtcttggcttcggagcattcagcaggtgttacagacccaggacccgcctgccacaatggagctggccgtggctgtcctgagggacctcctccgatatgcagcccagctgcctgcactgttccgggacatctccatgaaccacctccctggccttctcacctccctgctgggcctcaggccagagtgtgagcagtcagcattggaaggaatgaaggcttgtatgacctatttccctcgggcttgtggttctctcaaaggcaagctggcctcattttttctgtctagggtggatgccttgagccctcagctccaacagttggcctgtgagtgttattcccggctgccctctttaggggctggcttttcccaaggcctgaagcacaccgagagctgggagcaggagctacacagtctgctggcctcactgcacaccctgctgggggccctgtacgagggagcagagactgctcctgtgcagaatgaaggccctggggtggagatgctgctgtcctcagaagatggtgatgcccatgtccttctccagcttcggcagaggttttcgggactggcccgctgcctagggctcatgctcagctctgagtttggagctcccgtgtccgtccctgtgcaggaaatcctggatttcatctgccggaccctcagcgtcagtagcaagaatattagcttgcatggagatggtcccctgcggctgctgctgctgccctctatccaccttgaggccttggacctgctgtctgcactcatcctcgcgtgtggaagccggctcttgcgctttgggatcctgatcggccgcctgcttccccaggtcctcaattcctggagcatcggtagagattccctctctccaggccaggagaggccttacagcacggttcggaccaaggtgtatgcgatattagagctgtgggtgcaggtttgtggggcctcggcgggaatgcttcagggaggagcctctggagaggccctgctcacccacctgctcagcgacatctccccgccagctgatgcccttaagctgcgtagcccgcgggggagccctgatgggagtttgcagactgggaagcctagcgcccccaagaagctaaagctggatgtgggggaagctatggccccgccaagccaccggaaaggggatagcaatgccaacagcgacgtgtgtgcggctgcactcagaggcctcagccggaccatcctcatgtgtgggcctctcatcaaggaggagactcacaggagactgcatgacctggtcctccccctggtcatgggtgtacagcagggtgaggtcctaggcagctccccgtacacgagctcccgctgccgccgtgaactctactgcctgctgctggcgctgctgctggccccgtctcctcgctgcccacctcctcttgcctgtgccctgcaagccttctccctcggccagcgagaagatagccttgaggtctcctctttctgctcagaagcactggtgacctgtgctgctctgacccacccccgggttcctcccctgcagcccatgggccccacctgccccacacctgctccagttccccctcctgaggccccatcgcccttcagggccccaccgttccatcctccgggccccatgccctcagtgggctccatgccctcagcaggccccatgccttcagcaggccccatgccctcagcaggccctgtgccctcggcacgccctggacctcccaccacagccaaccacctaggcctttctgtcccaggcctagtgtctgtccctccccggcttcttcctggccctgagaaccaccgggcaggctcaaatgaggaccccatccttgcccctagtgggactcccccacctactatacccccagatgaaacttttggggggagagtgcccagaccagcctttgtccactatgacaaggaggaggcatctgatgtggagatctccttggaaagtgactctgatgacagcgtggtgatcgtgcccganggggcttcccccccctgccacccccaccaccctcaggtgccacaccaccccctatagcccccactgggccaccaacagcctcccctcctgtgccagcgaaggaggagcctgaagaacttcctgcagccccagggcctctcccgccacccccacctccgccgccgcctgttcctggtcctgtgacgctccctccaccccagttggtccctgaagggactcctggtgggggaggacccccagccctggaagaggatttgacagttattaatatcaacagcagtgatgaagaggaggaggaagaggaagaagaggaagaagaagaagaggaagaagaggaagaggaggaagactttgaggaagaggaagaggatgaagaggaatattttgaagaggaagaagaggaggaagaagagtttgaggaagaatttgaggaagaagaaggtgagttagaggaagaagaagaagaggaggatgaggaggaggaagaagaactggaagaggtggaagacctggagtttggcacagcaggaggggaggtagaagaaggtgcacctccacccccaaccctgcctccagctctgcctccccctgagtctcccccaaaggtgcagccagaacccgaacctgaacccgggctgcttttggaagtggaggagccagggacggaggaggagcgtggggctgacacagctcccaccctggcccctgaagcgctcccctcccagggagaggtggagagggaaggggaaagccctgcggcagggcccccntncnnncccaggagcttgttgaagaagagccctctgctcccccaaccctgttggaagaggagactgaggatgggagtgacaaggtgcagcccccaccagagacacctgcagaagaagagatggagacagagacagaggccgaagctctccaggaaaaggagcaggatgacacagctgccatgctggccgacttcatcgattgtccccctgatgatgagaagccaccacctcccacagagcctgactcctagccatcttctgcaccccactctttgtttccaataaagttatgtccttagatagcg

SEQ ID NO: 4664 - protein, 1130 aa, Homo sapiens
MAAAVLSGPSAGSAAGVPGGTGGLSAVSSGPRLRLLLLESVSGLLQPRTGSAVAPVHPPNRSAPHLPGLMCLLRLHGSVGGAQNLSALGALVSLSNARLSSIKTRFEGLCLLSLLVGESPTELFQQHCVSWLRSIQQVLQTQDPPATMELAVAVLRDLLRYAAQLPALFRDISMNHLPGLLTSLLGLRPECEQSALEGMKACMTYFPRACGSLKGKLASFFLSRVDALSPQLQQLACECYSRLPSLGAGFSQGLKHTESWEQELHSLLASLHTLLGALYEGAETAPVQNEGPGVEMLLSSEDGDAHVLLQLRQRFSGLARCLGLMLSSEFGAPVSVPVQEILDFICRTLSVSSKNISLHGDGPLRLLLLPSIHLEALDLLSALILACGSRLLRFGILIGRLLPQVLNSWSIGRDSLSPGQERPYSTVRTKVYAILELWVQVCGASAGMLQGGASGEALLTHLLSDISPPADALKLRSPRGSPDGSLQTGKPSAPKKLKLDVGEAMAPPSHRKGDSNANSDVCAAALRGLSRTILMCGPLIKEETHRRLHDLVLPLVMGVQQGEVLGSSPYTSSRCRRELYCLLLALLLAPSPRCPPPLACALQAFSLGQREDSLEVSSFCSEALVTCAALTHPRVPPLQPMGPTCPTPAPVPPPEAPSPFRAPPFHPPGPMPSVGSMPSAGPMPSAGPMPSAGPVPSARPGPPTTANHLGLSVPGLVSVPPRLLPGPENHRAGSNEDPILAPSGTPPPTIPPDETFGGRVPRPAFVHYDKEEASDVEISLESDSDDSVVIVPEGLPPLPPPPPSGATPPPIAPTGPPTASPPVPAKEEPEELPAAPGPLPPPPPPPPPVPGPVTLPPPQLVPEGTPGGGGPPALEEDLTVININSSDEEEEEEEEEEEEEEEEEEEEEDFEEEEEDEEEYFEEEEEEEEEFEEEFEEEEGELEEEEEEEDEEEEEELEEVEDLEFGTAGGEVEEGAPPPPTLPPALPPPESPPKVQPEPEPEPGLLLEVEEPGTEEERGADTAPTLAPEALPSQGEVEREGESPAAGPPPQELVEEEPSAPPTLLEEETEDGSDKVQPPPETPAEEEMETETEAEALQEKEQDDTAAMLADFIDCPPDDEKPPPPTEPDS

SEQ ID NO: 4665 - DNA, 847 bp, Homo sapiens
acagcgagcggagccgcggtccggacggcagcgcgtgccccgagctctccgcctccccccgcccgccagccgaggcagctcgagcccagtccgcggccccagcagcagcgccgagagcagccccagtagcagcgccatggccgggtggaacgcctacatcgacaacctcatggcggacgggacctgtcaggacgcggccatcgtgggctacaaggactcgccctccgtctgggccgccgtccccgggaaaacgttcgtcaacatcacgccagctgaggtgggtgtcctggttggcaaagaccggtcaagtttttacgtgaatgggctgacacttgggggccagaaatgttcggtgatccgggactcactgctgcaggatggggaatttagcatggatcttcgtaccaagagcaccggtggggcccccaccttcaatgtcactgtcaccaagactgacaagacgctagtcctgctgatgggcaaagaaggtgtccacggtggtttgatcaacaagaaatgttatgaaatggcctcccaccttcggcgttcccagtactgacctcgtctgtcccttccccttcaccgctccccacagctttgcacccctttcctccccatacacacacaaaccattttattttttgggccattaccccataccccttattgctgccaaaaccacatgggctgggggccagggctggatggacagacacctccccctacccatatccctcccgtgtgtggttggaaaacttttgttttttggggttttttttttctgaataaaaaagattctactaacaaaaaaaaaaaaaaaaaaaaaaaaaaaaaaaaaaaaaaaaaa

SEQ ID NO: 4666 - protein, 140 aa, Homo sapiens
MAGWNAYIDNLMADGTCQDAAIVGYKDSPSVWAAVPGKTFVNITPAEVGVLVGKDRSSFYVNGLTLGGQKCSVIRDSLLQDGEFSMDLRTKSTGGAPTFNVTVTKTDKTLVLLMGKEGVHGGLINKKCYEMASHLRRSQY

SEQ ID NO: 4667 - DNA, 4489 bp, Homo sapiens
ggggggtcggtgtggggtagaatggccgctgccgccgtcacccgcgggaccccgggagcacagactccccctccccccggcccctcaggccgggggtgaccttgccccctggagccctcaccatgaataccaaggacaccaccgaggttgctgaaaacagccaccacctgaagatctttctccccaagaagctgctggagtgtcttcctcgctgcccgctgctgcctccagagaggctacggtggaatacaaatgaggagattgcatcctacctgatcacctttgagaagcatgatgagtggctgtcttgtgccccaaagacaaggcctcagaatggctccatcatcctctacaatcgcaagaaggtgaaatatcggaaggatggttacctctggaagaagcggaaggatgggaagaccacccgagaggaccacatgaagctgaaggtccagggcatggagtgtctctatggctgctacgttcactcttccatcgtccccacattccatcggcgctgctactggctgctccagaaccctgacatcgtccttgtgcactacctgaacgtcccagccctggaggactgtggaaagggctgcagccccatcttttgttccatcagcagcgaccgtcgagagtggctgaagtggtcccgggaggagttgttgggacagctgaagcccatgtttcatggcatcaagtggagctgcgggaatggaacagaagagttctctgtagaacacctggtgcagcagattttggacacccacccaaccaagcctgctccccgaacccacgcctgtctctgcagtggggggcttggttctgggagccttacccacaaatgcagcagcacgaaacaccgcatcatctctcccaaagtggagccccgagctttaaccctgacctctatcccccacgctcaccccccagagcctcctccactgatagccccacttcccccagagctccccaaggcacacacctccccatcttcttcctcttcttcctcctcatcaggttttgcagagcccctagaaatcagacctagccctcccacttctcgagggggttcttcaagaggaggcactgctatcctcctcctgacaggactggagcagcgggctggaggcttgacgcccaccaggcacttggctccacaggctgatcctaggccttccatgagtttggcagtggttgtaggcactgagccttctgccccaccagctcctcccagtcctgcctttgaccctgatcgttttctcaacagcccccagaggggccagacatatggaggggggcagggagtaagcccagacttccccgaggcagaggccgctcataccccctgttctgccctagagcctgctgctgccctggagccccaggcagctgctcggggtcccccaccacagtcagtagcaggtgggagaagaggaaactgcttcttcatccaagatgatgacagtggggaggagctcaagggtcacggggctgccccacccataccttcaccccctccctcacccccaccctcacctgcccccttggagccgtcaagcagggtaggaagaggagaggccttgtttggaggacctgttggggccagtgaactggagcccttcagtctttcatcattcccagaccttatgggagaactcatcagtgacgaagctccaagcatccctgctccgaccccccagctgtctcctgctcttagcaccatcacagacttctccccagagtggtcctacccagagggtggggtcaaggtgctcatcacaggtccttggaccgaagccgccgagcattactcctgtgtctttgatcacatcgcagtgccagcctcacttgtccagcctggtgtcttacgctgctactgtcccgcccatgaggtagggctggtgtctttgcaggtggcagggcgggaggggcccctttctgcttctgtgctctttgagtatcgagcccgccgattcctgtctctgcctagtactcaacttgactggctgtcactggacgacaaccagttccggatgtccatactagagcgactggagcagatggagaagcggatggcagagatcgcagcagctgggcaggtgccttgccagggtcctgatgctcctccagttcaggatgaaggccaggggcctgggttcgaagcacgggtagtggtcttggtagaaagcatgatcccacgctccacctggaagggtcctgaacgtctggcccatggaagccccttccggggcatgagccttctgcacctggctgctgcccagggctatgcccgcctcatcgagaccctgagccagtggcggagtgtggagactggaagcttggacttagagcaggaggttgacccgctcaacgtggatcatttctcttgcacccctctgatgtgggcttgtgccctgggacacctggaagctgctgtgctccttttccgttggaaccgacaggcactgagcattcccgactctctgggccgtctgccattgtctgtggctcattcccggggtcatgtgcgccttgcccgctgccttgaggaactacagagacaggagccttcggtggagcccccatttgccctatcgccaccctcctccagcccagacactggtctgagcagcgtctcctcgccctcggagctgtcggatggcaccttttccgtcacgtcagcctattctagtgccccagatggcagtcccccccctgcacctctgccagcctctgagatgactatggaggacatggccccaggccagctttcctctggtgtcccagaagcccccctactcctcatggactatgaggctaccaactccaaggggcccctctcctcccttcctgccctcccaccagcttcagatgatggggctgctccagaggacgctgacagcccacaggctgtggatgtgatcccggtggacatgatctcactagccaagcagatcatcgaagccacaccggagcggattaaacgagaggacttcgtggggctgcccgaggctggagcctcaatgcgggagcggacaggggctgtggggctcagtgagaccatgtcctggctggccagctacctggagaatgtggaccatttccccagctcaacccctcccagcgaactgccctttgagcgaggtcgcctggctgtcccttcagcaccctcctgggcagagtttctctctgcatccaccagtggcaagatggaaagtgattttgccctgctgacactatcagatcacgagcagcgggaactgtatgaggctgcccgagtcatccagacggccttccgaaagtacaagggccggcggctgaaggagcagcaggaggtagcagcagctgtaatccagcgctgttaccggaagtacaagcagctgacctggattgcacttaagtttgcactctataagaagatgacccaggcggccatcctgatccagagcaagttccgaagctactatgaacagaagcgatttcagcagagccgccgagcggctgtgctcatccagcagcactaccgctcctaccgccgcaggcccggccctccccaccggacttcggccaccctgcctgcccgcaacaaaggctcctttctcaccaagaagcaggaccaggcagcccggaagatcatgagattcctgcggcgctgccgacacaggatgagggaactgaagcagaaccaggagctggaagggcttccccagccgggactggccacatgacctggccaccgcctttctcaccaccctgggggcgcctcgtgcagtcttaacagggagagggctttctggggcagggggagcccctgtcggcagctttcctgttcacctttgttggagccctctgtaggcctcctccctcctccccacgccttgctcccacacccctctcctcgtccctcctggtcgtgccccgtctcttttggtcctggctccagaaaacccgcgccccacatacctgcatcttccgctgtgacctccggagccctgcctgcccctgctccccagctcctcctgcctgcacccgactcggccccctcctgacttgccttatttatttgttcgacgcgtctctgaatgtatccgcctcggttcccaccactgccttcgctgcgcacgcccctcgtgtttcagggctgaccgtgtccccacccgactccgcatgtttgcgtctgtttcctccctctctggccctgtcttaccccatcacccgactctggccactgacctcagggccgaaggggaggtggtgtacataggaacgcgttgcggagtccgccccgtcccccgaggggaggggtcttgtacatactgtaacatacagagtatagtgaagaatctatttaaggcgccgcggggagggctgcacggccgggcttgtggttctctagcgcggcgggggcctcctgccggctccacgggcactttctacttgtgcatgggcttggtttatacgaattgccattaaacatcgctgcacc

SEQ ID NO: 4668 - protein, 1202 aa, Homo sapiens
MNTKDTTEVAENSHHLKIFLPKKLLECLPRCPLLPPERLRWNTNEEIASYLITFEKHDEWLSCAPKTRPQNGSIILYNRKKVKYRKDGYLWKKRKDGKTTREDHMKLKVQGMECLYGCYVHSSIVPTFHRRCYWLLQNPDIVLVHYLNVPALEDCGKGCSPIFCSISSDRREWLKWSREELLGQLKPMFHGIKWSCGNGTEEFSVEHLVQQILDTHPTKPAPRTHACLCSGGLGSGSLTHKCSSTKHRIISPKVEPRALTLTSIPHAHPPEPPPLIAPLPPELPKAHTSPSSSSSSSSSGFAEPLEIRPSPPTSRGGSSRGGTAILLLTGLEQRAGGLTPTRHLAPQADPRPSMSLAVVVGTEPSAPPAPPSPAFDPDRFLNSPQRGQTYGGGQGVSPDFPEAEAAHTPCSALEPAAALEPQAAARGPPPQSVAGGRRGNCFFIQDDDSGEELKGHGAAPPIPSPPPSPPPSPAPLEPSSRVGRGEALFGGPVGASELEPFSLSSFPDLMGELISDEAPSIPAPTPQLSPALSTITDFSPEWSYPEGGVKVLITGPWTEAAEHYSCVFDHIAVPASLVQPGVLRCYCPAHEVGLVSLQVAGREGPLSASVLFEYRARRFLSLPSTQLDWLSLDDNQFRMSILERLEQMEKRMAEIAAAGQVPCQGPDAPPVQDEGQGPGFEARVVVLVESMIPRSTWKGPERLAHGSPFRGMSLLHLAAAQGYARLIETLSQWRSVETGSLDLEQEVDPLNVDHFSCTPLMWACALGHLEAAVLLFRWNRQALSIPDSLGRLPLSVAHSRGHVRLARCLEELQRQEPSVEPPFALSPPSSSPDTGLSSVSSPSELSDGTFSVTSAYSSAPDGSPPPAPLPASEMTMEDMAPGQLSSGVPEAPLLLMDYEATNSKGPLSSLPALPPASDDGAAPEDADSPQAVDVIPVDMISLAKQIIEATPERIKREDFVGLPEAGASMRERTGAVGLSETMSWLASYLENVDHFPSSTPPSELPFERGRLAVPSAPSWAEFLSASTSGKMESDFALLTLSDHEQRELYEAARVIQTAFRKYKGRRLKEQQEVAAAVIQRCYRKYKQLTWIALKFALYKKMTQAAILIQSKFRSYYEQKRFQQSRRAAVLIQQHYRSYRRRPGPPHRTSATLPARNKGSFLTKKQDQAARKIMRFLRRCRHRMRELKQNQELEGLPQPGLAT

SEQ ID NO: 4669 - DNA, 2219 bp, Homo sapiens
aggacgtgggcgtgcaggacgcgggcgtgcaggacgccagagctgggtcagagctcgagccagcggcgcccggagagattcggagatgcaggcggctcggatggccgcgagcttggggcggcagctgctgaggctcgggggcggaagctcgcggctcacggcgctcctggggcagccccggcccggccctgcccggcggccctatgccgggggtgccgctcagctggctctggacaagtcagattcccacccctctgacgctctgaccaggaaaaaaccggccaaggcggaatctaagtcctttgctgtgggaatgttcaaaggccagctcaccacagatcaggtgttcccatacccgtccgtgctcaacgaagagcagacacagtttcttaaagagctggtggagcctgtgtcccgtttcttcgaggaagtgaacgatcccgccaagaatgacgctctggagatggtggaggagaccacttggcagggcctcaaggagctgggggcctttggtctgcaagtgcccagtgagctgggtggtgtgggcctttgcaacacccagtacgcccgtttggtggagatcgtgggcatgcatgaccttggcgtgggcattaccctgggggcccatcagagcatcggtttcaaaggcatcctgctctttggcacaaaggcccagaaagaaaaatacctccccaagctggcatctggggagactgtggccgctttctgtctaaccgagccctcaagcgggtcagatgcagcctccatccgaacctctgctgtgcccagcccctgtggaaaatactataccctcaatggaagcaagctttggatcagtaatgggggcctagcagacatcttcacggtctttgccaagacaccagttacagatccagccacaggagccgtgaaggagaagatcacagcttttgtggtggagaggggcttcgggggcattacccatgggccccctgagaagaagatgggcatcaaggcttcaaacacagcagaggtgttctttgatggagtacgggtgccatcggagaacgtgctgggtgaggttgggagtggcttcaaggttgccatgcacatcctcaacaatggaaggtttggcatggctgcggccctggcaggtaccatgagaggcatcattgctaaggcggtagatcatgccactaatcgtacccagtttggggagaaaattcacaactttgggctgatccaggagaagctggcacggatggttatgctgcagtatgtaactgagtccatggcttacatggtgagtgctaacatggaccagggagccacggacttccagatagaggccgccatcagcaaaatctttggctcggaggcagcctggaaggtgacagatgaatgcatccaaatcatggggggtatgggcttcatgaaggaacctggagtagagcgtgtgctccgagatcttcgcatcttccggatctttgaggggacaaatgacattcttcggctgtttgtggctctgcagggctgtatggacaaaggaaaggagctctctgggcttggcagtgctctaaagaatccctttgggaatgctggcctcctgctaggagaggcaggcaaacagctgaggcggcgggcagggctgggcagcggcctgagtctcagcggacttgtccacccggagttgagtcggagtggcgagctggcagtacgggctctggagcagtttgccactgtggtggaggccaagctgataaaacacaagaaggggattgtcaatgaacagtttctgctgcagcggctggcagacggggccatcgacctctatgccatggtggtggttctctcgagggcctcaagatccctgagtgagggccaccccacggcccagcatgagaaaatgctctgtgacacctggtgtatcgaggctgcagctcggatccgagagggcatggccgccctgcagtctgacccctggcagcaagagctctaccgcaacttcaaaagcatctccaaggccttggtggagcggggtggtgtggtcaccagcaacccacttggcttctgaatactcccggccagggcctgtcccagttatgtgccttccctcaagccaaagccgaagcccctttccttaaggccctggtttgtcccgaaggggcctagtgttcccagcactgtgcctgctctcaagagcacttactgcctcgcaaataataaaaatttctagccag

SEQ ID NO: 4670 - protein, 655 aa, Homo sapiens
MQAARMAASLGRQLLRLGGGSSRLTALLGQPRPGPARRPYAGGAAQLALDKSDSHPSDALTRKKPAKAESKSFAVGMFKGQLTTDQVFPYPSVLNEEQTQFLKELVEPVSRFFEEVNDPAKNDALEMVEETTWQGLKELGAFGLQVPSELGGVGLCNTQYARLVEIVGMHDLGVGITLGAHQSIGFKGILLFGTKAQKEKYLPKLASGETVAAFCLTEPSSGSDAASIRTSAVPSPCGKYYTLNGSKLWISNGGLADIFTVFAKTPVTDPATGAVKEKITAFVVERGFGGITHGPPEKKMGIKASNTAEVFFDGVRVPSENVLGEVGSGFKVAMHILNNGRFGMAAALAGTMRGIIAKAVDHATNRTQFGEKIHNFGLIQEKLARMVMLQYVTESMAYMVSANMDQGATDFQIEAAISKIFGSEAAWKVTDECIQIMGGMGFMKEPGVERVLRDLRIFRIFEGTNDILRLFVALQGCMDKGKELSGLGSALKNPFGNAGLLLGEAGKQLRRRAGLGSGLSLSGLVHPELSRSGELAVRALEQFATVVEAKLIKHKKGIVNEQFLLQRLADGAIDLYAMVVVLSRASRSLSEGHPTAQHEKMLCDTWCIEAAARIREGMAALQSDPWQQELYRNFKSISKALVERGGVVTSNPLGF

SEQ ID NO: 4671 - DNA, 2504 bp, Homo sapiens
gagaccatggcgggtagcagcactgggggcggtggggttggggagacgaaggtgatttaccacctggatgaggaagagactccctacctggtgaagatccctgtccccgccgagcgcatcaccctcggcgatttcaagagcgtcctgcagcggcccgcgggcgccaagtactttttcaagtctatggatcaggatttcggggtggtgaaggaagaaatttcagatgacaacgcccgcctcccctgcttcaacggaagggtggtatcctggctggtgtcctcagataatccccaacccgagatggcccctccagtccatgagcctcgggcagaactggcgcctccagccccacctttacctcctttgccacccgagaggaccagcggcattggggactcaaggcctccatccttccaccctaatgtgtccagcagccatgagaatctggagcctgagacagaaaccgagtcagtagtgtcactgaggcgggagcggcctcgcaggagagacagcagtgagcatggcgctgggggccacaggactggtggcccctcaaggctggagcgccacctggccggatacgagagctcctctaccctcatgaccagcgagctggagagtaccagcctgggggactcggacgaggaggacaccatgagcaggttcagcagctccacggagcagagcagtgcctcccgcctccttaagcgccaccggcggcgaaggaagcagaggccaccccgcctggagaggacgtcatccttcagcagcgtcacagattccacaatgtctctcaatatcatcacagtcacgctaaacatggagaagtacaacttcctgggtatctccattgttggccagagcaatgagcggggagacggaggcatctacattggctccatcatgaagggtggggctgtggcggccgacgggcgcattgagccaggggacatgcttttgcaggtgaatgacatgaactttgagaacatgagcaacgatgacgctgtgcgggtgctgagggacattgtgcacaagcctggccccattgtgctgactgtggccaagtgctgggatccctctcctcaggcctatttcactctcccccgaaatgagcccatccagccaattgaccctgctgcctgggtgtcccattccgcggctctgactggcaccttcccagcctatccaggttcctcctccatgagcaccattacatctggatcgtctttgcctgatggctgtgaaggccggggtctctccgtccatacggacatggcatcggtgaccaaggccatggcagctccagagtctggactggaagtccgggaccgcatgtggctcaagatcaccatccctaatgcctttctgggctcggatgtggttgactggctctaccatcacgtggagggctttcctgagcggcgggaggcccgcaagtatgccagcgggctgctcaaagcaggcctgatccgacacaccgtcaacaagatcaccttctctgagcagtgctattacgtcttcggagacctcagtggtggctgtgagagctacctagtcaacctgtctctcaatgacaacgatggctccagtggggcttcagaccaggataccctggctcctctgcctggggccaccccctggcccctgctgcccactttctcctaccagtaccctgccccacacccctacagcccgcagcctccaccctaccatgagctttcatcttacacctatggtgggggcagtgccagcagccagcatagtgagggcagccggagcagtgggtcgacacggagtgatgggggggcagggcgcacggggaggcccgaggagcgggcccccgagtccaagtccggcagtggcagtgagtctgagccctccagccgagggggcagccttcggcggggtggggaagcaagtgggactagcgatgggggccctcctccatccagaggctcaactgggggtgcccctaatctccgagcccacccagggctccatccctatggaccgccccctggcatggccctcccctacaaccccatgatggtggtcatgatgcccccacctccacctccagtccctccagcagtgcagcctccgggggcccctccagtcagagacctgggctctgtgcccccagaactgacagccagccgccaaagcttccacatggccatgggcaatcccagcgagttctttgtggatgttatgtagcccactgtggggccaggctgggccgggcgctcctggtgtgtgactgggtgtcctggccgtcatgtgcttgctcttacagtgcctgggctcagcctaccagctgctgccatacaggagattgtggccactgtgactctcaccagcagtgcctggttcctcccccttccctcaggggtagacaagggacctttgattatttttagctttgtttttttataagcctttttgggggttaaaatagagtttcttacatttttgggacttttttaataggcatttcctctttt

SEQ ID NO: 4672 - DNA, 2005 bp, Homo sapiens
aaaaaaaaaaaagagggaggtggcggcagcggctagcggactcgagtctcaaccgggctgaggcggacacttctgtggagcgaagcagtgggagcatcgagcactagaggcggcaccgggatccccggctccggggaggggggcgccggaccgggaggaggggagggggcgatgctggaagccatggcggagcccagtcccgaagatccacctccgacccttaagccagagactcagccaccagagaaacggcggagaacaattgaggatttcaacaaattctgcagttttgttttggcatatgctggttacattccccctagcaaagaggaaagtgactggccagcctctggctccagctctccattgcgaggagagagtgcggccgacagtgatggctgggactcggccccctcagatcttcgaaccatccagacttttgttaagaaagcaaagtcatccaagagaagggcagctcaagcaggtcccacccagccaggacccccaaggtccactttctctcgtctgcaggcccccgacagtgctaccttgcttgagaagatgaagctcaaggactctctctttgatctggatgggcccaaagtggcatctcctttgtcccccacatccctgacacatacctcccggccccctgctgctcttacccccgtgcccctttcccagggggacctctcccatcctcctcgaaagaaggaccgaaagaaccgaaagttggggccaggagctggggctggctttggggtgcttcggaggcctcggccaactcctggggatggggaaaagagatctcgaatcaagaagagcaagaagcggaagttaaaaaaggcagaacggggggatagactcccacctcctgggcctccccaggcacccccagtgatacagactctgaagaggaggaggaagaggaggaagaggaagaagaagaagagatggcaacagtggtagggggtgaagccccagtccctgtgctgccaacaccccctgaggctcctaggccccctgccacagtgcaccctgaaggagtccctcctgctgacagtgaaagcaaggaggtgggcagcactgaaacaagccaagatggagatgccagctccagtgaaggcgagatgcgggtcatggacgaggacatcatggtagaatcaggtgatgactcatgggatctgatcacatgttactgtcgaaagccctttgcagggcggcccatgattgagtgcagcctgtgtgggacgtggatccacctctcctgtgctaagattaagaagaccaacgtccccgacttcttttattgccagaaatgcaaggaactgaggccagatgcccggcggttaggggggccccccaaatctggagagccctgatggcaccaactttagcctggaacttccaaatgacaacatgatttgggaactgagcctcagggtcctcagcctatcccctggagcttggatactgtctgcacttcaaggcaggaattctcaagggagacttgtttgaaaatgagtgtctcactttcccaccctatccttcctccccactctgtggacttgaaattgaatccattacggttggggatgggaggctgtctgtgtcccgacacataatctctgtctcttggacctgccaccatcactttctgggtcaggattggaattgggatggaatgggacagttgtctataaaactctagtgtaaatattagcactcccctccctcatcttttcttctatttcactccccatttattttcttctacaccggttgtatttttaattttggacttcccctattgggcatggcagctcaaaggtggagtactagagcctggccaagtgaggaaggaaagcagaaaggtgacgattctcactcacctcttttgtttttaataatatcggccgctgtttgtacagacagcctgcgtgttgtaaataaagcagggtgggctctttaaaaaaaaaaaaaaaaaaaaaaaaaaaaaaaaaaa

SEQ ID NO: 4673 - protein, 265 aa, Homo sapiens
MLEAMAEPSPEDPPPTLKPETQPPEKRRRTIEDFNKFCSFVLAYAGYIPPSKEESDWPASGSSSPLRGESAADSDGWDSAPSDLRTIQTFVKKAKSSKRRAAQAGPTQPGPPRSTFSRLQAPDSATLLEKMKLKDSLFDLDGPKVASPLSPTSLTHTSRPPAALTPVPLSQGDLSHPPRKKDRKNRKLGPGAGAGFGVLRRPRPTPGDGEKRSRIKKSKKRKLKKAERGDRLPPPGPPQAPPVIQTLKRRRKRRKRKKKKRWQQW

SEQ ID NO: 4674 - DNA, 891 bp, Homo sapiens
gctccgctgaatccgcccgcgcgtcgccgccgtcgtcgccgccccccgtcccggcccccctgggttccctcagcccagccctgtccagcccggttcccgggaggatgaagttcgtgtacaaagaagagcatccgttcgagaagcgccgctctgagggcgagaagatccgaaagaaatacccggaccgggtgccggtgatagtagaaaaggctcccaaagctcggataggagacctggacaaaaagaaatacctggtgccttctgatctcacagttggtcagttctacttcttgatccggaagcgaattcatctccgagctgaggatgccttgtttttctttgtcaacaatgtcattccacccaccagtgccacaatgggtcagctgtaccaggaacaccatgaagaagacttctttctctacattgcctacagtgacgaaagtgtctacggtctgtgaagctgctgcccctgagctggaggggggtctcattctacaaagagagaggtggcccccctttcttgacctcctcctccttcaagctcaaacaccacctcccttattcaggaccggcacttcttaatgtttgtggctttctctccagcctctcttaggaggggtaatggtggagttggcatcttgtaactctcctttctcctttcttcccctttctctgcccgcctttcccatcctgctgtagacttcttgattgtcagtctgtgtcacatccagtgattgttttggtttctgttccctttctgactgcccaaggggctcagaaccccagcaatcccttcctttcactaccttcttttttgggggtagttggaagggactgaaattgtggggggaaggtaggaggcacatcaataaagaggaaaccaccaagctg

SEQ ID NO: 4675 - DNA, 1163 bp, Homo sapiens
ccggcggcgcctcaggtcgcggggcgcctaggcctgggttgtcctttgcatctgcacgtgttcgcagtcgtttccgcgatgctgcctctgctgcgctgcgtgccccgtgtgctgggctcctccgtcgccggcctccgcgctgccgcgcccgcctcgcctttccggcagctcctgcagccggcaccccggctgtgcacccggcccttcgggctgctcagcgtgcgcgcaggttccgagcggcggccgggcctcctgcggcctcgcggaccctgcgcctgtggctgtggctgcggctcgctgcacaccgacggagacaaagcttttgttgatttcctgagtgatgaaattaaggaggaaagaaaaattcagaagcataaaaccctccctaagatgtctggaggttgggagctggaactgaatgggacagaagcgaaattagtgcggaaagttgccggggaaaaaatcacggtcactttcaacattaacaacagcatcccaccaacatttgatggtgaggaggaaccctcgcaagggcagaaggttgaagaacaggagcctgaactgacatcaactcccaatttcgtggttgaagttataaagaatgatgatggcaagaaggcccttgtgttggactgtcattatccagaggatgaggttggacaagaagacgaggctgagagtgacatcttctctatcagggaagttagctttcagtccactggcgagtctgaatggaaggatactaattatacactcaacacagattccttggactgggccttatatgaccacctaatggatttccttgccgaccgaggggtggacaacacttttgcagatgagctggtggagctcagcacagccctggagcaccaggagtacattacttttcttgaagacctcaagagttttgtcaagagccagtagagcagacagatgctgaaagccatagtttcatggcaggctttggccagtgaacaaatcctactctgaagctagacatgtgctttgaaatgattatcatcctaatatcatgggggaaaaaataccaaatttaaattatatgttttgtgttctcatttattatcatttttttctgtacaaatctattatttctagatttttgtataacatgatagacataaaattggtttatctcctcc

SEQ ID NO: 4676 - protein, 282 aa, Homo sapiens
MLPLLRCVPRVLGSSVAGLRAAAPASPFRQLLQPAPRLCTRPFGLLSVRAGSERRPGLLRPRGPCACGCGCGSLHTDGDKAFVDFLSDEIKEERKIQKHKTLPKMSGGWELELNGTEAKLVRKVAGEKITVTFNINNSIPPTFDGEEEPSQGQKVEEQEPELTSTPNFVVEVIKNDDGKKALVLDCHYPEDEVGQEDEAESDIFSIREVSFQSTGESEWKDTNYTLNTDSLDWALYDHLMDFLADRGVDNTFADELVELSTALEHQEYITFLEDLKSFVKSQ

SEQ ID NO: 4677 - DNA, 1084 bp, Homo sapiens
cccgttccctggaggcgcgcacagacccctgggaggtgtactttccgggtgcagaccgcgaatggatcgcagcgtattctgggaagtgttgttttatcgaccggccccacgtggagacagatttaggcatccaagcgaaatgcgtgaggccagcccgacctgcactgagggaggtaagtcttgagggaaagttctggatgcctgggtttacccagatggaggtgtccaataggcaattagatacacaagtctcaggctctccccaggtgctagatttccagcagcaccaccattatgttgacttctcgtcccgcccccttgggcttcagaaataatggtgattggctttcccttggtgacgcccctgcttggtgggctggcctcgccttcgccccccgacctggcacgagcctctcgagcttccgggccgtctgctcggtgattggccgaaacagtgagtggacggccgcggattggctgtgctcagcggcgggctgagcaactggagtgaggggagcagttgggccaagatggcggccgccgagggaccggtgggcgacggcgagctgtggcagacctggcttcctaaccacgtcgtgttcttgcggctccgggagggactgaaaaaccagagtccaaccgaagctgagaaaccagcttcttcgtcgttgccttcgtcgccgccgccgcagttgctgacgagaaacgtggtctttggcctcggcggagagcttttcctgtgggacggagaagacagctccttcttagtcgttcgccttcggggccccagcggcggcggcgaagagcccgccctgtcccagtaccagatggagtttcgctcttgttgcccaggctggagtgcaatggcgccatctcggctcaccgcaacctccaccttccagtttcaagcgattcttctgcctcagccccccccgcgagtagctgggattacagagattgctttgcataaatccacccctgtttgaaatctatcaagtcttgttaagcccaacacaacatcatgtagcacttataggaataaaaggacttatggtattagaattacctaaaagatgggggaaga

SEQ ID NO: 4678 - DNA, 2346 bp, Homo sapiens
gagcagttgggccaagatggcggccgccgagggaccggtgggcgacggcgagctgtggcagacctggcttcctaaccacgtcgtgttcttgcggctccgggagggactgaaaaaccagagtccaaccgaagctgagaaaccagcttcttcgtcgttgccttcgtcgccgccgccgcagttgctgacgagaaacgtggtctttggcctcggcggagagcttttcctgtgggacggagaagacagctccttcttagtcgttcgccttcggggccccagcggcggcggcgaagagcccgccctgtcccagtaccagagattgctttgcataaatccacccctgtttgaaatctatcaagtcttgttaagcccaacacaacatcatgtagcacttataggaataaaaggacttatggtattagaattacctaaaagatgggggaagaattctgaatttgaaggtggaaaatcaacagtgaattgtagtaccactccagttgcggagagatttttcaccagttccacctctctgactctaaagcatgctgcatggtatccaagtgaaatcctggatccccacgtagtgctgttaacatcagacaacgtaatcagaatttactcactacgtgagccgcagacacccactaacgtgataatactttcagaagccgaagaggaaagtctagtactcaataaaggaagggcgtataccgcatctctaggagagacagcagttgcatttgactttgggccattggcagcagtcccaaagactctatttggacaaaacggcaaagatgaagtagtggcatacccactgtacatcttatatgaaaatggagagactttcctgacatacatcagtctgttacacagccctggaaatattggaaagctgttgggtccattgcccatgcatcctgcggctgaagataactatggttatgatgcgtgtgctgtactctgcttaccctgtgtccccaatatcttagtgatcgctactgaatcaggaatgctgtatcactgtgtcgtgctagaaggggaagaagaagatgaccacacgtcagaaaagtcctgggattccaggattgacctcattccttctctgtatgtgtttgaatgtgttgagttggagcttgctttgaaactggcatctggagaggatgacccttttgattctgacttttcttgtccagtcaaacttcatagagatcccaagtgtccttcaagatatcactgtactcatgaagctggtgtacatagtgttgggctaacttggattcataaacttcacaaatttcttggatcagatgaagaagataaggatagtttacaggaactctctacagaacagaaatgctttgttgaacacatcctttgtacgaagccattgccctgcaggcagccagctccaattcgaggattttggattgtacctgacattctgggacccacgatgatctgcatcaccagtacctatgaatgcctcatatggccgttattaagtacagtccatccagcgtctcctcccctgctttgtactcgagaagatgttgaagtggcagagtctcccctccgtgttctggctgaaaccccagattcctttgaaaagcatattagaagcattttgcaacgtagtgttgccaatccagcatttttgaaagcttctgaaaaggacatagcccctcctcctgaagaatgccttcagctcctcagcagagccacccaggtgttcagagagcagtacattctcaaacaggacttggcaaaggaggagattcagcggagggtcaaattattatgtgaccaaaaaaagaaacaactagaagatctcagttattgtcgagaagagaggaaaagtctgcgggaaatggctgagcgtttagctgacaaatatgaggaagctaaagaaaaacaagaggatatcatgaacaggatgaaaaaactacttcacagttttcactctgagctcccagttctctctgatagtgagcgagacatgaagaaagaattacagctgatacctgatcaacttcgacatttgggcaatgccatcaaacaggttactatgaaaaaggattatcaacagcaaaagatggagaaggtgttgagtcttccaaaacccaccattattctcagtgcctaccagcgaaagtgcattcagtccatcctgaaagaggagggtgaacatataagggaaatggtgaagcaaatcaatgatatccgcaatcatgtaaacttctgacaccaccaggagctgactcacacctgaactgaacaccattgaaggcttaaacccatattgtaaaacaggtagaattatctaatttataaaaaggtgttttgatg

SEQ ID NO: 4679 - protein, 741 aa, Homo sapiens
MAAAEGPVGDGELWQTWLPNHVVFLRLREGLKNQSPTEAEKPASSSLPSSPPPQLLTRNVVFGLGGELFLWDGEDSSFLVVRLRGPSGGGEEPALSQYQRLLCINPPLFEIYQVLLSPTQHHVALIGIKGLMVLELPKRWGKNSEFEGGKSTVNCSTTPVAERFFTSSTSLTLKHAAWYPSEILDPHVVLLTSDNVIRIYSLREPQTPTNVIILSEAEEESLVLNKGRAYTASLGETAVAFDFGPLAAVPKTLFGQNGKDEVVAYPLYILYENGETFLTYISLLHSPGNIGKLLGPLPMHPAAEDNYGYDACAVLCLPCVPNILVIATESGMLYHCVVLEGEEEDDHTSEKSWDSRIDLIPSLYVFECVELELALKLASGEDDPFDSDFSCPVKLHRDPKCPSRYHCTHEAGVHSVGLTWIHKLHKFLGSDEEDKDSLQELSTEQKCFVEHILCTKPLPCRQPAPIRGFWIVPDILGPTMICITSTYECLIWPLLSTVHPASPPLLCTREDVEVAESPLRVLAETPDSFEKHIRSILQRSVANPAFLKASEKDIAPPPEECLQLLSRATQVFREQYILKQDLAKEEIQRRVKLLCDQKKKQLEDLSYCREERKSLREMAERLADKYEEAKEKQEDIMNRMKKLLHSFHSELPVLSDSERDMKKELQLIPDQLRHLGNAIKQVTMKKDYQQQKMEKVLSLPKPTIILSAYQRKCIQSILKEEGEHIREMVKQINDIRNHVNF

SEQ ID NO: 4680 - DNA, 5852 bp, Homo sapiens
  unsure 98: unknown base
  unsure 104: unknown base
  unsure 182: unknown base
  unsure 357: unknown base
  unsure 416: unknown base
  unsure 425: unknown base
  unsure 478: unknown base
  unsure 643: unknown base
ggtcagcggagggtttgctccgtctcttggtgaacttgaacagaggcagaggcaaaagcaaaacatttctgcgccaggagatgaggggcggtagagcncctggnaatggagatgtccttgacgcctgggcagaggctgcagctgcaggaccctgtggccactggagataagtaatggtgccnatttgaacacctactggaaacggggcaggaacagtgagtgaccccaggcgagcacaggcaggtgccaggagccaggatgcaaggatgacgcctccggaggccctggcctcactcccacctgggcgctaggagccatcccggggctccagccaggagccctgctgcccaggggcantggccaaacctttcttccgactccagaagtttctccgccgaacacagttcctgctgttncttcctcancggctgcctacctgatgaccggcagcctgctgctgctgcagcgggtccgcgtnggctctcccacagggcccccgggcacccggccccctgcagaccttgccagtggccgccgtggcgctgggcgtgggcttgctggacagcagagccctgcacgaccctcgagtcagcccagagctgctgctgggtgtggacatgctgcagagccccctgacccggcncccggcccggcccccgctggctccggagccgcaactcggagctgcgtcagttgcgtcgccgctggttccaccacttcatgagtgactcccagggaccgcccgccctgggccccgaggctgccaggcccgccatccacagccgaggcacctacattggatgcttcagtgacgatggccacgagaggactctgaaaggagctgtgttttatgacttgagaaagatgactgtctcccactgccaggatgcgtgtgctgagcggtcctatgtctacgccggcttggaggccggggcggagtgttactgcgggaaccggctgccagcggtgagcgtggggctggaagagtgtaaccatgagtgcaaaggcgagaagggctctgtgtgcggggctgtggaccggctctccgtgtaccgtgtggacgagctgcagccgggctccaggaagcggcggaccgccacctaccgcggatgcttccgactgccagagaacatcacacatgccttccccagctccctgatacaggccaatgtgaccgtggggacttgctcgggcttttgttcccagaaagagttccccttggccattctcaggggctgggaatgctactgtgcttaccctaccccccggttcaacctgcgggatgccatggacagctcagtatgtggccaggaccctgaggcacagaggctggcagaatactgtgaggtctaccagacacctgtgcaagacactcgttgtacagacaggaggttcctgcctaacaaatccaaagtgtttgtggctttgtcaagcttcccaggagccgggaacacatgggcacggcacctcattgagcatgccactggcttctatacagggagctactactttgatggaaccctctacaacaaagggttcaagggcgaaaaggaccactggcggagccgacgcaccatctgtgtcaaaacccacgagagtggcaggagggagattgagatgtttgattcagccatcctgctaatccggaacccatacaggtccctggtggcagaattcaacagaaaatgtgccgggcacctgggatatgcagctgaccgcaactggaagagcaaagagtggccggactttgtcaacagctacgcctcgtggtggtcctcgcacgtcctggactggctcaagtacgggaagcggctgctggtggtgcactacgaggagctgcggcgcagcctggtgcccacgttacgggagatggtggccttcctcaacgtgtctgtgagcgaggagcggctgctctgcgtggagaacaacaaggagggcagcttccggcggcgcggccggcgctcccacgaccctgagcccttcaccccggagatgaaagacttgatcaatggctacatccggacggtggaccaagccctgcgtgaccacaactggacggggctgcccagggagtatgtgcccagatgataggcctggcccacgccgccgcccccgctgagtgacgcaatcgcaccacggggctgcgctccccactctgatgctcaggcccgtggcctcactgggacgaacggtgggtggggggctcaccctggtgctgcctcccgcacaaggagacctggacacaacagacacacatcacaaggcgaacacaaatggacacacatacctggccacgaacccacacctcctcagacactcagacaccactccaggctcatagccccgtcttgatgcagagaagccacccacgtggggtgtgccaggcacccccagatacaaatgcagccacgcacagacgtaacacacaggtgccaggccgtgtgctcctggaggctggctggctgtctctctcacacagatacacgtgcgctccctgggatccgggaggccctgggcttcctgtgtgtagccctggcatagacttgctcgtcagggtgttcgactctgggatgctgggccgggcagacatttatgctctgagcagcaaggaccattgggatggaggtgggcacaaagactgctgcttccagggtgtgcggccctggccgtgtgtctgacatcccataaatgtgtgtgtggtgtgactacgggcaccacaaactccgcagccttgcctctcttttctctgtggctgggctggctgcaccatgggcagggttgaggactgccccccaccccgcccaagccaatgcagacactgacctcaagaccagccacaccaagtctgtgcactgcccaccacccccttcaacccctcctacaccatgctccggggcctggggcctccttgcctggcttcttcctccagctatcctcagggaagctggagattcaagtcatgccccagaagcaaggtgtaagcatgggggcgtggggaagagggcaggagctgaagttccaggggagcccaggacccctggggacctgtacactagcaggatgggtcttgggagttggcatggggagattgtaagggctgtatctccgcgattactggtactggtgctccacccataggggccctgttctctctggggtcccacactggggtcatgagagctagttagtactcagcctgacccctaggtctggtcctgccagcctgggatgggggtcaatgtatgctacacatcttgggctcacaagtgaggctgtggaggccaggaggttcaagtatggagggtaggagtgcaacccaggagcaacgctcaaggtggccgagatgcagggaggattgtggcgatccggttgcacactggcctctgtggaggtcagggaggtgggaaggtgggtgggcctgaactcaggcagcccttcagtggcttcttcaggcctaggataaccctggccaggccccatggtcctgctctgggtcagctgtcagggagacctcccttcagcctgagccaagctgcattgggaggagaaggcagggtgagggatctgggagagcaggacgttgagatatcctgaccctctgcttcctagcctgatgatggggaacccagagccacccgctatgagcacaggccgggggtggaaggcccagtagagctgcccttccccagatggaagcttcctccaaccttcagtttggccagtgggtgggtttgggcatctgtgcccctggtggcctccaaatccttcctgggattcccccaaacccacactgatgcgaagctgttcttgaccctcccatagcatcaactcagttcagctcaaagctagaaacaccaaggtctttgaaaatgtttattggctcaggatagcttcggcatccaatctgcgaaggcccctgatggagctatttcttcctagtatcaggagcaattgagacccctcaggagtttccacactgctgtggacgggatagccagggcagacctgcatcccagagcaagcctagatccttgaaagcaatgtcaggcgtggcagtggggaagccatggaggctgggaagggcaaagtgtggagagaggagtgaccgggactggagccagggtctggggagagcaacagcaccaggcttttcctggtagttggattggtacattcactgctgccaggtacccagagatgtcatctctctccaggtagagcatcaccagctcctgtggccttgtagatgactctgtacctcagtgaagagtgcaggcaagtagagtgatggggtcagtgtccatccagtttacgctgagtcagtccatacagcaagacacctggcacttggcaggtactcctggatgttgatgagcaaggaagagcaacggccctgtcagctggcagtggtcctcacagccttcatcccaggtctgcctacgtgggagatctcatcagaaacaggaacggggatctgtctgtgcttgcaggaaagtccatttgtttttctccaagttaggtctcatctacagctcttagcttctcagtaaagaggatactctcccaaccagccaaggaataaaagctgatctgtatgtagggcagaagtgtggcaaatgcatcaggaaccggttagaacagaacagagaaaccctgactgtctacagattccaactttaatagcaagcctgtggagttacacaaacctgtgttaaaacatgtaatttttatggatttcatctcccgttgtggatcaatttggaaaaaccaaaatatgtaattttaaaaaactaaaacacatcctggtagtcccagtgatgtgtaaatgagagagaagaatagacaggcttccaaaccctgggaagaaagctgcttaattatgtgaacatcttataatgaagtctcttgcagctaaaattagattttgagtgcatgaatctgtgataatgtttgcatatcagaatgcattctccccttaaaagtagcagtagccacttggttcttagggggccccaagaggagaggagaagtgctgaggttgatgttacgactgcaagaattcttgggacacaggtttgttttctgctgacttgctcggaaacccattggaggtatctgaaatgtgatgactccaaaggggttcatttcactatagggagaaattgattcgtctgacttcctatttatcaccactcaatattgggtgagttggtctgaacaaggtggggataaagtagagtggaaataatgtagagtcgtcagactgaaaggccaggttgtagtcccagctcttatctgccatcttggacaaagcttttcccatctccagtctcagtttcccatccataaaatgggggaagtggtaggtcttgctgattgcatccacattcattcctccatttcctttcccagcaaccccccatttctgtttgggaattcatatgatctgccagagcctctccaggggtggaatacatgtcctggactaagccaatgacaccttccatctttccagctatggtgactgggttaggtatgatcttgtgagttaagacaatgaagccagagggaatttcaagacttatgggaatgctgggtagaagctgttttaattcccctgttgaatgtgaaaaaggtagtagtattcctgggtctttatgatgaccaccttgggccttgggatcatgaccaggaatcacgtgaagctgacaccactgaagggagagttgagaggcagaaagagatcaagtccttggtgaaattgtttaagtacaggatcaagccttgcttgagattggccttacctctggactttttttgttatatgagctaataaattctgtttattgttt

SEQ ID NO: 4681 - protein, 575 aa, Homo sapiens
MAKPFFRLQKFLRRTQFLLFFLTAAYLMTGSLLLLQRVRVALPQGPRAPGPLQTLPVAAVALGVGLLDSRALHDPRVSPELLLGVDMLQSPLTRPRPGPRWLRSRNSELRQLRRRWFHHFMSDSQGPPALGPEAARPAIHSRGTYIGCFSDDGHERTLKGAVFYDLRKMTVSHCQDACAERSYVYAGLEAGAECYCGNRLPAVSVGLEECNHECKGEKGSVCGAVDRLSVYRVDELQPGSRKRRTATYRGCFRLPENITHAFPSSLIQANVTVGTCSGFCSQKEFPLAILRGWECYCAYPTPRFNLRDAMDSSVCGQDPEAQRLAEYCEVYQTPVQDTRCTDRRFLPNKSKVFVALSSFPGAGNTWARHLIEHATGFYTGSYYFDGTLYNKGFKGEKDHWRSRRTICVKTHESGRREIEMFDSAILLIRNPYRSLVAEFNRKCAGHLGYAADRNWKSKEWPDFVNSYASWWSSHVLDWLKYGKRLLVVHYEELRRSLVPTLREMVAFLNVSVSEERLLCVENNKEGSFRRRGRRSHDPEPFTPEMKDLINGYIRTVDQALRDHNWTGLPREYVPR

SEQ ID NO: 4682 - DNA, 1483 bp, Homo sapiens
cttagtggtgtcggggtctagtggacagagaagactcttggccaggcagatggcttctcggtggcagaacatggggacctccgtgcgccggagatctctccagcaccaggagcagctggaggacagcaaggagctgcagcctgtggtcagccatcaggagacctctgtaggggccctggggtccctgtgcagacagttccaaaggaggctgcccctgagaaccgtcaacctcaacctccgcgcagggccctcctggaaacgcctggaaaccccagagccaggtcagcagggcctccaggctgcagctcgctcagctaagagtgctttgggtgccgtgtcccagagaatccaggagtcctgccaaagtggcaccaagtggctggtggagacccaggtgaaggccaggaggcggaagagaggagcacagaagggcagtggatccccaactcacagcctgagccagaagagcacccggctgtctggagccgcccctgcccactcagccgcagacccctgggagaaggagcatcaccgcctctctgtccggatgggctcacatgcccacccattacggcgatcaaggcgggaggctgccttccggagcccctactcctcaacagagcccctctgctctcccagcgagtctgacagtgacctagagcctgtgggggcgggaattcagcatctccagaagctgtcccaagagctagatgaagccattatggcggaagagagtggtgacatcgtctctctcattcatgactgaggaagtgcctgcaggaaacaagccctgtctgaccgccaaggcttcatactcaaggatgtctatgcttccccgtgtgcttcctggaaaaaacccccgggagtcgtcagtacccctgggccactgctaacaagcacctaacaaggggcccagagccccctgctccagccacatctggacccatcagtgactgcctgccatagcctgagagtgtcttggggagaccttgcagagggggagaattgttccttctgctttcctaggggactcttgagcttagaaactcatcgtacacttgaccttgagccttctatttgcctcatctataacatgaagtgctagcatcagatatttgagagctcttagctctgtacccgggtgcctggtttttggggagtcatccgcagagtcactcacccactgtgtttctggtgccaaggctcttgagggccccactctcatccctcctttccctaccagggactcggaggaaggcataggagatatttccaggcttacgaccctgggctcacgggtacctatttatatgctcagtgcagagcactgtggatgtgccaggaggggtagccctgttcaagagcaatttctgccctttgtaaattatttaagaaacctgctttgtcattttattagaaagaaaccagcatgtgactttcctagataacactgctttctcataataaagactatttgcatttg

SEQ ID NO: 4683 - protein, 238 aa, Homo sapiens
MASRWQNMGTSVRRRSLQHQEQLEDSKELQPVVSHQETSVGALGSLCRQFQRRLPLRTVNLNLRAGPSWKRLETPEPGQQGLQAAARSAKSALGAVSQRIQESCQSGTKWLVETQVKARRRKRGAQKGSGSPTHSLSQKSTRLSGAAPAHSAADPWEKEHHRLSVRMGSHAHPLRRSRREAAFRSPYSSTEPLCSPSESDSDLEPVGAGIQHLQKLSQELDEAIMAEESGDIVSLIHD

SEQ ID NO: 4684 - DNA, 1689 bp, Homo sapiens
atggatgccgctctgctcctgaacgtggaaggggtcaagaaaaccattctgcacgggggcacgggcgagctcccaaacttcatcaccggatcccgagtgatctttcatttccgcaccatgaaatgtgatgaggagcggacagtcattgacgacagtcggcaggtgggccagcccatgcacatcatcatcggaaacatgttcaagctcgaggtctgggagatcctgcttacctccatgcgggtgcacgaggtggccgagttctggtgcgacaccatccacacgggggtctaccccatcctatcccggagcctgaggcagatggcccagggcaaggaccccacagagtggcacgtgcacacgtgcgggctggccaacatgttcgcctaccacacgctgggctacgaggacctggacgagctgcagaaggagcctcagcctctggtctttgtgatcgagctgctgcaggttgatgccccgagtgattaccagagggagacctggaacctgagcaatcatgagaagatgaaggcggtgcccgtcctccacggagagggaaatcggctcttcaagctgggccgctacgaggaggcctcttccaagtaccaggaggccatcatctgcctaaggaacctgcagaccaaggagaagccatgggaggtgcagtggctgaagctggagaagatgatcaatactctgatcctcaactactgccagtgcctgctgaagaaggaggagtactatgaggtgctggagcacaccagtgatattctccggcaccacccaggcatcgtgaaggcctactacgtgcgtgcccgggctcacgcagaggtgtggaatgaggccgaggccaaggcggacctccagaaagtgctggagctggagccgtccatgcagaaggcggtgcgcagggagctgaggctgctggagaaccgcatggcggagaagcaggaggaggagcggctgcgctgccggaacatgctgagccagggtgccacgcagcctcccgcagagccacccacagagccacccgcacagtcatccacagagccacctgcagagccacccacagcaccatctgcagagctgtccgcagggccccctgcagagccagccacagagccacccccgtccccagggcactcgctgcagcactgagccccctgaggcccacagccacccaggcagggagcaagtggcctggtcacttctggttcgattgaccaggatcgtggtgtcactttttaaaatttaaaattaatttttgaaatcaaagtcagacacacccatggtaaaaaaaaaaaaaaaaacaatcccaagggtacagaagagcttatgaataaaagtagttttctcctctacccctctcattccttccgtgccatggttttaattgaccctgtttttaattcttctggtagttttctctatttccaagtaatctgtttaaatcagtttctagattttaccccatgtcaatgacaaatgaggatttgatgctctgatcctttctcatgcctgatacccctccctgtctccccattttggatagttacatttgggggtcatctcggtgatttttgtaactttacgcaggacacttagagctctctagaatcccactgactttagtgggtcttgatgtagggtgggcaagccccgacactggagcttagcctgagagggttcttg

SEQ ID NO: 4685 - protein, 384 aa, Homo sapiens
MDAALLLNVEGVKKTILHGGTGELPNFITGSRVIFHFRTMKCDEERTVIDDSRQVGQPMHIIIGNMFKLEVWEILLTSMRVHEVAEFWCDTIHTGVYPILSRSLRQMAQGKDPTEWHVHTCGLANMFAYHTLGYEDLDELQKEPQPLVFVIELLQVDAPSDYQRETWNLSNHEKMKAVPVLHGEGNRLFKLGRYEEASSKYQEAIICLRNLQTKEKPWEVQWLKLEKMINTLILNYCQCLLKKEEYYEVLEHTSDILRHHPGIVKAYYVRARAHAEVWNEAEAKADLQKVLELEPSMQKAVRRELRLLENRMAEKQEEERLRCRNMLSQGATQPPAEPPTEPPAQSSTEPPAEPPTAPSAELSAGPPAEPATEPPPSPGHSLQH

SEQ ID NO: 4686 - DNA, 1763 bp, Homo sapiens
  unsure 16: unknown base
  unsure 24: unknown base
  unsure 27: unknown base
  unsure 31: unknown base
  unsure 58: unknown base
  unsure 79: unknown base
  unsure 161: unknown base
  unsure 305: unknown base
  unsure 450: unknown base
  unsure 520: unknown base
  unsure 561: unknown base
  unsure 882: unknown base
  unsure 990: unknown base
  unsure 991: unknown base
  unsure 992: unknown base
  unsure 997: unknown base
  unsure 999: unknown base
  unsure 1001: unknown base
  unsure 1002: unknown base
  unsure 1003: unknown base
  unsure 1006: unknown base
  unsure 1214: unknown base
  unsure 1254: unknown base
  unsure 1307: unknown base
  unsure 1446: unknown base
  unsure 1626: unknown base
  unsure 1701: unknown base
ggccagcgcggccggngccccctncgncctncccacccagggcgctgagcacgcacgnccgccggcctggtgtttcggncgggggcccgggaccagccgccgccttctccaggcgctcctactctctgggcatctgcagtccgagcggaaggggcgggaancgtcggcgacgccgagggagcaaagcccacgatcggcttcccggggcagcggacggctgccttcctcccggcgcaaacgcaccgcccaggagggggcgggctcggcgggtcggggggcggggccggggtccgagctcgggcccngcctccgcctccgccagctcctgtgagctgccgagtgctaggcacccgggctcttctgggggctccagaactaagccacccagacaccatcatcccgaaaaccccagcccttctcccatggcaggctacttgcccccccaaaggntacgccccttcgcccccacctccctaccctgtcacccctgggtacccggagccggcgctacatcctgggncccgggcaggcgccagtgcccgcccaggtacctgccccagnctcccggcttcgccctcttcccctcgcctggccccgtggccttggggtctgctgcccccttcttgccactgccaggggtgccttctggcctcgaattcctggtgcagattgatcagattttgattcaccagaaggctgagcgagtggaaaatggaagtacaggctccaccaggcaccaccattggccacgtgctacagacctggcatcccttcctccccaagttctccatccaggatgccgatcgccagacagtcttgcgagtggtggggccctgctggacctgtggctgtggcacagacaccaactttgaggtgaagacntcgggatgaatcccgcagtgtgggccgcatcagcaagcagtgggggggcctggtccgagaagccctcacagatgcagatgactttggcctacagttcccgctggaccnnntggantngnnntgnagggtgaaggctgtgctgctgggagccacattcctcattgactacatgttctttgagaagcgaggaggcgctgggccctctgccatcaccagttagaggccaccatggtgtgaggagaccatcacctcgaccagaactccagatggtcacctgccctggcccctcctctgggcagcccctttcctccatgtacactgcaggggacagnaaggggggccccatccctaccctactccctggccgcctgncccctgtggttcccaaggaggggtatgtatgagagccgctctcctgctacctncccaccactgtcccagcagtccctcggcacacaggcatatcagctttcacactttccccatgcactctctcccacccccttccagggcctctgctccaaaggaggcctctggaacccaggactctggggttttacaagnagggctggggtgtggaagggcaagctgcaccaaagacggtggatatagccaccgcccccccgccgctgcctagcatctgcttggccaattagttcagcctcagaccatggcactttgagggggtctctacctccccatcaacagctgcagggggaccccagtgccaacttcctctcccanctagggccctgccttcagctggtgcttgctgcgattcctgtgccttatgtaactgcccttccttcccttgccctnaggaaaaaggctgcatctttatatgttacattcatataaactttgtaactttttggacattg

SEQ ID NO: 4687 - DNA, 1383 bp, Homo sapiens
ctagtttctaaggatcatgtctgcgagccaggattcccgatccagagacaatggccccgatgggatggagcccgaaggcgtcatcgagagtaactggaatgagattgttgacagctttgatgacatgaacctctcggagtcccttctccgtggcatctacgcctatggttttgagaagccctctgccatccagcagcgagccattctaccttgtatcaagggttatgatgtgattgctcaagcccaatctgggactgggaaaacggccacatttgccatatcgattctgcagcagattgaattagatctaaaagccacccaggccttggtcctagcacccactcgagaattggctcagcagatacagaaggtggtcatggcactaggagactacatgggcgcctcctgtcacgcctgtatcgggggcaccaacgtgcgtgctgaggtgcagaaactgcagatggaagctccccacatcatcgtgggtacccctggccgtgtgtttgatatgcttaaccggagatacctgtcccccaaatacatcaagatgtttgtactggatgaagctgacgaaatgttaagccgtggattcaaggaccagatctatgacatattccaaaagctcaacagcaacacccaggtagttttgctgtcagccacaatgccttctgatgtgcttgaggtgaccaagaagttcatgagggaccccattcggattcttgtcaagaaggaagagttgaccctggagggtatccgccagttctacatcaacgtggaacgagaggagtggaagctggacacactatgtgacttgtatgaaaccctgaccatcacccaggcagtcatcttcatcaacacccggaggaaggtggactggctcaccgagaagatgcatgctcgagatttcactgtatccgccatgcatggagatatggaccaaaaggaacgagacgtgattatgagggagtttcgttctggctctagcagagttttgattaccactgacctgctggccagaggcattgatgtgcagcaggtttctttagtcatcaactatgaccttcccaccaacagggaaaactatatccacagaatcggtcgaggtggacggtttggccgtaaaggtgtggctattaacatggtgacagaagaagacaagaggactcttcgagacattgagaccttctacaacacctccattgaggaaatgcccctcaatgttgctgacctcatctgaggggctgtcctgccacccagccccagccagggctcaatctctgggggctgaggagcagcaggaggggggagggaagggagccaagggatggacatcttgtcattttttttctttgaataaatgtcactttttgaggcaaaagaagg

SEQ ID NO: 4688 - protein, 406 aa, Homo sapiens
MSASQDSRSRDNGPDGMEPEGVIESNWNEIVDSFDDMNLSESLLRGIYAYGFEKPSAIQQRAILPCIKGYDVIAQAQSGTGKTATFAISILQQIELDLKATQALVLAPTRELAQQIQKVVMALGDYMGASCHACIGGTNVRAEVQKLQMEAPHIIVGTPGRVFDMLNRRYLSPKYIKMFVLDEADEMLSRGFKDQIYDIFQKLNSNTQVVLLSATMPSDVLEVTKKFMRDPIRILVKKEELTLEGIRQFYINVEREEWKLDTLCDLYETLTITQAVIFINTRRKVDWLTEKMHARDFTVSAMHGDMDQKERDVIMREFRSGSSRVLITTDLLARGIDVQQVSLVINYDLPTNRENYIHRIGRGGRFGRKGVAINMVTEEDKRTLRDIETFYNTSIEEMPLNVADLI

SEQ ID NO: 4689 - DNA, 1410 bp, Homo sapiens
gagctagctttgcaatatggcggccgaggcggacggaccgcttaaacggctgctcgtgccgattcttttacctgagaaatgctacgaccaacttttcgttcagtgggacttgcttcacgtcccctgcctcaagattctcctcagcaaaggcctggggctgggcattgtggctggctcacttctagtaaagctgccccaggtgtttaaaatccggggagccaagagtgctgaagggttgagtctccagtctgtaatgctggagctagtggcattgactgggaccatggtctacagcatcactaacaacttcccattcagctcttggggtgaagccttattcctgatgctccagacgatcaccatctgcttcctggtcatgcactacagaggacagactgtgaaaggtgtcgctttcctcgcttgctacggcctggtcctgctggtgcttctctcacctctgacgcccttgactgtagtcaccctgctccaggcctccaatgtgcctgctgtggtggtggggaggcttctccaggcagccaccaactaccacaacgggtacacaggccagctctcagccatcacagtcttcctgctgtttgggggctccctggcccgaatcttcacttccattcaggaaaccggagatcccctgatggctgggacctttgtggtctcctctctctgcaacggcctcatcgccgcccagctgctcttctactggaatgcaaagcctccccacaagcagaaaaaggcgcagtagagccagctactggagtcattccgtttccactcattcacccaacctcagggttctccccatctgagccagcctgctggtgtgacttactcatcctccattcctctgcacttgcagactttctgagccagggttttcttttagtggaaacaaatggttgatggatccagatccttagaaaaggagaggatgggggtagagtctcccaagccaaaattttgacatttgagtgctttcgtaagccctgtacatgtactattaattcagtcattcagccaagcctcctcctctagcagcaatttccagctgtttaacactatcctgggcaaatgttttaccctgtcctccagcctccctgcttcccttctggccctggaagactgagtctggacggcagagtggagggactgggaggctgtggctgcctccctccctcagcccggctgggactgtctcccggaccccagtgctggggtgggggaagggggacggagaatgactcaggcagggccccagggtggggtgaggaggttcctgctctggcaggtctaggcggaagggagtggagatggggctggttgctgctgcagtgaggggaacagatgggacaataaagactggagactcagttgaataatgcaaaaaaaaaaaaa

SEQ ID NO: 4690 - protein, 247 aa, Homo sapiens
MAAEADGPLKRLLVPILLPEKCYDQLFVQWDLLHVPCLKILLSKGLGLGIVAGSLLVKLPQVFKIRGAKSAEGLSLQSVMLELVALTGTMVYSITNNFPFSSWGEALFLMLQTITICFLVMHYRGQTVKGVAFLACYGLVLLVLLSPLTPLTVVTLLQASNVPAVVVGRLLQAATNYHNGYTGQLSAITVFLLFGGSLARIFTSIQETGDPLMAGTFVVSSLCNGLIAAQLLFYWNAKPPHKQKKAQ

SEQ ID NO: 4691 - DNA, 1394 bp, Homo sapiens
ttaaggaggtgcagtcttatgggagggacaggggcggagtcagtctttaaaagctgttcccaggtctggcccgcctgccacaaacgctgagcccaggtgggagaggtctggcctatccgcgcctggcagctgtcggaactccggagaccacaaaggggtttatggtttaccccctccacggaaggtcggtctgatcgcagctgcgggtcggggagagggaccgggggtcccccagtcagtaggcctcagaacacctcttcagtgccggggcaccagacagcggattttgcattcgactctccccaaagtgtgccgaacaggttggaagcaaaggctccggtttaagctctgggcttggggataaaatacactttttaaggacccaagttcctcggcaacgactccagactgggaagacctttccattttcaggatcgacgcttcacgttgaggggagggcattcaggacgccctcttaaggcttctcccaacccatggcgctaccaggctcctcacaggaccaggcctggagcctggagcctccggctgccacggctgctgcctcctcatcttcgggaccccaggagcgggagggcgctgggagccccgcggcccccgggacgctgcccctggagaaggtgaagcggccgatgaacgcgttcatggtgtggagctccgctcagcgccgccagatggcgcagcagaaccccaagatgcacaactccgagatctccaagcgcctgggcgcgcagtggaagctgctggacgaggacgagaagcggcccttcgtggaggaggccaagcggctccgcgcccgacacctgcgcgactaccccgactacaagtaccggcctcggcgcaaggccaagagctcgggcgccggaccttcccgctgcggacagggaagaggcaacctggccagcggcggcccgctctgggggccggggtacgcgaccacccaaccgagcagaggctttgggtacagaccccccagctactcgacagcctacctgcctggcagctatggctcttcccactgcaaactggaagccccctcaccgtgctccctccctcagagtgaccctaggctccagggggaactgctgcccacctatacccactacctgccccctggctctcccactccatacaaccctccccttgctggtgcccccatgcccctaacccacctctaaccctcatggacgcagacctcacgggacgggcctcatcctccttttttaatccagcagcatcccctaccccaggctgtcaaccctttctcctgttggactacagttcagaggcagcctgcagtcctcccatgatagccagggagagccgcacaacatacaattatatttttggtagtattaaacagttttgtattattc

SEQ ID NO: 4692 - protein, 233 aa, Homo sapiens [sequence omitted]

SEQ ID NO: 4693 - DNA, 2621 bp, Homo sapiens
acttgtcatggcgactgtccagctttgtgccaggagcctcgcaggggttgatgggattggggttttcccctcccatgtgctcaagactggcgctaaaagttttgagcttctcaaaagtctagagccaccgtccagggagcaggtagctgctgggctccggggacactttgcgttcgggctgggagcgtgctttccacgacggtgacacgcttccctggattggcagccagactgccttccgggtcactgccatggaggagccgcagtcagatcctagcgtcgagccccctctgagtcaggaaacattttcagacctatggaaactacttcctgaaaacaacgttctgtcccccttgccgtcccaagcaatggatgatttgatgctgtccccggacgatattgaacaatggttcactgaagacccaggtccagatgaagctcccagaatgccagaggctgctccccgcgtggcccctgcaccagcagctcctacaccggcggcccctgcaccagccccctcctggcccctgtcatcttctgtcccttcccagaaaacctaccagggcagctacggtttccgtctgggcttcttgcattctgggacagccaagtctgtgacttgcacgtactcccctgccctcaacaagatgttttgccaactggccaagacctgccctgtgcagctgtgggttgattccacacccccgcccggcacccgcgtccgcgccatggccatctacaagcagtcacagcacatgacggaggttgtgaggcgctgcccccaccatgagcgctgctcagatagcgatggtctggcccctcctcagcatcttatccgagtggaaggaaatttgcgtgtggagtatttggatgacagaaacacttttcgacatagtgtggtggtgccctatgagccgcctgaggttggctctgactgtaccaccatccactacaactacatgtgtaacagttcctgcatgggcggcatgaaccggaggcccatcctcaccatcatcacactggaagactccagtggtaatctactgggacggaacagctttgaggtgcgtgtttgtgcctgtcctgggagagaccggcgcacagaggaagagaatctccgcaagaaaggggagcctcaccacgagctgcccccagggagcactaagcgagcactgcccaacaacaccagctcctctccccagccaaagaagaaaccactggatggagaatatttcacccttcagatccgtgggcgtgagcgcttcgagatgttccgagagctgaatgaggccttggaactcaaggatgcccaggctgggaaggagccaggggggagcagggctcactccagccacctgaagtccaaaaagggtcagtctacctcccgccataaaaaactcatgttcaagacagaagggcctgactcagactgacattctccacttcttgttccccactgacagcctcccacccccatctctccctcccctgccattttgggttttgggtctttgaacccttgcttgcaataggtgtgcgtcagaagcacccaggacttccatttgctttgtcccggggctccactgaacaagttggcctgcactggtgttttgttgtggggaggaggatggggagtaggacataccagcttagattttaaggtttttactgtgagggatgtttgggagatgtaagaaatgttcttgcagttaagggttagtttacaatcagccacattctaggtaggggcccacttcaccgtactaaccagggaagctgtccctcactgttgaattttctctaacttcaaggcccatatctgtgaaatgctggcatttgcacctacctcacagagtgcattgtgagggttaatgaaataatgtacatctggccttgaaaccaccttttattacatggggtctagaacttgacccccttgagggtgcttgttccctctccctgttggtcggtgggttggtagtttctacagttgggcagctggttaggtagagggagttgtcaagtctctgctggcccagccaaaccctgtctgacaacctcttggtgaaccttagtacctaaaaggaaatctcaccccatcccacaccctggaggatttcatctcttgtatatgatgatctggatccaccaagacttgttttatgctcagggtcaatttcttttttcttttttttttttttttttctttttctttgagactgggtctcgctttgttgcccaggctggagtggagtggcgtgatcttggcttactgcagcctttgcctccccggctcgagcagtcctgcctcagcctccggagtagctgggaccacaggttcatgccaccatggccagccaacttttgcatgttttgtagagatggggtctcacagtgttgcccaggctggtctcaaactcctgggctcaggcgatccacctgtctcagcctcccagagtgctgggattacaattgtgagccaccacgtccagctggaagggtcaacatcttttacattctgcaagcacatctgcattttcaccccacccttcccctccttctccctttttatatcccatttttatatcgatctcttattttacaataaaactttgctgcca

SEQ ID NO: 4694 - DNA, 1840 bp, Homo sapiens
  unsure 85: unknown base
  unsure 88: unknown base
  unsure 90: unknown base
  unsure 130: unknown base
  unsure 132: unknown base
  unsure 135: unknown base
agtgctttcaaaagaattggcgtccgctgttcgcctctcctcccgggagtcttctgcctactcccagaagaggagggaagcacanggntngggtttctttagctctgcgtcggatccctgagaacttcgnanagnccatcctggctgaggctaatctccgctgtgcttcctctgcagtatgaagactttggagactcaaccgttagctccggactgctgtccttcagaccaggacccagctccagcccatccttctccccacgcttccccgatgaataaaaatgcggactctgaactgatgccaccgcctcccgaaaggggggatccgccccggttgtccccagatcctgtggctggctcagctgtgtcccaggagctacgggagggggacccagtttctctctccactcccctggaaacagagtttggttcccctagtgagttgagtcctcgaatcgaggagcaagaactttctgaaaatacaagccttcctgcagaagaagcaaacgggagcctttctgaagaagaagcgaacgggccagagttggggtctggaaaagccatggaagatacctctggggaacccgctgcagaggacgagggagacaccgcttggaactacagcttctcccagctgcctcgatttctcagtggttcctggtcagagttcagcacccaacctgagaacttcttgaaaggctgtaagtgggctcctgacggttcctgcatcttgaccaatagtgctgataacatcttgcgaatttataacctgcccccagagctgtaccatgagggggagcaggtggaatatgcagaaatggtccctgtccttcgaatggtggaaggtgataccatctatgattactgctggtattctctgatgtcctcagcccagccagacacctcctacgtggccagcagcagccgggagaacccgattcatatctgggacgcattcactggagagctccgggcttcctttcgcgcctacaaccacctggatgagctgacggcagcccattcgctctgcttctccccggatggctcccagctcttctgtggcttcaaccggactgtgcgtgttttttccacggcccggcctggccgagactgcgaggtccgagccacatttgcaaaaaagcagggccagagcggcatcatctcctgcatagccttcagcccagcccagcccctctatgcctgtggctcctacggccgctccctgggtctgtatgcctgggatgatggctcccctctcgccttgctgggagggcaccaagggggcatcacccacctctgctttcatcccgatggcaaccgcttcttctcaggagcccgcaaggatgctgagctcctgtgctgggatctccggcagtctggttacccactgtggtccctgggtcgagaggtgaccaccaatcagcgcatctacttcgatctggacccgaccgggcagttcctagtgagtggcagcacgagcggggctgtctctgtgtgggacacggacgggcctggcaatgatgggaagccggagcccgtgttgagttttctgccccagaaggactgcaccaatggcgtgagcctgcaccctagcctgcctctcctggccactgcctccggtcagcgtgtgtttcctgagcccacagagagtggggacgaaggagaggagctgggccttcccttgctctccacgcgccacgtccaccttgaatgtcggcttcagctctggtggtgtgggggggcgccagactccagcatccctgatgatcaccagggcgagaaagggcagggaggaacggagggaggtgtgggtgagctgatataaaaaggtttttatgat

SEQ ID NO: 4695 - DNA, 2621 bp, Homo sapiens
acttgtcatggcgactgtccagctttgtgccaggagcctcgcaggggttgatgggattggggttttcccctcccatgtgctcaagactggcgctaaaagttttgagcttctcaaaagtctagagccaccgtccagggagcaggtagctgctgggctccggggacactttgcgttcgggctgggagcgtgctttccacgacggtgacacgcttccctggattggcagccagactgccttccgggtcactgccatggaggagccgcagtcagatcctagcgtcgagccccctctgagtcaggaaacattttcagacctatggaaactacttcctgaaaacaacgttctgtcccccttgccgtcccaagcaatggatgatttgatgctgtccccggacgatattgaacaatggttcactgaagacccaggtccagatgaagctcccagaatgccagaggctgctccccccgtggcccctgcaccagcagctcctacaccggcggcccctgcaccagccccctcctggcccctgtcatcttctgtcccttcccagaaaacctaccagggcagctacggtttccgtctgggcttcttgcattctgggacagccaagtctgtgacttgcacgtactcccctgccctcaacaagatgttttgccaactggccaagacctgccctgtgcagctgtgggttgattccacacccccgcccggcacccgcgtccgcgccatggccatctacaagcagtcacagcacatgacggaggttgtgaggcgctgcccccaccatgagcgctgctcagatagcgatggtctggcccctcctcagcatcttatccgagtggaaggaaatttgcgtgtggagtatttggatgacagaaacacttttcgacatagtgtggtggtgccctatgagccgcctgaggttggctctgactgtaccaccatccactacaactacatgtgtaacagttcctgcatgggcggcatgaaccggaggcccatcctcaccatcatcacactggaagactccagtggtaatctactgggacggaacagctttgaggtgcgtgtttgtgcctgtcctgggagagaccggcgcacagaggaagagaatctccgcaagaaaggggagcctcaccacgagctgcccccagggagcactaagcgagcactgcccaacaacaccagctcctctccccagccaaagaagaaaccactggatggagaatatttcacccttcagatccgtgggcgtgagcgcttcgagatgttccgagagctgaatgaggccttggaactcaaggatgcccaggctgggaaggagccaggggggagcagggctcactccagccacctgaagtccaaaaagggtcagtctacctcccgccataaaaaactcatgttcaagacagaagggcctgactcagactgacattctccacttcttgttccccactgacagcctcccacccccatctctccctcccctgccattttgggttttgggtctttgaacccttgcttgcaataggtgtgcgtcagaagcacccaggacttccatttgctttgtcccggggctccactgaacaagttggcctgcactggtgttttgttgtggggaggaggatggggagtaggacataccagcttagattttaaggtttttactgtgagggatgtttgggagatgtaagaaatgttcttgcagttaagggttagtttacaatcagccacattctaggtaggggcccacttcaccgtactaaccagggaagctgtccctcactgttgaattttctctaacttcaaggcccatatctgtgaaatgctggcatttgcacctacctcacagagtgcattgtgagggttaatgaaataatgtacatctggccttgaaaccaccttttattacatggggtctagaacttgacccccttgagggtgcttgttccctctccctgttggtcggtgggttggtagtttctacagttgggcagctggttaggtagagggagttgtcaagtctctgctggcccagccaaaccctgtctgacaacctcttggtgaaccttagtacctaaaaggaaatctcaccccatcccacaccctggaggatttcatctcttgtatatgatgatctggatccaccaagacttgttttatgctcagggtcaatttcttttttcttttttttttttttttttctttttctttgagactgggtctcgctttgttgcccaggctggagtggagtggcgtgatcttggcttactgcagcctttgcctccccggctcgagcagtcctgcctcagcctccggagtagctgggaccacaggttcatgccaccatggccagccaacttttgcatgttttgtagagatggggtctcacagtgttgcccaggctggtctcaaactcctgggctcaggcgatccacctgtctcagcctcccagagtgctgggattacaattgtgagccaccacgtccagctggaagggtcaacatcttttacattctgcaagcacatctgcattttcaccccacccttcccctccttctccctttttatatcccatttttatatcgatctcttattttacaataaaactttgctgcca

SEQ ID NO: 4696 - DNA, 1170 bp, Homo sapiens
gccgctgagaaagcgcagagaaggcgggccccgtctgaggtctggcagtcagagacagccgggcgcccacggcccgagcgcccacggcagcaccatgcccgcactcctggagcgccccaagctttccaacgccatggccagggcgctgcaccggcacattatgatggagcgggagcgcaagcggcaggaggaagaagaggtggataagatgatggaacagaagatgaaggaagaacaggagagaaggaagaaaaaggagatggaagagagaatgtcattagaggagaccaaggaacaaattctgaagttggaggagaagcttttggctctacaggaagagaagcaccagcttttcctgcagctcaagaaagttttacatgaggaagaaaaacggaggcgaaaggaacagagtgacctgaccaccctaacatcagctgcataccagcagagcctgactgttcacacaggaactcatctcctcagcatgcaggggagccctggaggacacaatcgcccaggcaccctcatggcagctgacagagccaaacaaatgtttggaccccaagtgcttacgacccggcactacgtgggctcagcagctgcttttgcagggacaccagagcatggacaattccaaggcagtcctggtggtgcctatgggactgctcagcccccacctcactatgggcccacacagccagcttatagtcctagtcagcagctcagagctccttcggcattccctgcagtgcagtacctatctcagccacagccacagccctatgctgtgcatggccactttcagcccactcagacaggtttcctccagcctggtggtgccctgtccttgcaaaagcagatggaacatgctaaccagcagactggcttctccgactcatcctctctgcgccccatgcacccccaggctctgcatccagcccctggactccttgcttccccccagctccctgtgcagatgcagccagcaggaaagtcgggctttgcagctaccagccaacctggccctcggctccccttcatccaacacagccagaacccgcgattctaccacaagtgaccatcagattatatcttcaacaccacaccccccaccccatcgtgggtgagggtatcccctgtgtgtcccaggccaataaaatctacctgcca

SEQ ID NO: 4697 - DNA, 1299 bp, Homo sapiens
ggcacgagggcggcggcggcggtagaggcggcggcggcggcggcagcgggctcggaggcagcggttgggctcgcggcgagcggacggggtcgagtcagtgcgttcgcgcgagttggaatcgaagcctcttaaaatggcagatgacttggacttcgagacaggagatgcaggggcctcagccaccttcccaatgcagtgctcagcattacgtaagaatggctttgtggtgctcaaaggccggccatgtaagatcgtcgagatgtctacttcgaagactggcaagcacggccacgccaaggtccatctggttggtattgacatctttactgggaagaaatatgaagatatctgcccgtcaactcataatatggatgtccccaacatcaaaaggaatgacttccagctgattggcatccaggatgggtacctatcactgctccaggacagcggggaggtacgagaggaccttcgtctccctgagggagaccttggcaaggagattgagcagaagtacgactgtggagaagagatcctgatcacggtgctgtctgccatgacagaggaggcagctgttgcaatcaaggccatggcaaaataactggctcccaggatggcggtggtggcagcagtgatcctctgaacctgcagaggccccctccccgagcctggcctggctctggcccggtcctaagctggactcctcctacacaatttatttgacgttttattttggttttccccaccccctcaatctgtcggggagcccctgcccttcacctagctcccttggccaggagcgagcgaagctgtggccttggtgaagctgccctcctcttctcccctcacactacagccctggtgggggagaagggggtgggtgctgcttgtggtttagtcttttttttttttttttttttttttttaaattcaatctggaatcagaaagcggtggattctggcaaatggtccttgtgccctccccactcatccctggtctggtcccctgttgcccatagccctttaccctgagcaccaccccaacagactggggaccagccccctcgcctgcctgtgtctctccccaaacccctttagatggggagggaagaggaggagaggggaggggacctgccccctcctcaggcatctgggagggccctgcccccatgggctttacccttccctgcgggctctctccccgacacatttgttaaaatcaaacctgaataaaactacaagtttaatatgaaaaaaaaaaaaaaaaaaaaaaaaaaaaaaaaaaaaaaaaaaaaaaaaaaa

SEQ ID NO: 4698 - protein, 154 aa, Homo sapiens
MADDLDFETGDAGASATFPMQCSALRKNGFVVLKGRPCKIVEMSTSKTGKHGHAKVHLVGIDIFTGKKYEDICPSTHNMDVPNIKRNDFQLIGIQDGYLSLLQDSGEVREDLRLPEGDLGKEIEQKYDCGEEILITVLSAMTEEAAVAIKAMAK

SEQ ID NO: 4699 - DNA, 1224 bp, Homo sapiens
ggccgggagagtagcagtgccttggaccccagctctcctccccctttctctctaaggatggcccagaaggagaactcctacccctggccctacggccgacagacggctccatctggcctgagcaccctgccccagcgagtcctccggaaagagcctgtcaccccatctgcacttgtcctcatgagccgctccaatgtccagcccacagctgcccctggccagaaggtgatggagaatagcagtgggacacccgacatcttaacgcggcacttcacaattgatgactttgagattgggcgtcctctgggcaaaggcaagtttggaaacgtgtacttggctcgggagaagaaaagccatttcatcgtggcgctcaaggtcctcttcaagtcccagatagagaaggagggcgtggagcatcagctgcgcagagagatcgaaatccaggcccacctgcaccatcccaacatcctgcgtctctacaactatttttatgaccggaggaggatctacttgattctagagtatgccccccgcggggagctctacaaggagctgcagaagagctgcacatttgacgagcagcgaacagccacgatcatggaggagttggcagatgctctaatgtactgccatgggaagaaggtgattcacagagacataaagccagaaaatctgctcttagggctcaagggagagctgaagattgctgacttcggctggtctgtgcatgcgccctccctgaggaggaagacaatgtgtggcaccctggactacctgcccccagagatgattgaggggcgcatgcacaatgagaaggtggatctgtggtgcattggagtgctttgctatgagctgctggtggggaacccaccctttgagagtgcatcacacaacgagacctatcgccgcatcgtcaaggtggacctaaagttccccgcttctgtgcccacgggagcccaggacctcatctccaaactgctcaggcataacccctcggaacggctgcccctggcccaggtctcagcccacccttgggtccgggccaactctcggagggtgctgcctccctctgcccttcaatctgtcgcctgatggtccctgtcattcactcgggtgcgtgtgtttgtatgtctgtgtatgtataggggaaagaagggatccctaactgttcccttatctgttttctacctcctcctttgtttaataaaggctgaagctttttgt

SEQ ID NO: 4700 - protein, 344 aa, Homo sapiens
MAQKENSYPWPYGRQTAPSGLSTLPQRVLRKEPVTPSALVLMSRSNVQPTAAPGQKVMENSSGTPDILTRHFTIDDFEIGRPLGKGKFGNVYLAREKKSHFIVALKVLFKSQIEKEGVEHQLRREIEIQAHLHHPNILRLYNYFYDRRRIYLILEYAPRGELYKELQKSCTFDEQRTATIMEELADALMYCHGKKVIHRDIKPENLLLGLKGELKIADFGWSVHAPSLRRKTMCGTLDYLPPEMIEGRMHNEKVDLWCIGVLCYELLVGNPPFESASHNETYRRIVKVDLKFPASVPTGAQDLISKLLRHNPSERLPLAQVSAHPWVRANSRRVLPPSALQSVA

SEQ ID NO: 4701 - DNA, 1032 bp, Homo sapiens
agatggaagtacaggctccaccaggcaccaccattggccacgtgctacagacctggcatcccttcctccccaagttctccatccaggatgccgatcgccagacagtcttgcgagtggtggggccctgctggacctgtggctgtggcacagacaccaactttgaggtgaagactcgggatgaatcccgcagtgtgggccgcatcagcaagcagtgggggggcctggtccgagaagccctcacagatgcagatgactttggcctacagttcccgctggacctggatgtgagggtgaaggctgtgctgctgggagccacattcctcattgactacatgttctttgagaagcgaggaggcgctgggccctctgccgtcaccagttagaggccaccatggtgtgaggagaccatcacctcgaccagaactccagatggtcacctgccctggcccctcctctgggcagcccctttcctccatgtacactgcaggggacagaaggggggccccatccctaccctactccctggccgcctgcccctgtggttcccaaggaggggtatgtatgagagccgctctcctgctacctcccaccactgtcccagcagtccctcggcacacaggcatatcagctttcacactttccccatgcactctctcccacccccttccagggcctctgctccaaaggaggcctctggaacccaggactctggggttttacaagagggctggggtgtggaagggcaagctgcaccaaagacggtggatatagccaccgcccccccgccgctgcctagcatctgcttggccaattagttcagcctcagaccatggcactttgagggggtctctacctccccatcaacagctgcagggggaccccagtgccaacttcctctcccactagggccctgccttcagctggtgcttgctgcgattcctgtgccttatgtaactgcccttccttcccttgccctaggaaaaaggctgcatctttatatgttacattcatataaactttgtaactttttgg

SEQ ID NO: 4702 - protein, 126 aa, Homo sapiens
MEVQAPPGTTIGHVLQTWHPFLPKFSIQDADRQTVLRVVGPCWTCGCGTDTNFEVKTRDESRSVGRISKQWGGLVREALTDADDFGLQFPLDLDVRVKAVLLGATFLIDYMFFEKRGGAGPSAVTS

SEQ ID NO: 4703 - DNA, 891 bp, Homo sapiens; identical to SEQ ID NO: 4674

SEQ ID NO: 4704 - DNA, 2504 bp, Homo sapiens
gagaccatggcgggtagcagcactgggggcggtggggttggggagacgaaggtgatttaccacctggatgaggaagagactccctacctggtgaagatccctgtccccgccgagcgcatcaccctcggcgatttcaagagcgtcctgcagcggcccgcgggcgccaagtactttttcaagtctatggatcaggatttcggggtggtgaaggaagaaatttcagatgacaacgcccgcctcccctgcttcaacggaagggtggtatcctggctggtgtcctcagataatccccaacccgagatggcccctccagtccatgagcctcgggcagaactggcgcctccagccccacctttacctcctttgccacccgagaggaccagcggcattggggactcaaggcctccatccttccaccctaatgtgtccagcagccatgagaatctggagcctgagacagaaaccgagtcagtagtgtcactgaggcgggagcggcctcgcaggagagacagcagtgagcatggcgctgggggccacaggactggtggcccctcaaggctggagcgccacctggccggatacgagagctcctctaccctcatgaccagcgagctggagagtaccagcctgggggactcggacgaggaggacaccatgagcaggttcagcagctccacggagcagagcagtgcctcccgcctccttaagcgccaccggcggcgaaggaagcagaggccaccccgcctggagaggacgtcatccttcagcagcgtcacagattccacaatgtctctcaatatcatcacagtcacgctaaacatggagaagtacaacttcctgggtatctccattgttggccagagcaatgagcggggagacggaggcatctacattggctccatcatgaagggtggggctgtggcggccgacgggcgcattgagccaggggacatgcttttgcaggtgaatgacatgaactttgagaacatgagcaacgatgacgctgtgcgggtgctgagggacattgtgcacaagcctggccccattgtgctgactgtggccaagtgctgggatccctctcctcaggcctatttcactctcccccgaaatgagcccatccagccaattgaccctgctgcctgggtgtcccattccgcggctctgactggcaccttcccagcctatccaggttcctcctccatgagcaccattacatctggatcgtctttgcctgatggctgtgaaggccggggtctctccgtccatacggacatggcatcggtgaccaaggccatggcagctccagagtctggactggaagtccgggaccgcatgtggctcaagatcaccatccctaatgcctttctgggctcggatgtggttgactggctctaccatcacgtggagggctttcctgagcggcgggaggcccgcaagtatgccagcgggctgctcaaagcaggcctgatccgacacaccgtcaacaagatcaccttctctgagcagtgctattacgtcttcggagacctcagtggtggctgtgagagctacctagtcaacctgtctctcaatgacaacgatggctccagtggggcttcagaccaggataccctggctcctctgcctggggccaccccctggcccctgctgcccactttctcctaccaataccctgccccacacccctacagcccgcagcctccaccctaccatgagctttcatcttacacctatggtgggggcagtgccagcagccagcatagtgagggcagccggagcagtgggtcgacacggagtgatgggggggcagggcgcacggggaggcccgaggagcgggcccccgagtccaagtccggcagtggcagtgagtctgagccctccagccgagggggcagccttcggcggggtggggaagcaagtgggactagcgatgggggccctcctccatccagaggctcaactgggggtgcccctaatctccgagcccacccagggctccatccctatggaccgccccctggcatggccctcccctacaaccccatgatggtggtcatgatgcccccacctccacctccagtccctccagcagtgcagcctccgggggcccctccagtcagagacctgggctctgtgcccccagaactgacagccagccgccaaagcttccacatggccatgggcaatcccagcgagttctttgtggatgttatgtagcccactgtggggccaggctgggccgggcgctcctggtgtgtgactgggtgtcctggccgtcatgtgcttgctcttacagtgcctgggctcagcctaccagctgctgccatacaggagattgtggccactgtgactctcaccagcagtgcctggttcctcccccttccctcaggggtagacaagggacctttgattatttttagctttgtttttttataagcctttttgggggttaaaatagagtttcttacatttttgggacttttttaataggcatttcctctttt

SEQ ID NO: 4705 - protein, 736 aa, Homo sapiens
MAGSSTGGGGVGETKVIYHLDEEETPYLVKIPVPAERITLGDFKSVLQRPAGAKYFFKSMDQDFGVVKEEISDDNARLPCFNGRVVSWLVSSDNPQPEMAPPVHEPRAELAPPAPPLPPLPPERTSGIGDSRPPSFHPNVSSSHENLEPETETESVVSLRRERPRRRDSSEHGAGGHRTGGPSRLERHLAGYESSSTLMTSELESTSLGDSDEEDTMSRFSSSTEQSSASRLLKRHRRRRKQRPPRLERTSSFSSVTDSTMSLNIITVTLNMEKYNFLGISIVGQSNERGDGGIYIGSIMKGGAVAADGRIEPGDMLLQVNDMNFENMSNDDAVRVLRDIVHKPGPIVLTVAKCWDPSPQAYFTLPRNEPIQPIDPAAWVSHSAALTGTFPAYPGSSSMSTITSGSSLPDGCEGRGLSVHTDMASVTKAMAAPESGLEVRDRMWLKITIPNAFLGSDVVDWLYHHVEGFPERREARKYASGLLKAGLIRHTVNKITFSEQCYYVFGDLSGGCESYLVNLSLNDNDGSSGASDQDTLAPLPGATPWPLLPTFSYQYPAPHPYSPQPPPYHELSSYTYGGGSASSQHSEGSRSSGSTRSDGGAGRTGRPEERAPESKSGSGSESEPSSRGGSLRRGGEASGTSDGGPPPSRGSTGGAPNLRAHPGLHPYGPPPGMALPYNPMMVVMMPPPPPPVPPAVQPPGAPPVRDLGSVPPELTASRQSFHMAMGNPSEFFVDVM

SEQ ID NO: 4706 - DNA, 1079 bp, Homo sapiens
gggccagcgcggcccgggccgccctcgcctcccacccagggcgctgagcacgcacgccgccggcctggcggcgttcgcggggcccgggaccagccgccgccttctccaggcgctcctactctctgggcatctgcagtccgagcggaaggggcgggaacgtcggcgacgccgaggagcaaagcccacgatcggcttcccggggcagcggacggctgccttcctcccggcgcaaacgcaccgcccaggagggggcgggctcggcgggtcggggggcggggccggggtccgagctcgggcccgcctccgcctccgccagctcctgtgagctgccgagtgctaggcacccgggctcttctgggggctccagaactaagccacccagacaccatcatctcgaaaaccccagcccttctcccatggcaggctacttgccccccaaaggctacgccccttcgcccccacctccctaccctgtcacccctgggtacccggagccggcgctacatcctgggcccgggcaggcgccagtgcccgcccaggtacctgccccagctcccggcttcgccctcttcccctcgcctggccccgtggccttggggtctgctgcccccttcttgccactgccaggggtgccttctggcctcgaattcctggtgcagattgatcagattttgattcaccagaaggctgagcgagtggaaacgttcctaggctgggagacctgtaatcggtatgaactgcgctctggggccgggcagcccctgggtcaggcggccgaggagagcaactgctgcgcccgtctgtgctgtggcgcccgccggccgctgcgtgtccgcctggccgaccccggggaccgtgaggtgctgcgtttgctccgcccgctgcactgtggctgcagctgctgcccctgtggcctccaggagatggaagtacaggctccaccaggcaccaccattggccacgtgctacagacctggcatcccttcctccccaagttctccatccaggatgccgatcgccagacagtcttgcgagtggtggggccctgctggacctgtggctgtggcacagacaccaac

SEQ ID NO: 4707 - DNA, 538 bp, Homo sapiens
agttggaatcgaagcctcttaaaatggcagatgacttggacttcgagacaggagatgcaggggcctcagccaccttcccaatgcagtgctcagcattacgtaagaatggctttgtggtgctcaaaggccggccatgtaagatcgtcgagatgtctacttcgaagactggcaagcacggccacgccaaggtccatctggttggtattgacatctttactgggaagaaatatgaagatatctgcccgtcaactcataatatggatgtccccaacatcaaaaggaatgacttccagctgattggcatccaggatgggtacctatcactgctccaggacagcggggaggtacgagaggaccttcgtctccctgagggagaccttggcaaggagattgagcagaagtacgactgtggagaagagatcctgatcacggtgctgtctgccatgacagaggaggcagctgttgcaatcaaggccatggcaaaataactggctcccagggtggcggtggtggcagcagtgatcctctgaacctgcag

SEQ ID NO: 4708 - DNA, 1211 bp, Homo sapiens
ggccccccccccccctagaaatgctcgaaccaggacggctcctggagtcctcgcgccctcgcagaaggactacgggccccggcgaccccgggggcggggcttccggcgcgctgccttgtgggcacggtagttccgccgggtctggcttccgcctgccgagcggccccggaccgcaggccggactacacttcccgtcggcccgcctgctctcccgatgccgccttggcgcgagacgttggcaagcagagtgtctccaagatggccgcttggggaaggaggcgtcttggcccgggcagcagtggcggcagcgcccgagagagggtgagcttgtcggccacagactgctacattgtgcatgagatctacaatggggagaatgcccaagaccagtttgagtacgagctggagcaggccctggaagcccagtacaagtacattgtgattgagcccactcgcattggcgacgagacagcccgctggatcaccgtgggcaactgcctgcacaagacggccgtgctggcgggcaccgcctgcctcttcaccccgttggcgctgcccttagattattcccactacatttccctgcccgctggtgtgctgagcctggcctgctgcaccctctatgggatctcctggcagtttgacccttgctgcaagtaccaagtggagtacgacgcctataaactgtcgcgcctgcctctgcacacactcacctcctccaccccggtggtgctggtccggaaggacgacctgcacagaaagagactgcacaacacgatagcactggccgccctggtgtactgtgtaaagaagatttacgaactctatgccgtatgatttcagtagaacagggagcgaagcaaaaccacccggcccacaagagacaacagagtattcagatcgccacactctgtgaggcagcagagcctgggcaggtgtttggcttagtatttgttatttttaaaaaataacagatcacgggtgtacccagggtttttcagctcattacactaagatgtggatttccataacccaagaggggggtctgaggctgtggaagtccgactgggcagtggaatgctgatggaggcagacgctgccgagggggtgtggacgtgctttgggggaggtctttaagtctattgtttaactgtaccatccagagcccaccagaagctattgatcattaaaattatgagaatttcaactcc

SEQ ID NO: 4709 - protein, 192 aa, Homo sapiens
MAAWGRRRLGPGSSGGSARERVSLSATDCYIVHEIYNGENAQDQFEYELEQALEAQYKYIVIEPTRIGDETARWITVGNCLHKTAVLAGTACLFTPLALPLDYSHYISLPAGVLSLACCTLYGISWQFDPCCKYQVEYDAYKLSRLPLHTLTSSTPVVLVRKDDLHRKRLHNTIALAALVYCVKKIYELYAV

SEQ ID NO: 4710 - DNA, 4843 bp, Homo sapiens
aggccaagtcctgtatctgccatgtctgtggcgtccacctcaacaggctgcattcctgcctctactgtgtcttcttcggctgtttcacaaagaagcatattcacgagcatgcgaaggcgaagcggcacaacctggccattgatctgatgtacggaggcatctactgttttctgtgccaggactacatctatgacaaagacatggaaataatcgccaaggaggagcagcgaaaagcttggaaaatgcaaggcgttggagagaagttttcaacttgggaaccaaccaaacgggagcttgaactgctgaagcacaacccgaaaaggagaaagatcacctcgaactgcaccataggtctgcgtgggctgatcaaccttgggaacacatgcttcatgaactgcatcgtgcaggccctgacccacacgccacttctgcgggacttcttcctgtctgacaggcaccgctgtgagatgcagagccccagctcctgtctggtctgtgagatgtcctcactgtttcaggagttttactctggacaccggtcccctcacatcccgtataagttgctgcacctggtgtggacccacgcgaggcacctagcaggctacgagcagcaggacgcccacgagttcctcatcgcggccctggacgtgctccaccgacactgcaaaggtgatgacaatgggaagaaggccaacaaccccaaccactgcaactgcatcatagaccagatcttcacaggcgggttgcagtcagacgtcacctgccaagtctgccatggagtctccaccaccatcgaccccttctgggacatcagcttggatctccccggctcttccaccccattctggcccctgagcccagggagcgagggcaacgtggtaaacggggaaagccacgtgtcgggaaccaccacgctcacggactgcctgcgacgattcaccagaccagagcacttgggcagcagcgccaagatcaagtgcagcggttgccatagctaccaggagtccacaaagcagctcactatgaagaaactgcccatcgtagcctgttttcatctcaaacgatttgaacactcagccaagctgcggcggaagatcaccacgtatgtgtccttccccctggagctggacatgacccctttcatggcctccagcaaagagagcaggatgaatggacagtaccagcagcccacggacagtctcaacaatgacaacaagtattccctgtttgctgttgttaaccatcaagggaccttggagagtggccactacaccagctttatccggcagcacaaagaccagtggttcaagtgtgacgatgccatcatcaccaaggccagcatcaaggacgtcctggacagcgaagggtacttgctgttctatcacaaacagttcctggaatacgagtagccttatctgcagctggtcagaaaaacaaaggcaatgcattggcaagcctcacaaagtgatcctccctggcccccccctcccccaagtctcccgccgcctccccggcctggtgacaccacctcccatgcagatgtggcccctctgcacctgggacccatcgggtcgggatggaccacacggacggggaggctcctggagctgctttgaagatggatgagatgaggggtgtgctctgggtgggaggagcagcgtacacccgtcaccagaacatctcttgtgtcatgacatgggggtgcaacgggggcctcacagcacagagtgaccgctgcctggcgttccccagcactcggtgtggaaaggcccctacctgctgtaagattatgggtccatgaaagcagtaagctggacacagaggtgtagtgtgcgggacagagggccttgcagatgcctttctgttggtgttttagtgttaaaatacggagagtatggaactcttcacctccattttctcagcggctgtgaagcagcctcctagcttcggaagtacggacactacgtcgcgttttcaagcgtgtctgttctgcaggtaacagcatcaagctgcacgtggaagcatctcgcggttttctagaaacaggcattttcttatccctctcccgctcctttttccacaaaggtgaatttcataaatgtaatactagtaaagtgaatgaattactgagtttatacagaaatttaggtaacttctcctttagtctcaagagcgagtcttgctttttaatgggtgccgtttatgttgctgcccgccctgtgtgcctggctcctctgggtgccttggtgtctgctggtggctggcagtgggcgcagcggaggagagttgtgctgcagctcatacggtgtgtctgtcatctcagtctggagtaaatgcagtgtctgccggtgtctgatgggttctgtccctcgtattttctttgccttctatcccattgcctggctaccgctgcctggcagccaagggtgttggtcgcgaagctggagtggcctctggtggagcctgcatcttgtctcgtctgcctctgctttacatttggtgtactttcgggcgtggtggcagtaaaatgacaccgtgattgagcttgtcagcagagctgaaagagaaagtagaaggatgtgcattgtttcttgtaagatatcttgcatgtatctgtgtattcaaattcaaacagagatggtttgtccatttgtccactgagaaattagaaactagggacaagggggaggaaaagtactgaaatacagtttatgaagcaagtgtgtctcgggctgtgcttgtcccaggagccccagcagcatctgaactgaggcttcttcagtcctgcaggaacaggatcatctgtctcagcggtgggcagatgttttcatagacagccagggagtaaacactgttggctctgtgggctgtatggtctctgccataaatagtacagagatgtggctgtgtctagtacaacttttagacacagaaatctgaatgacatatattgttctgtgtcaagaaacttagattttttttttaactatttaaaaacgtgaaacctattcttagctcacaggccatggagaagctggtggggaccagacccagctccttagctggctgggctggggagggggtagtgacagtggcagctgctactcactgctcagtgtggaaaacacaggacttggcaatcacagcccgcagaaccatcatgtgtggcagaagcctgagggatgcggtttcttgcccacgtgctctgttcattttctgttgtttttctgcacttaaagaattcacatggaagcatgttttataaaatgaattaccagagaaacagagatgggccgagattttcagaaatggtcccatgtgaccaagttctgctgtttgggtgacagtgctttgaagatctcctttgaggatgtgcagtctttttttttttttttttgagatggagtttgttgcccaggctggagtgagtggcacagtctcggctcactgcaacctccacctcctgggttcaagcagttctcgtgccgcagcctcccaagtagctgggactacaggcatgcaccaccacgccaggctaatttttgtatttttagtagagatggggtttcaccatgtctcaaactcctgacctcaggcgatccacccacctcagcgtcccaaagtgctgggattataggcgtgagccaccgcacctggcctatgagtggtcttttaattaggaacaaatctaatggaaaggagagttgactgaagttggcccacaggattgtgagctgggcagtgccttcatgaaggcttgccaccttgggacgccccagtttactggggtgtcttgcggagtgcagaaggctttctggcagctgcctgggtttggccagaccctgcctcccctcccgccggccaacccctagtccccttcctgtctccacttgcattcaggggtggctgctgttctgagaacattagaactgggaagagagatggagtcacatggatttttggtgggcattattctaaactttcgtatccaagttagtcccccttattccactgtggcattgccgttctaagcagttacctgatgcctgctgctgaagagctgctcacaggaggcggcggcggccctggcactgccccttgcattaggtcttgtgtttgatgtgttcttgtgaatttactttgtcagaacaaaatatttacgcgttgggttcaggaatttcttttagctccccatctggctgtgaaattcaggaaacctcccgttgcctagtaatcaccccatgtaggtgtacattgtgacaaagtgcatctgaccactaaggggcccccttggtgaccccagcacattcacagcagtgttaaaatggcctgcattttggagatgctggctggcctttcagtgcctcccaggaagacacatggcctttccctcttcagatgcctgaagggagtgctttgaggcaggtgatgtgctgggagtgtgggcggcctccctctggccccggggccctctgtggaccttggctccctccgtggacctgggcttcgtggtgagcactgcagcctccctgggcattccctccagcgccagcaccactgcaacatatagacctgagtgctattgtattttggcttggtgtgtatgctcttcattgtgtaaaattgctgttcttttgacaatttaagtgattgttttgtttactgtaagtttgaaaataaaaatgaagaaaaaaattccaatgactgtgctgtggttggagactttatttaccaagatgtttactcttcctttccccttccattttgaggagctgtgtcactcctcctcccccccagtgctttgtagtctctcctatgtcataataaagctacattttctctg

SEQ ID NO: 4711 - protein, 525 aa, Homo sapiens
MVSRPEPEGEAMDAELAVAPPGCSHLGSFKVDNWKQNLRAIYQCFVWSGTAEARKRKAKSCICHVCGVHLNRLHSCLYCVFFGCFTKKHIHEHAKAKRHNLAIDLMYGGIYCFLCQDYIYDKDMEIIAKEEQRKAWKMQGVGEKFSTWEPTKRELELLKHNPKRRKITSNCTIGLRGLINLGNTCFMNCIVQALTHTPLLRDFFLSDRHRCEMQSPSSCLVCEMSSLFQEFYSGHRSPHIPYKLLHLVWTHARHLAGYEQQDAHEFLIAALDVLHRHCKGDDNGKKANNPNHCNCIIDQIFTGGLQSDVTCQVCHGVSTTIDPFWDISLDLPGSSTPFWPLSPGSEGNVVNGESHVSGTTTLTDCLRRFTRPEHLGSSAKIKCSGCHSYQESTKQLTMKKLPIVACFHLKRFEHSAKLRRKITTYVSFPLELDMTPFMASSKESRMNGQYQQPTDSLNNDNKYSLFAVVNHQGTLESGHYTSFIRQHKDQWFKCDDAIITKASIKDVLDSEGYLLFYHKQFLEYE

SEQ ID NO: 4712 - DNA, 5350 bp, Homo sapiens
gtggtgtcggtgtcggcagcatccccggcgccctgctgcggtcgccgcgagcctcggcctctgtctcctccccttccagccctcacctccacgcgggaccgctcgcgccagtcaactccgcgcacgttgcccctgcttggcagccaataaaagggggctgaggaaataccggacacggtcacccgttgccagctctagcctttaaattcccggatcgggcacctccacgcaccgcggctagcgccgacacccagctagcgtgcaaggcgccgcggctcagcgcgcaccggcgggcttcgaaatcgcagtcctccggcgaccccgaactccgccccggagcctcagcccctggaaagtgatcctggcatccgagagccaagatgccggcccacttgctgcaggacgatatctctagctcctataccaccaccaccaccaccattacagcgcctccttccagggtcccgcagaatggaggagataagttggagacgacgcccctctacttggaagaagacattcgccctgatataaaagatgatatatataacctcacctacaaggataaggaaggcccaagccccaaggttgaatatgtctggagaaacatcatccttatgtctctgctacacttgggcgccctgtatgggatcactttgattcctacctgcaacttatacacctggctttggggggtattctactattttatcagtgccctgggcataacagcaggagctcatcctctgtggagccactgatcttacaaagctcggctgtccctgtggctctttctgatcattgccaacacaatggcattccagaatgatgtctatgaatgggctcgcgaccaccgtgcccaccacaagttttcagaaacacatgctgatcctcataattcctgacgtggctttttcttctctcacgtgggttggctgcttgtgcgcaaacacccaactgtcaaagagaagggcagtacgctagacttgtctgacctagaagccgagaaactggtgatgttccagaggaggtactacaaacccggcttgctgttgatgtgcttcatcctgcccacgcttgtgccctggtgtttctggggtgaaacttttcaaaacagcgtgttcgttgccactttcttgcgatatgctgtggtgcttaatgccacgtggctggtgaacagtgctgcccacctcttcagatatcgtccttatgacaagaacattagcctccgggagaatatcctggtttcacctggagctgtgggtgagggctttcacaactaccaccactcctttccctatgactactctgccagtgagtaccgctggcacatcaacttcaccacattcttcattgattgcatggccgccttcggtctggcctacgaccagaagaaagtctccaaggccgccatcttggccaggattaaaagaaccggagagggaaactacaagagtggctgagtttggggtccctcaggttccttcttcaaaagccagccaggcagaggttttaatgtctgtttattaactactgaataatgctaccaggatgctaaagatgatgatgataacccattccagtacagtattcttttaaaattcgaaagtattgaaagccaacaactctgcctttatgatgctaaactgacattatttcttctcttatcctctctctcttctaggcccattgtcctccttttcactttgttgctatcatcctcctttctcttattgccacccaggcaagcagctggtcagtctttgttcagtgtccagcttccaaagcctagacaacctttctgtagcctaaaacgaatggtctctgctccagataactctctttccttgagctgttgtgagctttgaagtaggtggcttgagctagagataaaacagaatcttctgggtagtcccctgttaattatcttcagcccaggcttttgctagatggaatggaaaagcaacttcatttgacacaaagcttctaaagcaggtaaattgttgggggagagagttagcatgtatgaatgtaaggatgagggaagcgaagcaagaggaacctcttgccatgatcagacatgcagctgcctacctagtgaggacttcaagccccaccacatagcatgcttcctttctctcctggcttggggtaagaagtggctgtggtgtttggcaatgctaattcaatgccgcaacatatagtttaggccaaggataaagaagagacactttaagtttgtagtaaaagtggtctctgctggggaagggttttcttttctttttttctttaataacaaggagatttcttagttcatgtatcaagaattcttgaagttgggtgtttccataattggtaaaaacagcagctcacagaattttgagtattccatgagctgctcatcacagttctttcctctttctgctctgccatcttcaggatattggttgttcccctcatagtaataagatggctgtggcatttccaaccatccaaaaaaagggaaggattttaggaggtggagtcgggtcaaacaagaaatatatatatacatatatacattgcttagaacgttaaactattagagtatttccctcccaaagagggatgtttgaaaaaactctgaaggagaggaggaattagttgggatgccaatttcctctccactgctgtacatgagatggggaggttgagggacaggatctataggcagcttctaagagcaaacttcacacaggaagggatctgagaacacattgccgggggcttgagaaggttactgagtgagttattgggagtcttaataaaataaactagatattaggtccattcattaattagttccagtttctccttgaaatgagtaaaaactagaaggcttctccccacagtgttgtgccccttcactcattttttattggcggggtggggggctctgttaacatctagcctaagtatagaactgcctggggggcagggttaggaatctcttcactaccctgattcttgattcctggttctaccctgtctgtcccttttcttttactagatctttctcttccctgaacgttttcttctttccctggacaggcagcctcctttgggtgtattcagaggcagtgatgacttgctgtccaggcagctccctcctgcagacagaatgctcagggtcactgaaccactgcttctcttccgaaagtagagctagctgccactttcgcatggcctccggagtgtctccacctacacctctgtgctcccccgccacactgatggctcaagacaaggctggcaaaccctcccagaaatgtctctggcccagaaagcctctctctccctccctctctcatgaggcacagccaagccaagtgctcatgagccagtgggcctgccacagagcaaacgagggtttattttcagtcccctctctctggatcagaaccagagagcatgctgaatgcccctctgcttgctcggtaagggtgccccacctgaatcagtgctctcagctggcagtgcaatgcttgtagaagtaggaggaaacagttctcactgggaagaagcaagggcaagaacccaagtgcctcacctcaaaaggaggccctgttccctggagtcagggtgaactgcaaacctttggctgagacctgggatttgagataccacaaaccctgctgaacagagtgtctgttcagcaaactaaccagcattccctatagcctagggaatagtatagaagtctggcaaaaacagaaacagaacatcagtgttttgagaaccttggactactcctgtccctgtagctcagtcatcaaagcagaagcctggctttgctctattaagattggaaatgtacactaccaaacactcagtccactgttgagccccagtgctggaaggaaggagggcctttcttcctgtgttaattgcatggaggctacaggggttagcctggactaaaggcatccttgtgttttgagctattcacctcagtagaaaagaatctaagggaagatcactgtagtttagctctgttgacctgtgcacctaccccttggaaatgtctgctgttatttctaattccacaggtcataagatgccttcttgatgatatatgaacgataaaaacaactttcacttcttcctattgtaatcgtgtgccatggatctgatctgtaccatgaccctacataaggctggatggcaccctcaggctgagggccccaatgtatgtgtggctgtgggtgtgggtgtgggtgtatctgctgagtaaggaacactattctcaagattctaaagctcaattcaagtgacacattaatgataaactcagatctgatcaagagtctggatttctaacagtccttgcttcggggctgtgctggcaacttaactcgggtgccttacatcttttctaatcatagtgttgcatatgagcctgccctcactccctctgtggaatccctttgcacctgagagcctactgaagtggctggtagaaaaaggggcctgagtgaaggattatcagtatcgcgatttgcaggattcccttctgggcttcattctggaaacttttgttagggctgcttttaagtgcccacatttgatggagggtggaagtaatttgaatgtatttgatttatatatatatatatttttaaggttaaaagatggttgtagcatttaaaatggaaaattttctcctcggtttgctagtatcttgggtgtattctctctaagtgtagctcaaataggtcatcatgaaaggttaaaaaagtgaggtggccatgttacgctggtggttaaggccagggcctctcctaccactgtgccactgacttgctatgtcaccctgggcaagtcacttaactataaggtgcctcagttttccttctgttaaaatggggataataatactgacctacctcaaagggcagttttgaggcgtgactaatgctttttagaaagcattttgggatccttcagcacagggattctcaagacctgagtattttttataatagcaatgtccaccatcaacttgatatgtccgtgtgtcccagatgctgtcattagtctatatggttctccaaaaaattgaatgaatccattggagaagcagtggattaactagccagacaaaatttgagaatgcataaaaaacacattgccacggaaacatacagaggatgccttttctgtgattgggtgggattttttccctttttatgtgggacatagtagttacttgtgacaagaataattttggaataatttctattaacatcaactctgaagctaattgtactaatctgagattgtgtttgtttataataaaagtgaagtaatc

SEQ ID NO: 4713 - DNA, 1446 bp, Homo sapiens
acggtcacccgttgccagctctagcctttaaattcccggatcgggcacctccacgcaccgcggctagcgccgacacccagctagcgtgcaaggcgccgcggctcagcgcgcaccggcgggcttcgaaatcgcagtcctccggcgaccccgaactccgccccggagcctcagcccctggaaagtgatcctggcatccgagagccaagatgccggcccacttgctgcaggacgatatctctagctcctataccaccaccaccaccaccattacagcgcctccttccagggtcccgcagaatggaggagataagttggagacgacgcccctctacttggaagaagacattcgccctgatataaaagatgatatatataacctcacctacaaggataaggaaggcccaagccccaaggttgaatatgtctggagaaacatcatccttatgtctctgctacacttgggcgccctgtatgggatcactttgattcctacctgcaacttatacacctggctttggggggtattctactattttatcagtgccctgggcataacagcaggagctcatcctctgtggagccactgatcttacaaagctcggctgtccctgtggctctttctgatcattgccaacacaatggcattccagaatgatgtctatgaatgggctcgcgaccaccgtgcccaccacaagttttcagaaacacatgctgatcctcataattcctgacgtggctttttcttctctcacgtgggttggctgcttgtgcgcaaacacccaactgtcaaagagaagggcagtacgctagacttgtctgacctagaagccgagaaactggtgatgttccagaggaggtactacaaacccggcttgctgttgatgtgcttcatcctgcccacgcttgtgccctggtgtttctggggtgaaacttttcaaaacagcgtgttcgttgccactttcttgcgatatgctgtggtgcttaatgccacgtggctggtgaacagtgctgcccacctcttcagatatcgtccttatgacaagaacattagcctccgggagaatatcctggtttcacctggagctgtgggtgagggctttcacaactaccaccactcctttccctatgactactctgccagtgagtaccgctggcacatcaacttcaccacattcttcattgattgcatggccgccttcggtctggcctacgaccagaagaaagtctccaaggccgccatcttggccaggattaaaagaaccggagagggaaactacaagagtggctgagtttggggtccctcaggttccttcttcaaaagccagccaggcagaggttttaatgtctgtttattaactactgaataatgctaccaggatgctaaagatgatgatgataacccattccagtacagtattcttttaaaattcgaaagtattgaaagcc

SEQ ID NO: 4714 - DNA, 525 bp, Homo sapiens
cttcccttttgcggccatcaccgaagcgggagcggccaaaatgaagtttaatccctttgtgacttccgaccgaagcaagaatcgcaaaaggcatttcaatgcaccttcccacattcgaaggaagattatgtcttcccctctttccaaagagctgagacagaagtacaacgtgcgatccatgcccatccgaaaggatgatgaagttcaggttgtacgtggacactataaaggtcagcaaattggcaaagtagtccaggtttacaggaagaaatatgttatctacattgaacgggtgcagcgggaaaaggctaatggcacaactgtccacgtaggcattcaccccagcaaggtggttatcactaggctaaaactggacaaagaccgcaaaaagatcctcgaacggaaagccaaatctcgccaagtaggaaaggaaaagggcaaatacaaggaagaaaccattgagaagatgcaggaataaagtaatcttatatacaagctttgattaaaacttgaaacaaagaaaaa

SEQ ID NO: 4715 - protein, 145 aa, Homo sapiens [sequence omitted]

SEQ ID NO: 4716 - DNA, 3807 bp, Homo sapiens
ggagaaggcgggcggaagttccacgccaagatactggattcggtgctgaggcggcggctgcggcacgggaaaggctcagtgactgaagctccaaaggccagcaggctggtggggacgtgaccgaagcgaggctctggttccctttcggtgggcgccatttgagcctcatctctggcttccccaggatgcgccggcagccggggagcggctccgggcgcgaggtctgaggatgatctttcctgtcgcccgctacgcgctccggtggctgcgacggcccgaagaccgtgccttttcccgcgccgccatggagatggccctccgaggcgtgcggaaagtcctctgtgtggccgaaaaaaacgacgcggccaaggggatcgccgacctgctgtcaaacggtcgcatgaggcggagagaaggactttcaaaattcaacaagatctatgaatttgattatcatctgtatggccagaatgttaccatggtaatgacttcagtttctggacatttactggctcatgatttccagatgcagtttcgaaaatggcagagctgcaaccctcttgtcctctttgaagcagaaattgaaaagtactgcccagagaattttgtagacatcaagaaaactttggaacgagagactcgccagtgccaggctctggtgatctggactgactgtgatagagaaggcgaaaacatcgggtttgagattatccacgtgtgtaaggctgtaaagcccaatctgcaggtgttgcgagcccgattctctgagatcacaccccatgccgtcaggacagcttgtgaaaacctgaccgagcctgatcagagggtgagcgatgctgtggatgtgaggcaggagctggacctgaggattggagctgcctttactaggttccagaccctgcggcttcagaggatttttcctgaggtgctggcagagcagctcatcagttacggcagctgccagttccccacactgggctttgtggtggagcggttcaaagccattcaggcttttgtaccagaaatcttccacagaattaaagtaactcatgaccacaaagatggtatcgtagaattcaactggaaaaggcatcgactctttaaccacacggcttgcctagttctctatcagttgtgtgtggaggatcccatggcaactgtggtagaggtcagatctaagcccaagagcaagtggcggcctcaagccttggacactgtggagcttgagaagctggcttctcgaaagttgagaataaatgctaaagaaaccatgaggattgctgagaagctctacactcaagggtacatcagctatccccgaacagaaacaaacatttttcccagagacttaaacctgacggtgttggtggaacagcagacccccgatccacgctggggggcctttgcccagagcattctagagcggggtggtcccaccccacgcaatgggaacaagtctgaccaagctcaccctcccattcaccccaccaaatacaccaacaacttacagggagatgaacagcgactgtacgagtttattgttcgccatttcctggcttgctgctcccaggatgctcaggggcaggagaccacagtggagatcgacatcgctcaggaacgctttgtggcccatggcctcatgattctggcccgaaactatctggatgtgtatccatatgatcactggagtgacaagatcctccctgtctatgagcaaggatcccactttcagcccagcaccgtggagatggtggacggggagaccagcccacccaagctgctcaccgaggccgacctcattgccctcatggagaagcatggcattggtacggatgccactcatgcggagcacatcgagaccatcaaagcccggatgtacgtgggcctcaccccagacaagcggttcctccctgggcacctgggcatgggacttgtggaaggttatgattccatgggctatgaaatgtctaagcctgacctccgggctgaactggaagctgatctgaagctgatctgtgatggcaaaaaggacaaatttgtggttctaaggcagcaagtgcagaaatacaagcaggttttcattgaagcggtggctaaagcaaagaaattggacgaggccttggcccagtactttgggaatgggacagagttggcccagcaagaagatatctacccagccatgccagagcccatcaggaagtgcccacagtgcaacaaggacatggtccttaagaccaagaagaatggcgggttctacctcagctgcatgggtttcccagagtgtcgctcagctgtgtggcttcctgactcggtgctggaggccagcagggacagcagtgtgtgtccagtttgtcagccacaccctgtgtacaggttaaagttaaagtttaagcgcggtagccttcccccgaccatgcctctggagtttgtttgctgcatcggcggatgcgacgacaccctgagggagatcctggacctgagattttcagggggcccccccagggctagccagccctctggccgcctgcaggctaaccagtccctgaacaggatggacaacagccagcacccccagcctgctgacagcagacagactgggtcctcaaaggctctggcccagaccctcccaccacccacggctgctggtgaaagcaattctgtgacctgcaactgtggccaggaggctgtgctgctcactgtccgtaaggagggccccaaccggggccggcagttctttaagtgcaacggaggtagctgcaacttcttcctgtgggcagacagccccaatccgggagcaggagggcctcctgccttggcatatagacccctgggcgcctccctgggatgcccaccaggcccagggatccacctaggtgggtttggcaaccctggtgatggcagtggtagtggcacatcctgcctttgcagccagccctccgtcacacggactgtgcagaaggatggacccaacaaggggcgccagttccacacatgtgccaagccgagagagcagcagtgtggctttttccagtgggtcgatgagaacaccgctccagggacttctggagccccgtcctggacaggagacagaggaagaaccctggagtcggaagccagaagcaaaaggccccgggccagttcctcagacatggggtccacagcaaagaaaccccggaaatgcagcctttgccaccagcctggacacacccgtcccttttgtcctcagaacagatgagctcagggtagggtagagaacgccactttctcagacctgtcccctttgtgtttagaaatgagttaaccaggaccaagtggccatttagtgtcctggaaacttagaggacagtgttggcctttggagtcgggccttcttgtgttaaggggcacaaggtccagatcactctggagcaggccagctctgctggacagtgaccctcttcccaggcctcaggagtgaccatagccactgctgaaaagtcacgcagctgctccctcggaccccccaaggatggttgctgttagcagaggattggtgcagtcccagctgaagcccactgtgtgccaaaggaagaagctcccagggctgcttccttcacctgcagaaagccccaagtgagccaccagcactcatggggcagtccctgtccaggctgcccagggcttctcatagacgtcctgagaaggacggtgtaatgcaaggaaatggctgtggtaacactgatccttcagaagaagcttcattccctcttaatctagttaagccaggacatccagaattcattgctttaataaagaacccaggccggg

SEQ ID NO: 4717 - protein, 1001 aa, Homo sapiens
MIFPVARYALRWLRRPEDRAFSRAAMEMALRGVRKVLCVAEKNDAAKGIADLLSNGRMRRREGLSKFNKIYEFDYHLYGQNVTMVMTSVSGHLLAHDFQMQFRKWQSCNPLVLFEAEIEKYCPENFVDIKKTLERETRQCQALVIWTDCDREGENIGFEIIHVCKAVKPNLQVLRARFSEITPHAVRTACENLTEPDQRVSDAVDVRQELDLRIGAAFTRFQTLRLQRIFPEVLAEQLISYGSCQFPTLGFVVERFKAIQAFVPEIFHRIKVTHDHKDGIVEFNWKRHRLFNHTACLVLYQLCVEDPMATVVEVRSKPKSKWRPQALDTVELEKLASRKLRINAKETMRIAEKLYTQGYISYPRTETNIFPRDLNLTVLVEQQTPDPRWGAFAQSILERGGPTPRNGNKSDQAHPPIHPTKYTNNLQGDEQRLYEFIVRHFLACCSQDAQGQETTVEIDIAQERFVAHGLMILARNYLDVYPYDHWSDKILPVYEQGSHFQPSTVEMVDGETSPPKLLTEADLIALMEKHGIGTDATHAEHIETIKARMYVGLTPDKRFLPGHLGMGLVEGYDSMGYEMSKPDLRAELEADLKLICDGKKDKFVVLRQQVQKYKQVFIEAVAKAKKLDEALAQYFGNGTELAQQEDIYPAMPEPIRKCPQCNKDMVLKTKKNGGFYLSCMGFPECRSAVWLPDSVLEASRDSSVCPVCQPHPVYRLKLKFKRGSLPPTMPLEFVCCIGGCDDTLREILDLRFSGGPPRASQPSGRLQANQSLNRMDNSQHPQPADSRQTGSSKALAQTLPPPTAAGESNSVTCNCGQEAVLLTVRKEGPNRGRQFFKCNGGSCNFFLWADSPNPGAGGPPALAYRPLGASLGCPPGPGIHLGGFGNPGDGSGSGTSCLCSQPSVTRTVQKDGPNKGRQFHTCAKPREQQCGFFQWVDENTAPGTSGAPSWTGDRGRTLESEARSKRPRASSSDMGSTAKKPRKCSLCHQPGHTRPFCPQNR

SEQ ID NO: 4718 - DNA, 605 bp, Homo sapiens
gccactgctgaaaagtcacgcagctgctccctcggaccccccaaggatggttgctgttagcagaggattggtgcagtcccagctgaagcccactgtgtgccaaaggaagaagctcccagggctgcttccttcacctgcagaaagccccaagtgagccaccagcactcatggggcagtccctgtccaggctgcccagggcttctcatagacgtcctgagaaggacggtgtaatgcaaggaaatggctgtggtaacactgatccttcagaagaagcttcattccctcttaatctagttaagccaggacatccagaattcattgctttaataaagaacccaggccgggtgcagtggctcatgcctgtaatcccagcactttgggaggctgtggggggcggattgcctgagctcaggagttcgagaccagccagggcaacatggtgaaaccctgtctctactaaaatacaaaaaattagccaggtgtggcggtgtgcgcctgtagacccggctactcaggaggctgaggttgcagtgagctgagatcgggccattgcactccagcctgggcaaaaagagtgaaactctgtctcaagaaaaaaaaaaaaa

SEQ ID NO: 4719 - DNA, 4142 bp, Homo sapiens
ctagcccggcgcggcccggcagcgagagcggcgccatggaggccaccggggtgctgccgttcgtgcgtggcgtggacctcagcggcaacgacttcaagggcggctacttccctgagaatgtcaaggccatgaccagcctgcggtggctgaagctgaaccgcactggcctctgctacctgcccgaggagctggccgccctgcagaagctggaacacttgtctgtgagccacaacaacctgaccacgcttcatggggagctgtccagcctgccatcgctgcgcgccatcgtggcccgagccaacagtctgaagaattccggagtccccgatgacatcttcaagctagatgatctctcagtcctggacttgagccacaaccagctgacagagtgcccgcgggagctggagaacgccaagaacatgctggtgctgaacctcagccacaacagcatcgacaccatccccaaccagctcttcatcaacctcactgacctactatacctggacctcagcgagaaccgcctggagagcctgcccccgcagatgcgccgcctggtgcacctgcagacgctcgtgctcaatggaaaccccctgctgcatgcacagctccggcagctcccagcgatgacggccctgcagaccctgcacctgcggagcacccagcgcacccagagcaacctgcccaccagcctggagggtctgagcaacctcgcagacgtggatctgtcctgcaatgacctgacacgggtgcccgagtgtctgtacaccctccccagcctgcgccgcctcaacctcagcagcaaccagatcacggagctgtccctgtgcatagaccagtgggtgcacgtggaaactctgaacctgtcccgaaatcagctcacctcactgccctcagccatttgcaagctgagcaagctgaagaagctgtacctgaattccaacaagctggactttgacgggctgccctcaggcattggcaagctcaccaacctggaagagttcatggctgccaacaacaacctggagctggtccctgaaagtctctgcaggtgcccaaagctgaggaaacttgtcctgaacaagaaccacctggtgaccctcccagaagccatccatttcctgacggagatcgaggtcctggatgtgcgggagaaccccaacctggtcatgccgcccaagcccgcagaccgtgccgctgagtggtacaacatcgacttctcgctgcagaaccagctgcggctagcgggtgcctctcctgctaccgtggctgcagctgcagctgcagggagtgggcccaaggaccctatggctcgcaagatgcgactgcggaggcgcaaggattcagcccaggatgaccaggccaagcaggtgctgaagggcatgtcagatgttgcccaggagaagaacaaaaagcaggaggagagcgcagatgcccgggcccccagcgggaaggtgcggcgttgggaccagggcctggagaagccccgccttgactactccgagttcttcacggaggacgtgggccagctgcccggactgaccatctggcagatagagaacttcgtgcctgtgctggtggaggaagccttccacggcaagttctacgaggctgactgctacattgtgctcaagacctttctggatgacagcggctccctcaactgggagatctactactggattggcggggaggccacactcgacaagaaagcttgctctgccatccacgctgtcaacttgcgcaactacctgggtgctgagtgccgcactgtccgggaggagatgggcgatgagagcgaggagttcctgcaggtgtttgacaacgacatctcctacattgagggtggaacagccagtggcttctacactgtggaagacacacactatgtcaccaggatgtatcgtgtgtatgggaaaaagaacatcaagttggagcctgtgcccctcaaggggacctctctggacccaaggtttgttttcctgctggaccgagggctagacatctacgtatggcggggggcccaggccacactgagcagcaccaccaaggccaggctctttgcagagaaaattaacaagaatgagcggaaagggaaggctgagatcacactgctggtgcagggccaggagctcccagagttctgggaggcactgggtggggagccctctgagatcaagaagcacgtgcctgaagacttctggccgccgcagcccaagctgtacaaggtgggcctgggcttgggctacctggagctgccacagatcaactacaagctctccgtggaacataagcagcgtcccaaggtggagctgatgccaagaatgcggctgctgcagagtctgctggacacgcgctgcgtgtacattctggactgttggtccgacgtgttcatctggctcggccgcaagtccccgcgcctggtgcgcgctgccgccctcaagctgggtcaggagctgtgcgggatgctgcaccggccacgccatgccacggtcagccgcagcctcgagggcaccgaggcgcaggtgttcaaggccaagttcaagaattgggacgatgtgttgacggtggactacacacgcaatgcggaggccgtgctgcagagcccgggtctctccgggaaggtgaaacgcgacgccgagaagaaagaccagatgaaggctgacctcactgcgcttttcctgccgcggcagccgcccatgtcgctggccgaggcggagcagctgatggaggagtggaacgaagacctagacggcatggagggtttcgtgctggagggcaagaagtttgcgcggctgccggaagaggagtttggccacttctacacgcaggactgctacgtcttcctctgcaggtactgggtgcctgtggagtacgaggaggaggaaaagaaggaagacaaggaggagaaggccgagggcaaagaaggcgaggaagcaaccgctgaggcagaggagaagcagccagaggaggacttccagtgcatcgtgtacttctggcagggccgtgaagcctccaatatgggctggctcaccttcaccttcagcctgcaaaagaagttcgagagcctcttccctgggaagctggaggtggtacgcatgacgcagcagcaggagaaccccaagttcctgtcccatttcaagaggaagttcatcatccaccggggcaagaggaaggcggtccagggcgcccaacagcccagcctctaccagatccgcaccaacggcagcgccctctgcacccggtgcatccagatcaacaccgactccagcctcctcaactccgagttctgcttcatcctcaaggttccctttgagagtgaggacaaccagggcatcgtgtatgcctgggtgggccgggcatcagaccctgacgaagccaagttggcagaagacatcctgaacaccatgtttgacacctcctacagcaagcaggttatcaacgaaggtgaggagcctgagaacttcttctgggtgggcattggggcacagaagccctatgatgacgatgccgagtacatgaaacacacacgtctcttccggtgctccaacgagaagggctactttgcagtgactgagaaatgctccgacttttgccaagatgacctggcagatgatgacatcatgttgctagacaatggccaagaggtctacatgtgggtggggacccagactagccaggtggagatcaagctgagcctgaaggcctgccaggtatatatccagcacatgcggtccaaggaacatgagcggccgcgccggctgcgcctggtccgcaagggcaatgagcagcacgcctttacccgctgcttccacgcctggagcgccttctgcaaggccctggcctaagacaggctggcacagccccaggcttggtgaggaagaggaaggggcctcatccactgtctgctagcaaagaatgtactcaggtgacaccacctgctccagccacgtccagtgccacagtccccagtagcctcaagcagcaccaatggggatgaccctgacaggtgccctcaggggtctgggaaatccaactctctccacagtgtgagtgcacgtgtgaagccccctcactcttccgctagggataaagcagatgtggatgccctttaagagatattaaatgcttttattttcaatatt

SEQ ID NO: 4720 - protein, 1269 aa, Homo sapiens
MEATGVLPFVRGVDLSGNDFKGGYFPENVKAMTSLRWLKLNRTGLCYLPEELAALQKLEHLSVSHNNLTTLHGELSSLPSLRAIVARANSLKNSGVPDDIFKLDDLSVLDLSHNQLTECPRELENAKNMLVLNLSHNSIDTIPNQLFINLTDLLYLDLSENRLESLPPQMRRLVHLQTLVLNGNPLLHAQLRQLPAMTALQTLHLRSTQRTQSNLPTSLEGLSNLADVDLSCNDLTRVPECLYTLPSLRRLNLSSNQITELSLCIDQWVHVETLNLSRNQLTSLPSAICKLSKLKKLYLNSNKLDFDGLPSGIGKLTNLEEFMAANNNLELVPESLCRCPKLRKLVLNKNHLVTLPEAIHFLTEIEVLDVRENPNLVMPPKPADRAAEWYNIDFSLQNQLRLAGASPATVAAAAAAGSGPKDPMARKMRLRRRKDSAQDDQAKQVLKGMSDVAQEKNKKQEESADARAPSGKVRRWDQGLEKPRLDYSEFFTEDVGQLPGLTIWQIENFVPVLVEEAFHGKFYEADCYIVLKTFLDDSGSLNWEIYYWIGGEATLDKKACSAIHAVNLRNYLGAECRTVREEMGDESEEFLQVFDNDISYIEGGTASGFYTVEDTHYVTRMYRVYGKKNIKLEPVPLKGTSLDPRFVFLLDRGLDIYVWRGAQATLSSTTKARLFAEKINKNERKGKAEITLLVQGQELPEFWEALGGEPSEIKKHVPEDFWPPQPKLYKVGLGLGYLELPQINYKLSVEHKQRPKVELMPRMRLLQSLLDTRCVYILDCWSDVFIWLGRKSPRLVRAAALKLGQELCGMLHRPRHATVSRSLEGTEAQVFKAKFKNWDDVLTVDYTRNAEAVLQSPGLSGKVKRDAEKKDQMKADLTALFLPRQPPMSLAEAEQLMEEWNEDLDGMEGFVLEGKKFARLPEEEFGHFYTQDCYVFLCRYWVPVEYEEEEKKEDKEEKAEGKEGEEATAEAEEKQPEEDFQCIVYFWQGREASNMGWLTFTFSLQKKFESLFPGKLEVVRMTQQQENPKFLSHFKRKFIIHRGKRKAVQGAQQPSLYQIRTNGSALCTRCIQINTDSSLLNSEFCFILKVPFESEDNQGIVYAWVGRASDPDEAKLAEDILNTMFDTSYSKQVINEGEEPENFFWVGIGAQKPYDDDAEYMKHTRLFRCSNEKGYFAVTEKCSDFCQDDLADDDIMLLDNGQEVYMWVGTQTSQVEIKLSLKACQVYIQHMRSKEHERPRRLRLVRKGNEQHAFTRCFHAWSAFCKALA

SEQ ID NO: 4721 - DNA, 3669 bp, Homo sapiens
agactgtggagcatggcttccccaatcagcccagcgccctggccttcgacccggaacttcgcatcatggccatcggcaccaggtctggggctgtcaagatctatggtgcacctggcgtggagttcacaggcctgcaccgggatgcagccactgtcacacagatgcacttcttgaccggccagggccgcctcctgtccctgcttgatgacagcagtctgcatctctgggagattgtccaccataatggctgtgcccacctggaagaagcactcagtttccagctgcccagccggcccggctttgatggtgccagtgctccgctcagccttacccgagtcacagtggtcctgctggtggctgccggcgacatagcagccctgggcactgagggcagcagtgtcttcttcctggatgttaccaccctgaccctgctcgaggggcagacgcttgccccaggcgaggttctgcgcagcgtgccagacgactaccgctgtgggaaggcactgggccccgtggagtcactccagggacacctgcgggaccccacaaagattctcattggctacagccggggcctgctggtcatctggaaccaggcctcgcagtgtgtggaccacatcttcctggggaaccagcagctggagagcctatgctgggggcgtgatagcagcactgtggtcagctcacacagcgatggcagctatgctgtctggtctgtggatgccggcagcttcccaacgctgcagcccacggtagccaccacaccttacggcccctttccctgcaaggccattaacaagattctgtggcggaactgtgaatctgggggccactttatcatcttcagcggtggcatgccccgtgccagctatggtgaccgccactgtgtaagtgtgcttcgagccgagacattggtgacgctggacttcacttcccgcatcatcgacttcttcacagtgcacagcacacggcccgaggatgaatttgatgacccccaggccctggctgtgctgctggaagaggagctggtggtgctggacctgcagactcctggctggccagctgtgcctgccccatacctggccccgctgcactcctctgcaatcacttgctcggcccacgtggccagtgtccccgccaagctgtgggcccgcattgtgagcgctggcgagcagcagagcccccagcctgtctccagtgccttgagctggcccatcactgggggccgaaacctggcccaggagccgtcacagcgagggctgctgctgacgggccatgaggacggcaccgtgaggttctgggatgcctcgggtgtggcgctgcggccgctctataagctgagcacagctggcctcttccagacagactgtgagcacgctgacagcctggcccaggctgccgaggacgactggccacccttccgcaaggtgggctgcttcgatccctacagtgacgatccccggcttggcgtgcagaaggttgctctctgcaagtatacagcccagatggtggtggctggcactgcaggccaggtgctggtactggagcttagtgatgtgccggtggagcaggcggtcagcgtggccatcatagacctcctccaggaccgcgagggcttcacatggaagggccacgagcggctgagcccacgcacggggccgctgccctggcctgctggcttccagccccgtgtcctggtgcagtgcctgccgccagctgctgtaaccgctgtcacactccacaccgagtggagcctcgtggcttttggcaccagtcatggctttggcctcttcgactaccagcgcaagagccctgtgctggccaggtgcactcttcaccccaatgactccctggccatggagggtccgctctcccgggtgaagtctctcaagaagtcactgcgccagtctttccggcgcattcgcaagagtcgtgtctctggcaagaagcgggctgctaatgccagcagcaaggaagccaatgcacagctggctgagcaggcctgcccccacgacgtggagatgacgcccgtgcagcgccgcattgagccccgctctgccgatgactccttgtcgggtgtcgtgcgttgcctatactttgccgacacattccttcgagatggggcccaccacgggcccaccatgtgggctggcaccaactcaggctctgtgttcgcctatgcactggaggtgccggcagcagcagtgggtggtgagaagcggcctgagcaagcggtggaggccgtgctgggcaaggaggtgcagctgatgcaccgggcgcctgtggtggccattgccgtgttggacgggcgtggccgcccactgcccgagccctacgaggcctcacgggacctggcgcaggcacctgacatgcagggtggtcacgctgtgctcatcgcatctgaggagcagttcaaggtgttcacactgcccaaggtgagcgcgaagaccaagttcaagctgacggcccatgagggctgtcgtgtgcgcaaggtggcactggccacgtttgccagtgtggcctgcgaggactatgctgagacctgcctggcctgcctcaccaacctgggtgacgtccacgtcttctcggtgcctggcctgcggccccaggtgcactattcctgcatccggaaggaggacatcagcggcatcgcttcgtgcgtctttacgcgccatggccagggcttttacctgatatccccatcagaatttgaacgcttctccctaagtgcccggaacatcacagagccgctctgctctctggacattaactggccccgcgatgccacccaggccagttacaggatccgagagtcacccaagctgagccaggctaacgggaccccaagcatcctgctggccccacagagccttgatggaagccctgatccagcccacagcatgggacctgacaccccggagccacccgaggctgcactctcacccatgtccatcgactcagccaccagtgctgacaccacgctggacacgacaggggacgtcacagtggaagatgtgaaggatttcctgggctcctctgaggagtcagagaagaacctgaggaacctggcagaagacgaggcccacgcctgtgccatcctgatcaaatgaggaaggccagaactatcccgacctccacctgccctgctcggagctggagtgctggatccctggcacctgcctggccccttaacatagaaccacgcctgctaacctgtaggctccactgggacctgctgtcctgtcccgcctgaccctgggccctggagcagcaccagccccagggtgtgggcctgggacctgggccagaactgagccctcctgcaggcatttggctgccctgggggcccactgcctagggaagaggacaggtggggcccagcacctgtgccacctccccccctccacacaccatccttccccctcactttgcagagtatttttccttttttttttttttcttaaagacggagtcttgctctgtcgcccaggctggagtgcagtggccccatctctgctcactgcaagccccgccttctgggttcccgccattcttctgcctcagcctcccaagtagctgggactacaggcgcccaccaccacgcccagctaattttttctgtatttttagtagagatggggtttcaccatgttagccaggatggtctcg

SEQ ID NO: 4722 - protein, 1062 aa, Homo sapiens
MMKFRFRRQGADPQREKLKQELFAFNKTVEHGFPNQPSALAFDPELRIMAIGTRSGAVKIYGAPGVEFTGLHRDAATVTQMHFLTGQGRLLSLLDDSSLHLWEIVHHNGCAHLEEALSFQLPSRPGFDGASAPLSLTRVTVVLLVAASDIAALGTEGSSVFFLDVTTLTLLEGQTLAPGEVLRSVPDDYRCGKALGPVESLQGHLRDPTKILIGYSRGLLVIWNQASQCVDHIFLGNQQLESLCWGRDSSTVVSSHSDGSYAVWSVDAGSFPTLQPTVATTPYGPFPCKAINKILWRNCESGGHFIIFSGGMPRASYGDRHCVSVLRAETLVTLDFTSRIIDFFTVHSTRPEDEFDDPQALAVLLEEELVVLDLQTPGWPAVPAPYLAPLHSSAITCSAHVASVPAKLWARIVSAGEQQSPQPVSSALSWPITGGRNLAQEPSQRGLLLTGHEDGTVRFWDASGVALRPLYKLSTAGLFQTDCEHADSLAQAAEDDWPPFRKVGCFDPYSDDPRLGVQKVALCKYTAQMVVAGTAGQVLVLELSDVPVEQAVSVAIIDLLQDREGFTWKGHERLSPRTGPLPWPAGFQPRVLVQCLPPAAVTAVTLHTEWSLVAFGTSHGFGLFDYQRKSPVLARCTLHPNDSLAMEGPLSRVKSLKKSLRQSFRRIRKSRVSGKKRAANASSKEANAQLAEQACPHDVEMTPVQRRIEPRSADDSLSGVVRCLYFADTFLRDGAHHGPTMWAGTNSGSVFAYALEVPAAAVGGEKRPEQAVEAVLGKEVQLMHRAPVVAIAVLDGRGRPLPEPYEASRDLAQAPDMQGGHAVLIASEEQFKVFTLPKVSAKTKFKLTAHEGCRVRKVALATFASVACEDYAETCLACLTNLGDVHVFSVPGLRPQVHYSCIRKEDISGIASCVFTRHGQGFYLISPSEFERFSLSARNITEPLCSLDINWPRDATQASYRIRESPKLSQANGTPSILLAPQSLDGSPDPAHSMGPDTPEPPEAALSPMSIDSATSADTTLDTTGDVTVEDVKDFLGSSEESEKNLRNLAEDEAHACAILIK

SEQ ID NO: 4723 - DNA, 7984 bp, Homo sapiens
  unsure 1395: unknown base
  unsure 1398: unknown base
  unsure 1399: unknown base
  unsure 1406: unknown base
  unsure 1408: unknown base
gaggatgcagagtgggagaccttaaaaccgtctgatctggctgctaaagcgagtgtctgacgaccacccattaacaccagcgagtagcgtttgctcacggctttaggataagaagcctggaatggtcccccctccgccgggagaagaaagccagacggtcatccttccacctggctggcagagctacctgtcgcctcagggccggcggtactatgtcaacacgaccaccaatgagaccacctgggaacgtcccagcagttctcctgggattccagccagccctggctctcacaggagctctctgcctccaacagtgaatggataccacgcatcagggaccccagcgcaccctccagagactgcccacatgagtgtccgaaaatccaccggtgattcccagaacctgggatcctcatcgccaagcaaaaagcagagcaaggaaaacaccatcacaataaactgtgtgacgttccctcacccagacacgatgccggaacagcagctgctgaaaccaaccgagtggagctactgcgactacttctgggctgataagaaggacccccaaggcaacggcaccgtggctgggtttgaactactgctccagaaacagctgaagggcaaacaaatgcagaaggaaatgtcagaattcatccgggaaaggataaagattgaagaagactatgcgaagaacttagctaagctctctcagaactccttggcttcacaggaggaaggctccttgggagaggcgtgggcccaggtgaagaagagcctggcggacgaagcagaagttcacctcaagttctctgccaagcttcacagcgaggtggagaagcccctgatgaacttccgtgagaacttcaagaaagacatgaagaagtgcgaccaccacattgccgaccttcgcaagcagctcgccagccgctatgcctcggtggagaaggcccggaaagccctcacagagcggcagagagacctggagatgaagacccagcagctggagatcaagctgagcaacaagacagaggaggacatcaagaaggcgcggagaaagtccacacaggctggagacgacctcatgcgctgtgtggatctctacaaccaggcccagtccaaatggtttgaagagatggtgaccaccacattggagctagagcggctggaggtggagagggtagagatgatccggcagcacctgtgccagtacacgcagctgcggcatgaaacagacatgttcaaccaaagcacagtcgagcccgtggatcagctgcttcgaaaagtggacccggccaaagacagggagctgtgggtcagagagcacaagacgggcaacatccgccctgtggacatggagatctagatgggcctgtgcagcttcggggggtcctgctgggngannggggggncntgggctcccaccatggggcccatgccgagtggatgccccccaccctctctcctgggccactgaggagaggggagagagctggtgattccagaagggtgacccggacagcctagctgggggctcccccatattcccaggcccagaagacagacccacagccctgcccttgtctctgaggctgaagaccccctgactcccatgctgtgcttgccgctctgaaacaaacagaggctggaactttgtggtccttgccgagttttgtaggggtcactgtcacatgcttgtgccctggaagccccaaggctcttcctccagctggctcccttgtctccagggctttggaggatcagggtagggagggctctgtctctaagccaggtgtcaggatcagaatcatgggtagaaggtgccattcagctcacagccgcacccagaatcctttgcagccctccttctttatttttttcccattgcattctgggagtccacatctggctttctcagccactgttcatcaccaggggttttaggaggaaggcttggctcctgtcttcccagacccaccatgcctggagaggtcaggatggaactacctcattcggcaaattagccccaaattgagcgctgaatcgtgtcccatgagatcaggcgccatctgtaaagtctcctctggaaatgccaatccatccttcccccagctgcttcctcggggaggcccctgcccccaccctgccagcccttcccagtctcattagaggaagctttccaaagttctcagttatcaagacctcatccagctcgtccaaaggcttcagggatggaaacaaaccagctcgtctcagaggccagcaagctggggcctgtccgccacggtgccctgtgcacctttgggctgccctggcccccactctcccgggccgcccaccacaggctcttaatggggccgggtcagtcctacatgtgagatgggttagggcaagtctttgccatcccccagatggctctgtcttcttgtgtatggcagggctgggactgctgtcccttgtacagttttctgtcactggtgggcactggacaggcatagcagactctcttgtggccacactaggttgtcgcctttcaggcagtgtcccgccacctttgcttcccgctccttctggacattccagagccctgcaccaaacccttacttggtgtctgcacctcctttccctctctccatcttccaatccctggaaaagtctggtctgagtgtgacttgggaagctttcagtgctgctgtttggcccagctcattactttctccctttctctaccacagcaaacacattctccaccatgtcagtctaaagagtctaaaggggccgggagaagcatgagcgaggggcagattctagtcgggagcccatgccctggaaatccatctttcttcatctttcccattgaccactttgggtttgacctgcacatctgcagtgagggcagaattcaacaagcacaactcactggtctttcagtcaacgtgctagaaaccgatgacttattaatctctaattttttggcgcctctttcattgaatgagaattgctttcgtatagttcacattagaaaaatgcctaatatactaaagtaaaccaaacgttgtcacttttctcttgttcttgaaacattgcaaccaaaaaggtcagcacaaaggccttcacctacgtgaagacctcctggtaggatctgtccatgggatggagaaccactctgtccagatctggggttgggtcatgacaccagctaccaattttagaatattatttcttggtttctttatgaaaaatgggtgctagtggtaattgctttgtggcttagtaaactactctgtggatgatttccaaacattcaaagccaatagccttgttattaacaagatattttgagtacaatatggctcattgacttttccattacatctgaggattccagagtcctctgttcatccctgggatagagtgagccctcttgcgtcttccagggtagctcaggttggcccagtttgggccagtccatttttggaggtcactctttcccccctcatcccctcacctccttctctttacccccttcacgtacttcctttctttcttccctctgttattcattcatcaagcaggttaaagccattgtgctaagatctaatctgaggacactataatggccctgtcgtcagggaagcccgtgatcgctcgttttcaggggtcttaccggtcagcaaccttggcattgatacataggcactctacagaatttaagttttcagaggtaagtctgttgttctgattaatctgcattcattcagcgaatgctcaagacaagccaggcatgctgagaagcggcgctctagttgtatgtaagatgggcattcctctgctctcctctattctccatgtcgactgagaagagtataataagaacattgtaccctctccacacttaaccctctgggattctttattataatataaaccaccgtcgtgaggcatttacctgttggatggaaggtagacagcaacaagattttaatcacctggtcaccagaccctcacggcccatatccaattcgaatttcagaaatttctctgtttgctttaaataactctttacaaataagggtcgggcacggtggctcacgcctgtaatcccagctctttgggaggccgaggtgggcagatcacgaggtcaggagatcgagaccatcctggctaacatggtgaaaccccgtctctgctaaaaatacaaaaaattagccagatgtggtggtgcacacctgtagtcccaactattcggcaggctgaggcagtagaatcgcttgaacctgggaggcggagattgcagtgaaccaagatcgggccactgcactccagcttgggtgacagagcaagactccatctcaaaaaaattataaataactctttgcaaataggaaagtgaagctcaagggtaaccagtgaggctatgaaattgccagtgaattaagaccagggctagagtcaacagtccagaacccctatccgtatgaacaggggcccgtttctggttgaaatcaaggttaggatgcaactgagaaaataaaagactgcactttggagaggcaagcacgctatccgggttgttgttttgttttatgtcttggtgcttaggtgaggacttagctgggtttattcaaagtgggcgggtctgggctattcttgagaatgtcccttccatttctgagaacaagtcagccccttctacctgcctccacccaggagactgatgcacaagatctgtttgtgaaagcctgatttaaaaagaaaaaaaaaattccttaagccaaatggtgttccaagttggttgctgtgacaacctccaggaagagccacttgttaccctctattctttctagtgctttcagtcagtggcaacacataggccccttggaccgtggggatggcggccctgagattctgtcagtgggaccaccctgggcctcctttctacctccactcagcaccctgttggccaaggagaatttctgcggtgggaggcagtgctctgctagtcaggattgataaacagctgggcacaccgaaacagtgtaccaacgaattcaccaaccaggggtttctttccctaccctttgtgaaaaccaatcaattactagatgagtggatggatgcagaaaaatctgggctgagccaaagtcccttttggaaatacaagccataacattcgaaggacatcagcgaccttggcttgtttaggtgattttacttccagctgcaggtagtcttgacaaggagtgtttaaacagaaggctcaagatgcattccttgtgtaggtcggagagagcacttctaatgttaagtggggtacagatcagctgcccccccacgtagcctggacatcgtcttatccccataatccttgccatccctacaaggcccatcgccaccaccttttcccaggtttattgaggtatgattgacatccagtaaaattcaccctttggaaatatacagctctgtgaattttgacaaatttagtgtcttgtgaccatcaccaagatcaacctgtttttaaccctccaaaaaattcccttctcctgccctctttccctggcaaccctgattgattatctgatcctataattttgccttttctagaatgtcatataaatggagtcacactgatgtcgccttttgagtctggcatctttccctcagcttaatgcttttgagtcattcatgatgtgtgcgtgtggtttgttccttctccttgccgggaagtatttcattgcatgggcgtactactctgcttctttatttttacactgagcctttcgccctggaagttcttggcccagggtcttcaacttgtttgcacgaccacttccagcttgctgcttccttcagttccccaggctcctcctccaaatgccagctgtgcccacaagctgttcttagggctcacactcgccttttggcgcgtggtgggtttttggtagtgcagaaagaatccagggatgggaggggaagggacggatgggtgctcaattgctgctcacgtctgctgcaacctgaagcttgcatctcagccagcagatctgctcccttctgggacccaggcttcagtgtcacacggtccttggctatgtattgggcgttggaggctttgaaaggcgagcagaagcagcatggacaagaaggctggggctggccctggggctcatcatgatgctttcctggatctgttgcttcatctgcaagctgagggtgtttgttctagatgagtgtctcaggccaccggcaactgcatgtacctcctccctttctcatttccaatgatgtaccctgtacacgtgttcatgctgtgtctggctctcatctgcacaatcgtgcatagaattgcctcaagtcctggtgagagagatgccgtggtacttttccatttagattcaaatggagctaaaattaagagttttatgagctgttaagaatgaggtagtttctcctaggaccccccaaagacagtgcaagtaatgaccgtttggatctcattcgtcgatctttgatagtatgttctggagtctactccccaggagccaggacaggcgtgaagatggagtccttgtcgcagctggagccttgcctagctggtgatcacacagcctggcctgtacctgcaccccactggatggtggtacatggtggcagggacaggaccacacccagttaaggccagaccaggctgagtgtgacccctgaggtaaacactccactaagctgtgtcttgttcatgccccctgctcagtgaaaggtgagtcccgagaccagttgggtacctctctatgcgaaccagagacatttctggatccaggccaggtgaagattagggccaggaagcctgagcccccggggcctcaaggtagggagccgaagaggctgccaggactctgctgggttgaaatttgccggggaggactcttgtctccccctcaggagtatttttgttgaggctttcctggaggtgaagaagcaattcccattgcagcaggttagagcgagaatcagacagagggcaaaaaccaattcgcttctccccacgttctaaatgctggggcatggctgtcaggagggcttcctgggaggtgtctctgggggtggggtgaggttggggcgatggcctttggagattgcgtgtggtgttcaggactgttccttggtgtttgagggaaactttagtgggattgcagtggaatgtaaggtcagggcacgtgggtgctctctcggggtggggtgactgggagacctagagggaaagcctgctatgcagggggagagcacaggactggccctgctctgcggcctcctttgtcccataacctgaagttaagtcacatcccctgtcgggacctccgtgcactcatctgtcaagtgggggcgcttcccttccagcatcacctgcagcagacgggctctcgggagtcgtgggttccaggcagctgtgtggacccagggacagacattcaaagggacgccagccatccttagtgacaggggccccaacttagcatcccttcccttccgttaggaaggagatgaccggaagcaaccccttcacagacacgagcacatcggcaaaccctatgaaagtggaattttctaacaaaataaacttgcttgtttgatctgttttctgtaacttttgctaaatactttatacatttttcatgttaaagagccgtgtctcccgccagcactcctcaccccggtatgaatgtgtttcctccacattgtatatccttccaccctctggctgcctagatcagtaaataaaattgatgtaatataatttataagtaacactgttgaaaccctgatcccagtggaggctgtaacccacctgcccccgcaccacccccctgacccctgttaccgcatttgtgtgtattaatgctgaagaattaaatgtttaaagagtttaaattttgaaggcgtttgctatatacagttgtcctgcattattataaagagttttcaggaagtt

SEQ ID NO: 4724 - DNA, 540 bp, Homo sapiens
tcttccacaggaggcctacacgccgccgcttgtgctgctgccatgtctctagtgatccctgaaaagttccagcatattttgcgagtactcaacaccaacatcgatgggcggtggaaaatagcctttgccatcactgccattaagggtgtgggccgaagatatgctcatgtggtattgaggaaagcagacattgacctcaccaagagggcgggagagctcattgaggatgaggtggaacgtgtggtcaccattatgcagaatccacgccagtacaagatccccgactggtttttgaacagacagaaggatgtaaaggatggaaaatataaccaggtcctggccaacggtctggacaacgagctccgtgaagacctggagcgactgaagaatattcgggcccatagagggctgagtcacttctggggccttcgtgtccgaggccagcacaccaagaccactggccgctgtggccgcaccgtaggtgtgtccaagaagaaataagtctgtaggccttgtttgttaataaatagtttatatacc

SEQ ID NO: 4725 - DNA, 2570 bp, Homo sapiens
gctgtcctgagcctgagtactctagctgccttgtcgccatcgcatctggctgccatccagcgccagcacacagtaatgagtggccgagcttcctctgggagggaggaaacagttaaaatcttgcagcagctgcaatcatctaggcgtggttctcttgtctgacttgggctgcacagatcctgggccaagggacagaagaaagacagcctaggagcagagcctcccagatggctgagttggatctaatggctccagggccactgcccagggccactgctcagcccccagcccctctcagcccagactctgggtcacccagcccagattctgggtcagccagcccagtggaagaagaggacgtgggctcctcggagaagcttggcagggagacggaggaacaggacagcgactctgcagagcagggggatcctgctggtgaggggaaagaggtcctgtgtgacttctgccttgatgacaccagaagagtgaaggcagtgaagtcctgtctaacctgcatggtgaattactgtgaagagcacttgcagccgcatcaggtgaacatcaaactgcaaagccacctgctgaccgagccagtgaaggaccacaactggcgatactgccctgcccaccacagcccactgtctgctttctgctgccctgatcagcagtgcatctgccaggactgttgccaggagcacagtggccacaccatagtctccctggatgcagcccgcagggacaaggaggctgaactccagtgcacccagttagacttggagcggaaactcaagttgaatgaaaatgccatctccaggctccaggctaaccaaaagtctgttctggtgtcggtgtcagaggtcaaagcggtggctgaaatgcagtttggggaactccttgctgctgtgaggaaggcccaggccaatgtgatgctcttcttagaggagaaggagcaagctgcgctgagccaggccaacggtatcaaggcccacctggagtacaggagtgccgagatggagaagagcaagcaggagctggagaggatggcggccatcagcaacactgtccagttcttggaggagtactgcaagtttaagaacactgaagacatcaccttccctagtgtttacgtagggctgaaggataaactctcgggcatccgcaaagttatcacggaatccactgtacacttaatccagttgctggagaactataagaaaaagctccaggagttttccaaggaagaggagtatgacatcagaactcaagtgtctgccgttgttcagcgcaaatattggacttccaaacctgagcccagcaccagggaacagttcctccaatatgcgtatgacatcacgtttgacccggacacagcacacaagtatctccggctgcaggaggagaaccgcaaggtcaccaacaccacgccctgggagcatccctacccggacctccccagcaggttcctgcactggcggcaggtgctgtcccagcagagtctgtacctgcacaggtactattttgaggtggagatcttcggggcaggcacctatgttggcctgacctgcaaaggcatcgaccggaaaggggaggagcgcaacagttgcatttccggaaacaacttctcctggagcctccaatggaacgggaaggagttcacggcctggtacagtgacatggagaccccactcaaagctggccctttccggaggctcggggtctatatcgacttcccgggagggatcctttccttctatggcgtagagtatgataccatgactctggttcacaagtttgcctgcaaattttcagaaccagtctatgctgccttctggctttccaagaaggaaaacgccatccggattgtagatctgggagaggaacccgagaagccagcaccgtccttgggggtgactgctccctagactccaggagccatatcccagacctttgccagctacagtgatgggatttgcattttagggtgatttgtgggcagaaataactgctgatggtagctggcttttgaaatcctatggggtctctgaatgaaaacattctccagctgctctcttttgctccatatggtgctgttctctatgtgtttgcagtaattcttttttttttttttgagacggagtctcgcactgttgcccaggctggagagcagtggcgcgatcttggctcactgcaagctccgcctcccgagttcaagcaattctcctgcctcagcctcccgagtagctgggattacaggtgcctgccaccacacccagctaatgttttgtatttttagtagagatggggtttcaccatgttggccaggcagatctcaaactcctgacctcgtgatgcacccacctcggcctcccaaagtgctgggattacatgcgtgagccactgcgccctgcctgtttgtagtaatttttaggcaccaaatctccctcatcttctagtgccattctcctctctgttcaggtaaatgtcacactgtgcccagaatggatgaccaggaaccttaaagagtggctgaaaagattgcagagttatcataataaattgctaacttgcgt

SEQ ID NO: 4726 - protein, 564 aa, Homo sapiens
MAELDLMAPGPLPRATAQPPAPLSPDSGSPSPDSGSASPVEEEDVGSSEKLGRETEEQDSDSAEQGDPAGEGKEVLCDFCLDDTRRVKAVKSCLTCMVNYCEEHLQPHQVNIKLQSHLLTEPVKDHNWRYCPAHHSPLSAFCCPDQQCICQDCCQEHSGHTIVSLDAARRDKEAELQCTQLDLERKLKLNENAISRLQANQKSVLVSVSEVKAVAEMQFGELLAAVRKAQANVMLFLEEKEQAALSQANGIKAHLEYRSAEMEKSKQELERMAAISNTVQFLEEYCKFKNTEDITFPSVYVGLKDKLSGIRKVITESTVHLIQLLENYKKKLQEFSKEEEYDIRTQVSAVVQRKYWTSKPEPSTREQFLQYAYDITFDPDTAHKYLRLQEENRKVTNTTPWEHPYPDLPSRFLHWRQVLSQQSLYLHRYYFEVEIFGAGTYVGLTCKGIDRKGEERNSCISGNNFSWSLQWNGKEFTAWYSDMETPLKAGPFRRLGVYIDFPGGILSFYGVEYDTMTLVHKFACKFSEPVYAAFWLSKKENAIRIVDLGEEPEKPAPSLGVTAP

SEQ ID NO: 4727 - DNA, 881 bp, Homo sapiens
ggcggaccgaagaacgcaggaagggggccggggggacccgcccccggccggccgcagccatgaactccaacgtggagaaactgcccccgcacatcatccgcctggtgtacaaggaggtgacgacactgaccgcagacccacccgatggcatcaaggtctttcccaacgaggaggacctcaccgacctccaggtcaccatcgagggccctgaagggaccccatatgctggaggtctgttccgcatgaaactcctgctggggaaggacttccctgcctccccacccaagggctacttcctgaccaagatcttccacccgaacgtgggcgccaatggcgagatctgcgtcaacgtgctcaagagggactggacggctgagctgggcatccgacacgtactgctgaccatcaggtgcctgctgatccaccctaaccccgagtctgcactcaacgaggaggcgggccgcctgctcttggagaactccgaggagtatgcggctcgggcccgtctgctcacagagatccacgggggcgccggcgggcccagcggcagggccgaagccgggcgggccctggccagtggcactgcagcttcctccaccgaccctggggccccagggggcctgggaggggctgagggtcccatggccaagaagcatgctggcgagcgcgataagaagctggcggccaagaaaaagacggacaagaagcgggcgctgcggcggctgtagtgggctctcttcctccttccaccgtgaccccaacctctcctgtcccctccctccaactctgtctctaagttatttaaattatggctggggtcggggagggtacagggggcactgggacctggatttgtttttctaaataaagttggaaaagca

SEQ ID NO: 4728 - DNA, 927 bp, Homo sapiens
gggcggttggctttgttgggtgagcttgtttgtgtccctgtgggtggacgtggttggtgattggcaggatcctggtatccgctaacaggtcaaaatgcagatcttcgtgaaaacccttaccggcaagaccatcacccttgaggtggagcccagtgacaccatcgaaaatgtgaaggccaagatccaggataaggaaggcattccccccgaccagcagaggctcatctttgcaggcaagcagctggaagatggccgtactctttctgactacaacatccagaaggagtcgaccctgcacctggtcctgcgtctgagaggtggtatgcagatcttcgtgaagaccctgaccggcaagaccatcaccctggaagtggagcccagtgacaccatcgaaaatgtgaaggccaagatccaggataaagaaggcatccctcccgaccagcagaggctcatctttgcaggcaagcagctggaagatggccgcactctttctgactacaacatccagaaggagtcgaccctgcacctggtcctgcgtctgagaggtggtatgcagatcttcgtgaagaccctgaccggcaagaccatcactctggaagtggagcccagtgacaccatcgaaaatgtgaaggccaagatccaagataaagaaggcatccctcccgaccagcagaggctcatctttgcaggcaagcagctggaagatggccgcactctttctgactacaacatccagaaggagtcgaccctgcacctggtcctgcgcctgaggggtggctgttaattcttcagtcatggcattcgcagtgcccagtgatggcattactctgcactatagccatttgccccaacttaagtttagaaattacaagtttcagtaatagctgaacctgttcaaaatgttaataaaggtttcgttgcatggta

SEQ ID NO: 4729 - protein, 229 aa, Homo sapiens
MQIFVKTLTGKTITLEVEPSDTIENVKAKIQDKEGIPPDQQRLIFAGKQLEDGRTLSDYNIQKESTLHLVLRLRGGMQIFVKTLTGKTITLEVEPSDTIENVKAKIQDKEGIPPDQQRLIFAGKQLEDGRTLSDYNIQKESTLHLVLRLRGGMQIFVKTLTGKTITLEVEPSDTIENVKAKIQDKEGIPPDQQRLIFAGKQLEDGRTLSDYNIQKESTLHLVLRLRGGC

SEQ ID NO: 4730 - DNA, 726 bp, Homo sapiens
aggtaggctctctaggaatctgggagtagtagctggggggcaagagcaaataaagagctcgagcttctgtggtctctggggagatgttcccgggaagcctgtctagagggcggagggcagctgttgagatggcgtggctccccggctcctgcgcccgcgtggctttcgcggcgggcgctgcggcccggtattggacagcctggcagggcagcgcggggccgaatccggctgccgtggctgaggctcatggatcactcttttgtggtagggccacatctgccagagcctggagtctgcgaaggccgggacccggttccccggcccacagtgggggtgtgcaaacccgagagaactggattgcgtacccactgcagagtgctgaagacggggtagccacgaggttgcaaattcgtgaagaatcagcatcatgtttggcagctgagtattggagccaggagcctgccatgaggttttgagaacagagtgctgttttagagctggcagcagcatctcagcccaagagaaggttatattcccagaggatgtcagtcccaaggaccagtagctgccatcagtttggattctgaaaactaactggcatcaacactgggtgtagaaacatgcttgccttatgtatcagaggacatgctcagcagatccaagagatatatttggcaactttttctagaaaaggcacattgggtatcattcattacattcttgagt

SEQ ID NO: 4731 - protein, 130 aa, Homo sapiens
MFPGSLSRGRRAAVEMAWLPGSCARVAFAAGAAARYWTAWQGSAGPNPAAVAEAHGSLFCGRATSARAWSLRRPGPGSPAHSGGVQTRENWIAYPLQSAEDGVATRLQIREESASCLAAEYWSQEPAMRF

SEQ ID NO: 4732 - DNA, 1495 bp, Homo sapiens
tccagcccttctcctgtgtgcctgcctcctgccgccgccaccatgaccacctccatccgccagttcacctcctccagctccatcaagggctcctctggcctggggggcggctcgtcccgcacctcctgccagctgtctggcggcctgggtgccggctcctgcaggccgggatctgctggtggcctgggcagcgccctcgggggtagcagctactccagctgctacagctttggctctggcggtggctatggcagcagcagctttgagggcgttgatgggctgctggtcggaggtgagaaggccaccatgcagaacctcaatgaccgcctggcctcctacctggacaaggtgcgtgccctggaggaggccgacactgagctggaggtaaagatccgtgactggtaccagaggcaggccccggggcccgcccgtgactacagccagtactacaggataatcgaggagctgcagaacaagatcctcacagccaccgtggacaatgccaacatcctgctacatattgacaatgcccatctggctgctgctgacttccgcaccaagtttgagacagagcaggccctgtgcctgagtgtggaggccgacatcaatggcccgtgcagggtgctggatgagctgaccctggccagagccgacctggagatgcacattgagaacctcaaggaggagctggcctacctgaagaagaaccacgaggaggagatgaacgccccgcgaggccaggtgggcggtgagatcaatgtggagatgggcgctgccccaggtgtggacctgagccgcatcctgaatgagatgcgtgagcagtatgagaagatggcagagaagaaccgcaaggatgccgaggattggttcttcagcaagacagaggagctgaaccgcgaggtggctaccaacagtgagctggtccagagcggcaagagcgagatttcggagctccggtgcaccatgcaggccttggagatcgagctgcagtcccagctcagcatgaaagcatccctggagggcaacctggcggagacagagaaccgctactgcatgcagctgtcccagatccaggggctgatcggcagtgtggaggagcggctggcccagcttctctgcgagatggagcagcagaaccaggagtacaagatcctcctggacatgaagatgcggctggagctggagatcaccacctaccaccgcctgctggagggcgaggatgcccacctgactcagtacaagaaagaaccggtgaccacctgtcaggtgcctaccattgtggaagaggtccaggatggtaaggtcatctcctcccgcgagcaggtccgccagaccacccgctgagcactcagctttcctggccggccccccaggaggcagggaggcagcggtcccatctgccccgcggtctccggcctctccaccctcagccccctgcttcagtcccttccccatgcttccctgcgtgatgacaataaagctcgttgactcagct

SEQ ID NO: 4733 - protein, 433 aa, Homo sapiens
MTTSIRQFTSSSSIKGSSGLGGGSSRTSCQLSGGLGAGSCRPGSAGGLGSALGGSSYSSCYSFGSGGGYGSSSFEGVDGLLVGGEKATMQNLNDRLASYLDKVRALEEADTELEVKIRDWYQRQAPGPARDYSQYYRIIEELQNKILTATVDNANILLHIDNAHLAAADFRTKFETEQALCLSVEADINGPCRVLDELTLARADLEMHIENLKEELAYLKKNHEEEMNAPRGQVGGEINVEMGAAPGVDLSRILNEMREQYEKMAEKNRKDAEDWFFSKTEELNREVATNSELVQSGKSEISELRCTMQALEIELQSQLSMKASLEGNLAETENRYCMQLSQIQGLIGSVEERLAQLLCEMEQQNQEYKILLDMKMRLELEITTYHRLLEGEDAHLTQYKKEPVTTCQVPTIVEEVQDGKVISSREQVRQTTR

SEQ ID NO: 4734 - DNA, 709 bp, Homo sapiens
ctttccgctcggctgttttcctgctcaggagccgcagggccgtaggcagccatgacgcccagccggaatggcatggtcttgaagccccacttccacaaggactggcagcggcgcgtggccacgtggttcaaccagccggcccggaagatccgcagacgtaaggcccggcaagccaaggcgcgccgcatcgccccgcgccccgcgtcggggcccatccggcccatcgtgtgctgccccacggttcggtaccacacgaaggtgcgcgccggccgcggcttcaatctggaggagctcagggtggccggcattcacaagaaggtggcccggaccatcggcatttctgtggatccgaggaggcggaacaagtccacggagtccctgcaggcgaacgtgcagcggctgaaggagtaccgctccaaactcatcctcttccccaggaagccctcggcccccaagaagggagacagttctgctgaagaactgaaactggccacccagctgaccggaccggtcatgcccatccggaatgtctataagaaggagaaagctcgagtgatcactgaggaagagaagaatttcaaagccttcgctagtctccgtatggcccgtgccaacgcccggctcttcggcatacgggcaaaaagagccaaggaagccgcagaacaggatgttgaaaagaaaaaataaagccctcctggggacttggaat

SEQ ID NO: 4735 - DNA, 516 bp, Homo sapiens
gaatggcatggtcttgaagccccacttccacaaggactggcagcggcgcgtggccacgtggttcaaccagccggcccggaagatccgcagacgtaaggcccggcaagccaaggcgcgccgcatcgccccgcgccccgcgtcggggcccatccggcccatcgtgtgctgccccacggttcggtaccacacgaaggtgcgcgccggccgcggcttcaatctggaggagctcagggtggccggcattcacaagaaggtggcccggaccatcggcatttctgtggatccgaggaggcggaaccaaactcatcctcttccccaggaagccctcggcccccaagaagggagacagttctgctgaagaactgaaactggccacccagctgaccggaccggtcatgcccatccggaatgtctataagaaggagaaagctcgagtgatcactgaggaagagaagaatttcaaagccttcgctagtctccgtatggcccgtgccaacgcccggctcttcggcatac

SEQ ID NO: 4736 - protein, 119 aa, Homo sapiens [sequence omitted]

SEQ ID NO: 4737 - DNA, 2222 bp, Homo sapiens
gtagagtgcgcgacgcttttggcgacccgacctctggctaacctacccccggagccatggcctctgctggggtggcagccgggcgacaggcggaggatgtattgccgccaacgtccgaccagccgctgcctgacaccaagccgctgccgcctcctcagccgccgccggtccctgcgcctcaaccgcagcagtcgccggcgccacggcctcagtcacctgcccgcgcgagggaggaagagaactactcctttttacctttggttcacaacatcatcaaatgcatggacaaggacagcccagaggtccaccaggacctgaacgccctcaaaagcaagttccaggagatgcgcaagctcatcagcaccatgcccggcatccacctgagccccgaacagcagcagcagcagctgcagagcctccgggagcaagtcaggaccaagaatgagcttctgcaaaagtacaagagcctctgcatgttcgaaatccccaaggagtagagtgaggctgacttccttagaaagagggggaagccaatggcctgtctccccactaccatccccaaacgctccttggggcgtggttcctgtggaccccagctcagctcgtcaagctgcaggggcggggctcctgtgctgctgcgcgcgcttcgcctgtgcgggagccagcgcagagcttggctgcgccgggggttcctcgtgtagatccatatgtctagatgcataataactggagtgcctgctggtggaagtcagaatgctcctggaggctgcagagggggtggaggactctcccctgcctctggggagggggccatctgctgcgcccggccccactgacagatctgaagagcacagtaggaagggaggcggctcctctttgcttccttccctctctctcctcccacccccataggatcagtgtgtaccaggtacacattgttcctgttaacagcagcttcttgaaacatttgcatagaattcactggacgaattaagcctgcactcatatggcatagaattgtgagagaatgttttgaaaggccagagggtggcctttttccccaaacagtttggttccttttatgtttgagccagtgaagggaactacgctttgggggcttcagcctagagccctgccaggcagcccctggctccaggttccctgcctcctagcgctctcctcgccttcagctcttgctcccttcctcgttcatcaccctcagtcagtgcccaagagtggccaaaccgcttcacatctgcagtgcttccccagggttgacaaggggccgtcctttccacacaggccagaagaggtcttcaggcgaaccgaccttcccccttctggcatttcagattccccttgctctggttaaaaggtctttccctcgtggcctttgcacttgcggcagcaacgtgtactacactgcagaagggttcagtatgcaccttgtgttgagagagaggcaaccctgggggccagttcaggtggtccccaaccataggctaggtctgaaagttacacagccaagtttgagctcttaaaagttgatgaacagcctcatttccccagcttccctgatttcttccagatgggacgttttatttgtgtgctctcccttgactgtcagattgaagtaagagcagttctctccgttgcctctcgaggaggaggtgcgaagtcctggagtattgtttgggtctcggaatgggcgcataacctgcgctgaccagtttaggggcttagcagatgcctgccagctgacctcgttggcaggagggttgggtggagatgtttttagcagagcttccattagtgtagacctgtagccacctgtcagaaggtgggtggcatattggggacctgggaatgtgtgaaggaggagatcaaatttcagtggctttggacagaaaagaaggctctggatttaagcgggtggtcacctgtgagaccaggtctaccttgggactgttatttaactgaatcagttatttccttgaaatttcacagtagtgggtgggcctgttttaaggctctgacagataccacgaaacatgaagcacgtggaactacaagacccccggggtctttctgagtgcaaggctgaaatggacaagggctcctcacgggggtggagggagccggagcctgccttgtgttccttttttgacttgtgacatttttcaaacacataattaaaaggacttatgctctgctgtctcagg

SEQ ID NO: 4738 - protein, 146 aa, Homo sapiens
MASAGVAAGRQAEDVLPPTSDQPLPDTKPLPPPQPPPVPAPQPQQSPAPRPQSPARAREEENYSFLPLVHNIIKCMDKDSPEVHQDLNALKSKFQEMRKLISTMPGIHLSPEQQQQQLQSLREQVRTKNELLQKYKSLCMFEIPKE

SEQ ID NO: 4739 - DNA, 603 bp, Homo sapiens
ggggcgacccgacctctggctaacctacccccggagccatggcctctgctggggtggcagccgggcgacaggcggaggatgtattgccgccaacgtccgaccagccgctgcctgacaccaagccgctgccgcctcctcagccgccgccggtccctgcgcctcaaccgcagcagtcgccggcgccacggcctcagtcacctgcccgcgcgagggaggaagagaactactcctttttacctttggttcacaacatcatcaaatggtaagaacctaggagaggaccaggccccatactccctccagcttctcctctcagccgtttcagagctgcaagaggccttggcgctctggggcacgcccccgtttcacagatggggaaactcagacccagagcgggaagaggcctttcccaagaccacagagacattccatgagttaagcaaacgatttgagcctcgagaggtgcgatatccttaagaatgaagccagcttagagactaaatgcagactcttgtccagcggctcaaatgttcatcccagcgatcttgagcaaattaaatctctttaagccgcaaaaaaaaaaaaaaaaaaaaaaaaaaaaaa

SEQ ID NO: 4740 - protein, 75 aa, Homo sapiens [sequence omitted]

SEQ ID NO: 4741 - DNA, 2652 bp, Homo sapiens
gccctgccagccccagacaagggcacagaaacagccaggccacaccaactacagcagctattccaagcggaagcgcctcactcggggccgggccaagaacaccacctcttcaccctgtaaggggcgtgccaagcgacgacgacagcagcaggtgctgcccctggatcccgcagagcctgaaatccgcctcaagtacatttcctcttgcaagcggctgaggtcagacagccggacccccgccttctcacccttcgtgcgggtggagaagcgagacgcgttcaccaccatatgcactgttgtcaactcccctggagatgcgcccaagccccacaggaagccttcctcctctgcctcctcttcctcatcctcgtcctcgttctccttggatgcagccggggcctccctggccacactccctggaggctccatcctgcagccgcggccctccttgcccctctcctccacgatgcacttggggcctgtggtttccaaggccctgagtacctcttgccttgtttgctgcctctgccaaaacccggccaacttcaaggaccttggggacctctgtgggccctactaccctgaacactgcctccccaaaaagaagccaaaactcaaggagaaggtgcggccagaaggcacctgtgaggaggcctcgctgccgcttgagagaacactcaaaggtcccgagtgtgcagctgccgccactgccgggaagccccccaggcctgacggcccagctgacccggccaagcagggcccactgcgcaccagtgcccggggcctgtcccggaggctgcagagctgctactgctgtgatggccgggaggatgggggcgaggaggcagccccagccgacaagggtcgcaaacatgagtgcagcaaggaggctccggcagagcccggcggggaggcccaggagcactgggtgcatgaggcctgtgccgtgtggaccggcggcgtctacctggtggccgggaagctctttgggctgcaggaggccatgaaggtggccgtggacatgatgtgttccagctgccaagaagccggggccaccattgggtgctgccacaaaggatgcctccacacctaccactacccgtgtgccagcgatgcaggttgcatattcatcgaagagaacttttctttgaaatgtcccaaacataagaggctgccgtagtaatccaccccaacggccggaggagccgccggagcccgcctgcccgcccgccgccgaaggagaggagccgcctgcgcagcccccgggcctttgagctgctcccagcgctggtccagagccgatccttgatccgggtcccggatcgtggatccggccgcctagggctcagacttgcggccccgggttgggaggaaaacccgttccggagccgcctgctcccggaaccggacggcacagggcgttcttgcccaccccaggggccaggcttgcggagggggagcccgcggagcggccagactccccggggcgctcagcctccggcgagggtgggagacggctttgtcctggggacactttccctctggaatctcaagacgacgtggcacacattccacgtgggtgctgccgccaccccagtcggtcgtggcgtgcagctgggagccctgggcttgggggtgggggtcgaaacagtactggaagaggcggagggcggctcctagctccgtggactaggcgggggagaaaggaagcctttctgagagcgggctaggccggcactggagaggccggagcctttggaacaaaccgtgcggaacgcgtccaggggccttcccgcccagcctttgccagatctctcgtgcggttcgggcaaagccggggtagacctgggctatgctcagttaggggttgcgggatccccgagtgtgggcgggactgggacaccctttggcctctgtttgtcccctttccagtcctccaccccacccctggagcccagcctgggagcgcaaaacccaagaagcggccagaacgcacctccggctccggcggacgcgcgaccgttgtgcaccaccagggaccgccgcgcctactctgcacgggagcagggacagcgctagatttcgtgtacaaaacctgtgtacccctctatatatatgttacatagaatgtatatatgttgggaacatgctcgcttctcccgtgtgtcgccgccgtgcgtcgtgcgcccgcaacagagccccaaccgggcctttgccgggtaaggggctaccgcgacgccacttgtccacgcagccaccaccggcccgggccagtccctgccagtccgtccgcctgtccgtccgtgtcctcagctctgtccacgcttcgataggcctgacgcagcccccagcccagggccgccctagcaacttcctgtacatatgactgtaaaatggtaaacgtgtgtattatatctggcctcgttatatagtgtatatatatgtatacatatacatatatataatatatatgaagactgtaaatgttaagacgactagtgttcttattagtatattgcttcacactgaagattgtgtgtatcgagctgtttctaaaagatgtttattttccttaagagtaaaaaacagtcattgcattcagaaaaaaaaaaaaaaaaaagtcaataaagatacaacgattgttttggaaaa

SEQ ID NO: 4742 - DNA, 4154 bp, Homo sapiens
taacgaggaacttttcgccggcgccgggccgcctctgaggccagggcaggacacgaacgcgcggagcggcggcggcgactgagagccggggccgcggcggcgctccctaggaagggccgtacgaggcggcgggcccggcgggcctcccggaggaggcggctgcgccatggacgagccacccttcagcgaggcggctttggagcaggcgctgggcgagccgtgcgatctggacgcggcgctgctgaccgacatcgaagacatgcttcagcttatcaacaaccaagacagtgacttccctggcctatttgacccaccctatgctgggagtggggcagggggcacagaccctgccagccccgataccagctccccaggcagcttgtctccacctcctgccacattgagctcctctcttgaagccttcctgagcgggccgcaggcagcgccctcacccctgtcccctccccagcctgcacccactccattgaagatgtacccgtccatgcccgctttctcccctgggcctggtatcaaggaagagtcagtgccactgagcatcctgcagacccccaccccacagcccctgccaggggccctcctgccacagagcttcccagccccagccccaccgcagttcagctccacccctgtgttaggctaccccagccctccgggaggcttctctacaggaagccctcccgggaacacccagcagccgctgcctggcctgccactggcttccccgccaggggtcccgcccgtctccttgcacacccaggtccagagtgtggtcccccagcagctactgacagtcacagctgcccccacggcagcccctgtaacgaccactgtgacctcgcagatccagcaggtcccggtcctgctgcagccccacttcatcaaggcagactcgctgcttctgacagccatgaagacagacggagccactgtgaaggcggcaggtctcagtcccctggtctctggcaccactgtgcagacagggcctttgccgaccctggtgagtggcggaaccatcttggcaacagtcccactggtcgtagatgcggagaagctgcctatcaaccggctcgcagctggcagcaaggccccggcctctgcccagagccgtggagagaagcgcacagcccacaacgccattgagaagcgctaccgctcctccatcaatgacaaaatcattgagctcaaggatctggtggtgggcactgaggcaaagctgaataaatctgctgtcttgcgcaaggccatcgactacattcgctttctgcaacacagcaaccagaaactcaagcaggagaacctaagtctgcgcactgctgtccacaaaagcaaatctctgaaggatctggtgtcggcctgtggcagtggagggaacacagacgtgctcatggagggcgtgaagactgaggtggaggacacactgaccccacccccctcggatgctggctcacctttccagagcagccccttgtcccttggcagcaggggcagtggcagcggtggcagtggcagtgactcggagcctgacagcccagtctttgaggacagcaaggcaaagccagagcagcggccgtctctgcacagccggggcatgctggaccgctcccgcctggccctgtgcacgctcgtcttcctctgcctgtcctgcaaccccttggcctccttgctgggggcccgggggcttcccagcccctcagataccaccagcgtctaccatagccctgggcgcaacgtgctgggcaccgagagcagagatggccctggctgggcccagtggctgctgcccccagtggtctggctgctcaatgggctgttggtgctcgtctccttggtgcttctctttgtctacggtgagccagtcacacggccccactcaggccccgccgtgtacttctggaggcatcgcaagcaggctgacctggacctggcccggggagactttgcccaggctgcccagcagctgtggctggccctgcgggcactgggccggcccctgcccacctcccacctggacctggcttgtagcctcctctggaacctcatccgtcacctgctgcagcgtctctgggtgggccgctggctggcaggccgggcagggggcctgcagcaggactgtgctctgcgagtggatgctagcgccagcgcccgagacgcagccctggtctaccataagctgcaccagctgcacaccatggggaagcacacaggcgggcacctcactgccaccaacctggcgctgagtgccctgaacctggcagagtgtgcaggggatgccgtgtctgtggcgacgctggccgagatctatgtggcggctgcattgagagtgaagaccagtctcccacgggccttgcattttctgacacgcttcttcctgagcagtgcccgccaggcctgcctggcacagagtggctcagtgcctcctgccatgcagtggctctgccaccccgtgggccaccgtttcttcgtggatggggactggtccgtgctcagtaccccatgggagagcctgtacagcttggccgggaacccagtggaccccctggcccaggtgactcagctattccgggaacatctcttagagcgagcactgaactgtgtgacccagcccaaccccagccctgggtcagctgatggggacaaggaattctcggatgccctcgggtacctgcagctgctgaacagctgttctgatgctgcgggggctcctgcctacagcttctccatcagttccagcatggccaccaccaccggcgtagacccggtggccaagtggtgggcctctctgacagctgtggtgatccactggctgcggcgggatgaggaggcggctgagcggctgtgcccgctggtggagcacctgccccgggtgctgcaggagtctgagagacccctgcccagggcagctctgcactccttcaaggctgcccgggccctgctgggctgtgccaaggcagagtctggtccagccagcctgaccatctgtgagaaggccagtgggtacctgcaggacagcctggctaccacaccagccagcagctccattgacaaggccgtgcagctgttcctgtgtgacctgcttcttgtggtgcgcaccagcctgtggcggcagcagcagcccccggccccggccccagcagcccagggcgccagcagcaggccccaggcttccgcccttgagctgcgtggcttccaacgggacctgagcagcctgaggcggctggcacagagcttccggcccgccatgcggagggtgttcctacatgaggccacggcccggctgatggcgggggccagccccacacggacacaccagctcctcgaccgcagtctgaggcggcgggcaggccccggtggcaaaggaggcgcggtggcggagctggagccgcggcccacgcggcgggagcacgcggaggccttgctgctggcctcctgctacctgccccccggcttcctgtcggcgcccgggcagcgcgtgggcatgctggctgaggcggcgcgcacactcgagaagcttggcgatcgccggctgctgcacgactgtcagcagatgctcatgcgcctgggcggtgggaccactgtcacttccagctagaccccgtgtccccggcctcagcacccctgtctctagccactttggtcccgtgcagcttctgtcctgcgtcgaagctttgaaggccgaaggcagtgcaagagactctggcctccacagttcgacctgcggctgctgtgtgccttcgcggtggaaggcccgaggggcgcgatcttgaccctaagaccggcggccatgatggtgctgacctctggtggccgatcggggcactgcaggggccgagccattttggggggcccccctccttgctctgcaggcaccttagtggcttttttcctcctgtgtacagggaagagaggggtacatttccctgtgctgacggaagccaacttggctttcccggactgcaagcagggctctgccccagaggcctctctctccgtcgtgggagagagacgtgtacatagtgtaggtcagcgtgcttagcctcctgacctgaggctcctgtgctactttgccttttgcaaactttattttcatagattgagaagttttgtacagagaattaaaaatgaaattatttata

SEQ ID NO: 4743 - protein, 1147 aa, Homo sapiens [sequence omitted]

SEQ ID NO: 4744 - DNA, 652 bp, Homo sapiens
aggtctgttccgcatgaaactcctgctggggaaggacttccctgcctccccacccaagggctacttcctgaccaagatcttccacccgaacttgggcgccaatggcgagatgtgcgtcaacgtgctcaagagggactggacggctgagctgggcatccgacacgtactgctgaccatcaagtgcctgctgatccaccctaaccccgagtctgcactcaacgaggaggcgggccgcctgctcttggagaactacgaggagtatgcggctcgggcccgtctgctcacagagatccacgggggcgccggcgggcccagcggcagggccaaagccgggcgggccctggccagtggcactgcagcttcctccaccgactctggggccccagggggcttgggaggggctgagggtcccatggccaagaagcatgctggcgagcgcgataagaagctggcggccaagaaaaagacggacaagaagcgggcgctacggcggctgtagtgggctctcttcctccttccaccgtgaccccaacctctcctgtcccctccctccaactctgtctctaagttatttaaattatggctggggtcggggagggtacagggggcactgagacctggatttgtttttttaaataaagttggaaaagca

SEQ ID NO: 4745 - DNA, 3191 bp, Homo sapiens
tttctctggaggagctccgcgcgtggcgagtctgtgtcctccctgtcccccagagcagagaaccctctctgtgtctggaccggggaggagcagacgctggacagggtgtgtgtgttcagcagtggattgtcagacttggggtcccggctgctcccttttgggtctctccccgggcccgctgatctgactgtaattccttctgctggagctagggttcggccaccttgacgcgccccctctgcccccggagcgtgtctttgggttttgtgtgtgtgggagtggggtgtatgtgtgtttcttatccgagacacctccgggtcgtttgcttggaaaccggctgagggcccgcacagcctggagcatttggttggaaagtgaggcaggtagcgcccaaggctcctgtaccagggccaggttaggcaccaacgcgtcccttatgtctctgcagcctgcagtgtggtggaaccgttttatagactgacagtgtgaacgtgggaggggatggatatcagagacccgtttatccacattttcagagagtggtattgctccgatgtgagtgtaggcaggttactctctgtgtctcgtgttctttacctgtaatttgaggtttgttgtacctacttttaagtggtggttgtgaggattaaatggaattttgacatgcaacagttgacacagggccagacaccaagtaagggatcaatcagttgttgcttttattaatagtaggcatccatctgcccacttgtacgtaagaaggaaacacccaagaatgaaaagtagcttgttgtaggtcacccagccaactagcacataggggaaattagaatccaggcactcccagcagggcactttccaccaccctgcacttttgtattcatcaggcacaatatccttactgttgtctgtaactgtctatgttcccagtgtctgactctgcagggccctggtggtataaaggtactgagacttgcctgtgtttagggcttcctgaagattaaatggctgctgaagttcttgagtttagctttagctcaaaagatactgcgtcagactctgcgttctgagtagagtctcagacaatgaaaaaagaaatacaatgaaaaaggggaaaacttcaatccagaatctcttgccacagtttttggcagaatgctggcaattcccaggaagatatgtggagaacggaaaggttgctacacccaaatagtggcgcaaaggctatgattatggaggattggacctgcaaactccagaacagagttctgccctctgaggaccctgccctttcccaaaaggggtatcttaagaaggaaaatatggctgctctttgccggacagcagagtcccagaggctgaactccagtgcacccagttagacttggagcggaaactcaagttgaatgaaaatgccatctccaggctccaggctaaccaaaagtctgttctggtgtcggtgtcagaggtcaaagcagtggctgaaatgcagtttggggaactccttgctgctgtgaggaaggcccaggccaatgtgatgctcttcttagaggagaaggagcaagctgcgctgagccaggccaacggtatcaaggcccacctggagtacaggagtgccgagatggagaagagtaagcaggagctggagacgatggcggccatcagcaacactgtccagttcttggaggagtactgcaagtttaagaacactgaagacatcaccttccctagtgtttacatagggctgaaggataaactctcgggcatccgcaaagttatcacggaatccactgtacacttaatccagttgctggagaactataagaaaaagctccaggagttttccaaggaagaggagtatgacatcagaactcaagtgtctgccattgttcagcgcaaatattggacttccaaacctgagcccagcaccagggaacagttcctccaatatgtgcatgacatcacgttcgacccggacacagcacacaagtatctccggctgcaggaggagaaccgcaaggtcaccaacaccacgccctgggagcatccctacccggacctccccagcaggttcctgcactggcggcaggtgctgtcccagcagagtctgtacctgcacaggtactattttgaggtggagatcttcggggcaggcacctatgttggcctgacctgcaaaggcatcgaccagaaaggggaggagcgcagcagttgcatttccggaaacaacttctcctggagcctccaatggaacgggaaggagttcacggcctggtacagtgacatggagaccccactcaaagctggccctttctggaggctcggggtctatattgacttcccaggagggatcctttccttctatggcgtagagtatgattccatgactctggttcacaagtttgcctgcaagttttcagaaccagtctatgctgccttctggctttccaagaaggaaaacgccatccggattgtagatctgggagaggaacccgagaagccagcaccgtccttggtggggactgctccctagactccaggagccatatcccagacctttgccagctacagtgatgggatttgcattttagggtgatttgggggcaaaaataactgctgatggtagctggcttttgaaatcctatggggtctctgaatgaaaacattctccagctgctctcttttgctccatatggtgctgttctctatgtgtttgcagtaattctttttttttttttttttgagacggagtctcgcactgttgcccaggctggagtgcagtggcgtgatcttggctcactgcaagctccgcctcccgagttcaagcaattctcctgcctcagcctcccgagtagctgggattacaggtgcctgccaccacacccagctaacgttttgtatttttagtagagatggggtttcaccatgttggccaggcagatctcaaacttctgacctcgtgatgcactcacctcggcctcccaaagtgctgggattacaggcgtgagccactgcgccctgcctgtttgtagtaatttttaggcaccaaatctccctcatcttctagtgccattctcctctctgttcaggtaaatgtcacactgtgcccagaatggatgaccaggaaccttcaagagtggctgaaaagattgcagagttatcataataaattgctaacttgcgtatttcct

SEQ ID NO: 4746 - protein, 348 aa, Homo sapiens
MQFGELLAAVRKAQANVMLFLEEKEQAALSQANGIKAHLEYRSAEMEKSKQELETMAAISNTVQFLEEYCKFKNTEDITFPSVYIGLKDKLSGIRKVITESTVHLIQLLENYKKKLQEFSKEEEYDIRTQVSAIVQRKYWTSKPEPSTREQFLQYVHDITFDPDTAHKYLRLQEENRKVTNTTPWEHPYPDLPSRFLHWRQVLSQQSLYLHRYYFEVEIFGAGTYVGLTCKGIDQKGEERSSCISGNNFSWSLQWNGKEFTAWYSDMETPLKAGPFWRLGVYIDFPGGILSFYGVEYDSMTLVHKFACKFSEPVYAAFWLSKKENAIRIVDLGEEPEKPAPSLVGTAP

SEQ ID NO: 4747 - DNA, 3279 bp, Homo sapiens
actgccggcctgcgcggtactcactgccggcctccgcggtacccactgccggcctccgcgctacccggccgcagcgcgcgagtcacatggaagctcctgaggagcccgcgccagtgcgcggaggcccggaggccacccttgaggtccgtgggtcgcgctgcttgcggctgtccgccttccgagaagagctgcgggcgctcttggtcctggctggccccgcgttcttggttcagctgatggtgttcctgatcagcttcataagctccgtgttctgtggccacctgggcaagctggagctggatgcagtcacgctggcaatcgcggttatcaatgtcactggtgtctcagtgggattcggcttatcttctgcctgtgacaccctcatctcccagacgtacgggagccagaacctgaagcacgtgggcgtgatcctgcagcggagtgcgctcgtcctgctcctctgctgcttcccctgctgggcgctctttctcaacacccagcacatcctgctgctcttcaggcaggacccagatgtgtccaggcttacccagacctatgtcacgatcttcattccagctcttcctgcaacctttctttatatgttacaagttaaatatttgctcaaccagggaattgtactgccccagatcgtaactggagttgcagccaaccttgtcaatgccctcgccaactatctgtttctccatcaactgcatcttggggtgataggctctgcactggcaaacttgatttcccagtacaccctggctctactcctctttctctacatcctcgggaaaaaactgcatcaagctacatggggaggctggtccctcgagtgcctgcaggactgggcctccttcctccgcctggccatccccagcatgctcatgctgtgcatggagtggtgggcctatgaggtcgggagcttcctcagtggcatcctcggcatggtggagctgggcgctcagtccatcgtgtatgaactggccatcattgtgtacatggtccttgcaggcttcagtgtggctgccagtgtccgggtaggaaacgctctgggtgctggagacatggagcaggcacggaagtcctctaccgtttccctgctgattacagtgctctttgctgtagccttcagtgtcctgctgttaagctgtaaggatcacgtggggtacatttttactaccgaccgagacatcattaatctggtggctcaggtggttccaatttatgctgtttcccacctctttgaagctcttgcttgcacgagtggtggtgttctgagggggagtggaaatcagaaggttggagccattgtgaataccattgggtactatgtggttggcctccccatcgggatcgcgctgatgtttgcaaccacacttggagtgatgggtctgtggtcagggatcatcatctgtacagtctttcaagctgtgtgttttctaggctttattattcagctaaattggaaaaaagcctgtcagcaggctcaggtacacgccaatttgaaagtaaacaacgtgcctcggagtgggaattctgctctccctcaggatccgcttcacccagggtgccctgaaaaccttgaaggaattttaacgaacgatgttggaaagacaggcgagcctcagtcagatcagcagatgcgccaagaagaacctttgccggaacatccacaggacggcgctaaattgtccaggaaacagctggtgctgcggcgagggcttctgctcctgggggtcttcttaatcttgctggtggggattttagtgagattctatgtcagaattcagtgacgtggtaggaaagaaagtcaggtcgagtgatgcttttgagcttacacacaattcacaggcccaccagtgacaatttactgtgagttaatgtcattcaggtgtgcccatggattttgagggctggaaatgcaaagacacatttttctataaaaagaaaaagcaactaaggttaaaagctatattgtggcccaagacactgtctgaaagatgacatgagtagtaattcaccactatctgaaccaagcaaggatcaatgtgctgactgcattggccaatggctttgatacttctgctatttttttagacacaaacccataaactaactgcttaagaattcatactgcttgaattatgtaaaatatattttacagtatatctttccttgggccttagattactattcactgggcaaatggtatttgtttttgttttaattttttttttaatagacggaagtcttgctctgtcatgcaggctggagtgcggtggtgcgatcatagctcactgcagcctcgaactcttgggcttcaagcaatcctcctgtgtcagccaccagagtagctgagactacaggggtatgccaccatgcccagctggcatttgttaatcttcatttgaggtctagatctaggcactgtggacactgaaaaacagttgggaaatctttcgagctgtggaaatccaaacaaagactgataattcctggtaggggtgtgtgcgtgacgtactgcagcctcaacctcctgggctcaagtgatcctcccacctcagcctcctgagtagctgagaccacaggcgtgtgccaccacgcctagctaattttttataccagggtctaccctttgtttcccaggctggtcttgaattcctgggatcaagcaatccttccaccttgccctcccaaagtgttgggattataggcatgagccaccacgactggccagaggacaaaattttaataaaggtcttagcttaagcagtaatcctacttcattaagccttcctggggtgcggtacacaccgttaattcagcaaccctcagtacatactaagtatgctcagtgctgtgaaagtggattacaccaaattaagtcattcttatcacacccaatcaaaagtcaagaagccagggataaaagcacctcaggcacataacattaatctagtaatgtaattctctgcacatccagctggtgaaactgcgtgctgtaagctgggaccagctttgtccataactgctgagagaacttgctgaagctctaggaataattttgcctgcccggttgctcaccagttgtagcttgccagctcccaacacccttcctggtgccaataaactttctcaaagagcaatactgacatttcttttgataaaacctccagccttctctgtgttgttccgacataccgaggaccaactggtctacatggatgccctgaacatgcaattctttcttccaaaataaaacattaaatagag

SEQ ID NO: 4748 - protein, 570 aa, Homo sapiens [sequence omitted]

SEQ ID NO: 4749 - DNA, 1773 bp, Homo sapiens
ctctgagcagaactgacagcatgaaggcactcctggccctgccgctgctgctgcttctctccacgcccccgtgtgccccccaggtctccgggatccgaggagatgctctggagaggttttgccttcagcaacccctggactgtgacgacatctatgcccagggctaccagtcagacggcgtgtacctcatctacccctcgggccccagtgtgcctgtgcccgtcttctgtgacatgaccaccgagggcgggaagtggacggttttccagaagagattcaatggctcagtaagtttcttccgcggctggaatgactacaagctgggcttcggccgtgctgatggagagtactggctggggctgcagaacatgcacctcctgacactgaagcagaagtatgagctgcgagtggacttggaggactttgagaacaacacggcctatgccaagtacgctgacttctccatctccccgaacgcggtcagcgcagaggaggatggctacaccctctttgtggcaggctttgaggatggcggggcaggtgactccctgtcctaccacagtggccagaagttctctaccttcgaccgggaccaggacctctttgtgcagaactgcgcagctctctcctcaggagccttctggttccgcagctgccactttgccaacctcaatggcttctacctaggtggctcccacctctcttatgccaatggcatcaactgggcccagtggaagggcttctactactccctcaaacgcactgagatgaaaatccgccgggcctgaagggctggccccctcaggcacctttcctcccctggacacccatggtctccatgagtgctccctctgctgcccctgatgcatgcttctgctgattcccgagcaccaactccttacaagggggccttgtggctctcagccatgccacatccctgtcacacacccagggcatccattcctaagccagacccggctcccctacacctgaagttacactgccagcagttccccaggcctcttccgagaggcacatggttctagcctggacctggctgggctccatgagaatgagttgcctccaccctgtcccaacagctgacagccaggagccactctcccagctgcaggcctttgtggtccatcttgtcctgcttcctcactgtggacccctgtctgggccaccctagtgtgctaagctgagcagtgcagtgtgaacagggcccatggtgtattctaggccacagcccagcactcctctgggctgctctcaaaccatgtcccatcttcagcatccctcccaccaacttactcccctgtggtgagtaccgtggaaccccagcccacctcactatcatactcagcttcccctgatggcccatcccagcccctgaagctctatgccaagaacacagctaccgcacaccaccctgaaacagccacagccaaggtaggcatgcatatgaggtcttccccataccctctgggtgttgagaggtttagccacatgagggagcagaggacaatctctgcagggctgggagtgggtagggactgaaggtctcaataaaccttcagaacctgaatgaactggcttcatacacacaaacatatttgtttatcccccaaatgtaggcacctggctcctccttgctcccctgctgatggtgtcctaccccgaactccaaaaattacacctggagtcaggtgcagaagggaaccttgtatttcacaggcctcattttgatggcaaaaagacagtgtaataata

SEQ ID NO: 4750 - DNA, 2826 bp, Homo sapiens
cggagacccccgcgctggggacgggaggccggcgagcctcgggacctctgaaagccttgaggaggcgcggggacaccatggccgagcctctgaaggaggaagacggcgaggacggctctgcggagccccccgggcccgtgaaggccgaacccgcccacaccgctgcctctgtagcggccaagaacctggccctgcttaaagcccgctccttcgatgtgacctttgacgtgggcgacgagtacgagatcatcgagaccataggcaacggggcctatggagtggtgtcctccgcccgccgccgcctcaccggccagcaggtggccatcaaaaagatccctaatgctttcgatgtggtgaccaatgccaagcggaccctcagggagctgaagatcctcaagcactttaaacacgacaacatcatcgccatcaaggacatcctgaggcccaccgtgccctatggcgaattcaaatctgtctacgtggtcctggacctgatggaaagcgacctgcaccagatcatccactcctcacagcccctcacactggaacacgtgcgctacttcctgtaccaactgctgcggggcctgaagtacatgcactcggctcaggtcatccaccgtgacctgaagccctccaacctattggtgaatgagaactgtgagctcaagattggtgactttggtatggctcgtggcctgtgcacctcgcccgctgaacatcagtacttcatgactgagtatgtggccacgcgctggtaccgtgcgcccgagctcatgctctctttgcatgagtatacacaggctattgacctctggtctgtgggctgcatctttggtgagatgctggcccggcgccagctcttcccaggcaaaaactatgtacaccagctacagctcatcatgatggtgctgggtaccccatcaccagccgtgattcaggctgtgggggctgagagggtgcgggcctatatccagagcttgccaccacgccagcctgtgccctgggagacagtgtacccaggtgccgaccgccaggccctatcactgctgggtcgcatgctgcgttttgagcccagcgctcgcatctcagcagctgctgcccttcgccaccctttcctggccaagtaccatgatcctgatgatgagcctgactgtgccccgccctttgactttgcctttgaccgcgaagccctcactcgggagcgcattaaggaggccattgtggctgaaattgaggacttccatgcaaggcgtgagggcatccgccaacagatccgcttccagccttctctacagcctgtggctagtgagcctggctgtccagatgttgaaatgcccagtccctgggctcccagtggggactgtgccatggagtctccaccaccagccccgccaccatgccccggccctgcacctgacaccattgatctgaccctgcagccacctccaccagtcagtgagcctgccccaccaaagaaagatggtgccatctcagacaatactaaggctgcccttaaagctgccctgctcaagtctttgaggagccggctcagagatggccccagcgcacccctggaggctcctgagcctcggaagccggtgacagcccaggagcgccagcgggagcgggaggagaagcggcggaggcggcaagaacgagccaaggagcgggagaaacggcggcaggagcgggagcgaaaggaacggggggctggggcctctgggggcccctccactgaccccttggctggactagtgctcagtgacaatgacagaagcctgttggaacgctggactcgaatggcccggcccgcagccccagccctcacctctgtgccggcccctgccccagcgccaacgccaaccccaaccccagtccaacctaccagtcctcctcctggccctgtagcccagcccactggcccgcaaccacaatctgcgggctctacctctggccctgtaccccagcctgcctgcccaccccctggccctgcaccccaccccactggccctcctgggcccatccctgtccccgcgccaccccagattgccacctccaccagcctcctggctgcccagtcacttgtgccaccccctgggctgcctggctccagcaccccaggagttttgccttacttcccacctggcctgccgcccccagacgccgggggagcccctcagtcttccatgtcagagtcacctgatgtcaaccttgtgacccagcagctatctaagtcacaggtggaggaccccctgccccctgtgttctcaggcacaccaaagggcagtggggctggctacggtgttggctttgacctggaggaattcttaaaccagtctttcgacatgggcgtggctgatgggccacaggatggccaggcagattcagcctctctctcagcctccctgcttgctgactggctcgaaggccatggcatgaaccctgccgatattgagtccctgcagcgtgagatccagatggactccccaatgctgctggctgacctgcctgacctccaggacccctgaggcccccagcctgtgccttgctgccacagtagacctagttccaggatccatgggagcattctcaaaggctttagccctggacccagcaggtgaggctcggcttggattattctgcaggttcatctcagacccacctttcagccttaagcagccacctgagccaccaccgagccatggcaggatcgggagaccccaactccccctgaacaatccttttcagtattatatttttattattattatgttattattacactgtctttttgccatcaaaatgaggcctgtgaaatacaaggtt

SEQ ID NO: 4751 - DNA, 1635 bp, Homo sapiens
ccaggagccccagttaccgggagaggctgtgtcaaaggcgccatgagcaagatcagcgaggccgtgaagcgcgcccgcgccgccttcagctcgggcaggacccgtccgctgcagttccggatccagcagctggaggcgctgcagcgcctgatccaggagcaggagcaggagctggtgggcgcgctggccgcagacctgcacaagaatgaatggaacgcctactatgaggaggtggtgtacgtcctagaggagatcgagtacatgatccagaagctccctgagtgggccgcggatgagcccgtggagaagacgccccagactcagcaggacgagctctacatccactcggagccactgggcgtggtcctcgtcattggcacctggaactaccccttcaacctcaccatccagcccatggtgggcgccatcgctgcagggaactcagtggtcctcaagccctcggagctgagtgagaacatggcgagcctgctggctaccatcatcccccagtacctggacaaggatctgtacccagtaatcaatgggggtgtccctgagaccacggagctgctcaaggagaggttcgaccatatcctgtacacgggcagcacgggggtggggaagatcatcatgacggctgctgccaagcacctgacccctgtcacgctggagctgggagggaagagtccctgctacgtggacaagaactgtgacctggacgtggcctgccgacgcatcgcctgggggaaattcatgaacagtggccagacctgcgtggcccctgactacatcctctgtgacccctcgatccagaaccaaattgtggagaagctcaagaagtcactgaaagagttctacggggaagatgctaagaaatcccgggactatggaagaatcattagtgcccggcacttccagagggtgatgggcctgattgagggccagaaggtggcttatgggggcaccggggatgccgccactcgctacatagcccccaccatcctcacggacgtggacccccagtccccggtgatgcaagaggagatcttcgggcctgtgctgcccatcgtgtgcgtgcgcagcctggaggaggccatccagttcatcaaccagcgtgagaagcccctggccctctacatgttctccagcaacgacaaggtgattaagaagatgattgcagagacatccagtggtggggtggcggccaacgatgtcatcgtccacatcaccttgcactctctgcccttcgggggcgtggggaacagcggcatgggatcctaccatggcaagaagagcttcgagactttctctcaccgccgctcttgcctggtgaggcctctgatgaatgatgaaggcctgaaggtcagataccccccgagcccggccaagatgacccagcactgaggaggggttgctccgcctggcctggccatactgtgtcccatcggagtgcggaccaccctcactggctctcctggccctgggagaatcgctcctgcagccccagcccagccccactcctctgctgacctgctgacctgtgcacaccccactcccacatgggcccaggcctcaccattccaagtctccacccctttctagaccaataaagagacgaatacaattttctaactc

SEQ ID NO: 4752 - DNA, 3681 bp, Homo sapiens
aactggaaggcgcccggtcctttctttgactggagcggacccgccggacgcaaccgcctcgccagccggagccagcgcgagctcggcacggtggacacccggtccgaggccggcaagccggctggtgcccgagtcggccaagcatgggcaaccactcaggacggcccgaggatccggaaccaggggcctttacaacaactaaacggacaggcattccagccccacgggaattttcagtaactgtctcaagagagaggtctgtgccacgtggtccctccaaccccaggaaatcagtgtccagtccaacttcttccaacactcccactcctacgaaacacctgaggaccccttccacaaagcccaagcaagagaatgaaggtggagaaaaggctgcgcttgagtcccaagttcgggaacttttggcagaagccaaagcaaaagatagtgaaattaacaggcttcgaagtgaactaaagaaatacaaagagaaaaggactctgaacgctgaggggactgatgctttgggcccaaatgtcgatggaacatcagtctccccaggtgacacggaacctatgataagagctcttgaggagaagaacaagaactttcagaaagagctttccgatctagaggaagaaaaccgggtcctgaaggagaaactgatctatcttgagcactccccaaattcagaaggggcagcaagtcacactggcgacagcagctgcccaacatccataactcaagagtcaagcttcggaagcccaactggaaatcagatgtccagtgacattgatgagtataaaaaaaacatacatggaaatgcattacggacatcaggctcctcaagtagcgatgttaccaaagcttctttgtcgccagatgcttccgactttgagcacattacagcagagacaccctcaaggcccctgtcctccaccagtaacccctttaagagttcaaagtgttctactgctgggagttccccaaacagcgtaagtgaattgtccctggcttccctcacagagaagatacaaaagatggaagaaaaccaccatagcactgcagaagaactacaggctactctacaagaattatcagaccagcaacaaatggtacaggaattgacagctgaaaatgagaagctggtggatgaaaagacgattttagagacatcctttcatcagcatcgagagagggcagagcagctaagtcaagaaaatgagaagctgatgaatcttttacaagagcgagtaaagaatgaagagcccaccactcaggaaggaaaaattattgaactggagcagaagtgcacaggtattcttgaacagggccgctttgaaagagagaagctactcaacattcagcagcagttgacctgtagcttgcggaaggttgaggaagaaaaccaaggagctttagaaatgattaaacgtctgaaggaagaaaatgaaaaactgaatgagtttctagaactggaacggcataataataacatgatggccaaaactttggaagagtgtagagttaccttggaagggctaaaaatggagaatggatctttgaagtctcatttgcagggtgagaagcagaaagccacagaggccagtgctgtggagcagacggcagagagctgcgaagttcaagaaatgttgaaagtagcccgagcagagaaagatctactggaactgtcttgcaatgagctcagacaagaattactaaaggcaaacggtgaaattaaacatgtttccagtctgctggccaaggtggaaaaggattattcatacctgaaggagatatgtgatcaccaagccgaacagctgagcagaaccagcctaaagctgcaagaaaaagcatcagagagtgatgcagagatcaaagacatgaaagaaaccatatttgaattggaagatcaggtggaacagcaccgggctgtcaagttacacaataatcaactcatcagtgagctagaaagtagtgtgatcaagctggaggaacagaagtcagacctggagaggcagctgaagactctgaccaagcagatgaaggaggagaccgaggaatggaggcggttccaggcggatctgcagaccgcagtggtggtggccaatgacatcaagtgtgaggcccagcaggagctgcgcaccgtgaagaggaaactgctggaggaggaggagaagaatgcccggttgcagaaggagctgggggatgtgcagggccacggcagggtggtcaccagcagagccgcccctccacctgtggatgaagagccagagtcctctgaggtcgatgctgctggtcggtggcctggtgtctgtgttagcagaacatctccaacacccccagagtcggcaaccaccgttaagtcacttatcaagtcatttgacttgggacgcccaggtggagctggacagaatatttctgtccataagacccccagaagtcccctaagtgggataccagtgaggactgctccagcagctgctgtctctccaatgcagaggcattcgacttacagcagtgtgcggccagccagcagaggggtgactcaacgcttggaccttcctgaccttcccctctcagatattctaaagggaaggactgagaccctgaagccagacccccacctccgcaagagtccctcactagagtcactgagcagacccccgtctctgggctttggggacacaagactgctgagtgcttccacccgggcatggaaaccacaaagcaaactcagtgtggaaagaaaagaccctctggcagccttggcccgggaatacggtggttccaagcgcaatgctctactgaaatggtgccagaagaagacacaaggttatgcgaacattgacatcaccaatttcagcagcagctggagcgatggcctggccttctgtgctctgctccacacctacctgcctgcccacatcccctaccaggagctgaatagtcaggagaaaaagaggaatctcttgttggcatttgaagcggctgaaagtgtaggcatcaaacccagcctggaactcagcgagatgctgtacacagaccggcccgactggcagagtgtgatgcagtacgtggcccaaatctacaagtactttgagacgtaaccctggagggcctggggcagccaccattgccacctactgcagcttttcctggaagcgcctgattactgtccactgaccctgctctgcccaccacccagctgcctagacttcaaagacaggctcaatccaagtggaccaacacccaaataagaaacagagtgggtcccacgatgtacctgtctgaaatgcaaatgcagctggactgtaaattggggactctttgatctcttgtgggatgcttctaaagagggcagcctccctccttccagaccaagaccccacacccaggcttgttttgctgattatattgggtggctgaacgaacacattatctgcagaaattcagacaaagaacatctccaaatcagtcttttggttgctgttgttaaaaatatcccggctttgcctttatgaaacctttgcccttggctgggtgtggtagctcgtggctgtaatcccagcactttaggaagccaaggcagtaggatcgtttgagcccaggagttcgaggctgcagtgagctatgagcataccactgcactccagcctgtgtgaaagagccagaccctgtctc

SEQ ID NO: 4753 - protein, 987 aa, Homo sapiens
MGNHSGRPEDPEPGAFTTTKRTGIPAPREFSVTVSRERSVPRGPSNPRKSVSSPTSSNTPTPTKHLRTPSTKPKQENEGGEKAALESQVRELLAEAKAKDSEINRLRSELKKYKEKRTLNAEGTDALGPNVDGTSVSPGDTEPMIRALEEKNKNFQKELSDLEEENRVLKEKLIYLEHSPNSEGAASHTGDSSCPTSITQESSFGSPTGNQMSSDIDEYKKNIHGNALRTSGSSSSDVTKASLSPDASDFEHITAETPSRPLSSTSNPFKSSKCSTAGSSPNSVSELSLASLTEKIQKMEENHHSTAEELQATLQELSDQQQMVQELTAENEKLVDEKTILETSFHQHRERAEQLSQENEKLMNLLQERVKNEEPTTQEGKIIELEQKCTGILEQGRFEREKLLNIQQQLTCSLRKVEEENQGALEMIKRLKEENEKLNEFLELERHNNNMMAKTLEECRVTLEGLKMENGSLKSHLQGEKQKATEASAVEQTAESCEVQEMLKVARAEKDLLELSCNELRQELLKANGEIKHVSSLLAKVEKDYSYLKEICDHQAEQLSRTSLKLQEKASESDAEIKDMKETIFELEDQVEQHRAVKLHNNQLISELESSVIKLEEQKSDLERQLKTLTKQMKEETEEWRRFQADLQTAVVVANDIKCEAQQELRTVKRKLLEEEEKNARLQKELGDVQGHGRVVTSRAAPPPVDEEPESSEVDAAGRWPGVCVSRTSPTPPESATTVKSLIKSFDLGRPGGAGQNISVHKTPRSPLSGIPVRTAPAAAVSPMQRHSTYSSVRPASRGVTQRLDLPDLPLSDILKGRTETLKPDPHLRKSPSLESLSRPPSLGFGDTRLLSASTRAWKPQSKLSVERKDPLAALAREYGGSKRNALLKWCQKKTQGYANIDITNFSSSWSDGLAFCALLHTYLPAHIPYQELNSQEKKRNLLLAFEAAESVGIKPSLELSEMLYTDRPDWQSVMQYVAQIYKYFET

SEQ ID NO: 4754 - DNA, 2083 bp, Homo sapiens
cgcggtgccttttgagctccttgtccacgctccgcccctgtgggaacggccgcgctccccgcagctggtcatccgccgcctgcctccgggcctcaccaaggagcagctggaggagcagctgcgcccgttgccagcacacgactacttcgagttcttcgccgccgacctgagtctttatcctcatctctactcaagagcatacattaattttaggaatcctgatgacatccttctttttagagatcgttttgatgggatatatcttccttgacagcaaagatccagaatataagaagtttttagaaacctactgtgtggaggaagagaaggccagtgccaaccctgagactctgctgggggagatggaggcgaagacaagagagctcattgctagaagaaccacacctcttttggaatatattaaaaatagaaaattagaaaagcagagaattcgagaagagaagcgagaagaacggaggaggagagagttagaaaagaaacgtttgcgggaagaggaaaaaagaagaagaagagaagaagaaagatgcaaaaaaaaaaagagagacagataaacagaagaaaattgcagagaaagaagtaaggattaagcttcttaagaaaccagaaaagggagaggaaccaaccacagagaaaccaaaagaaagaggagaggagattgatactggaggtggcaagcaggaatcctgtgcccccggtgcagtcgtaaaagccaggcccgtggaaggctcgctggaggagccccaggagacgtcacacagcggcagtgataaagagcacagggatgtggagagatctcaagaacaagaatctgaagcacaaagacaccatgtggatgatggcaggaggcacagagctcaccacgagcctgaccggctttccagagggagtgaggatgagcagagatgggggaaaggacctggccaagacagagggaagaaggggagccaggacagcggggctccgggggaggccatggagagactgggaagagcgcagaggtgtgacgacagtccagcacccagaaaagagcgactggcaaacaaggaccggccagccttgcagctgtatgatccaggagctcacttccgagcgctagagtgtggcggaaacaggaggatctgcaaggcagaaggttcgggaactggtcctgagaagagggaagaggcagagtgagtcactgcacgcacctggcctccatggacgagcgagggcatcccagaaacgtgtaaatgaccccgagtgtgactgggaaggagaacttattccttaccaggaaactggaagctaaaactacagagggtgacatagaaacacgcagaaaccattctaaagaaagtagtgatcttgtattaaattgagcagaattctcacagattttaccattcctgttataaactagtatttgttgtttagccaaaacagaaaatgatttccactggacagtagaaaaatatgtgtaaaatagggaagaaagttagtattggatcagtgtgagtcctgaagcactttcagtgctgtgagaacgacatccactttgggtttcattcgtttgtaagcagaggagctgtcagtcactcgtgcttctcgttggcctctgagccatggtgtcgagtgaagagtagttcttgtttgttacaacctttgtgagtcagccatgcctgcaaagtgtgctgtgttttagtcctggtaggaatatttatcagagttcacactatataaaacccaacagcttcaactattgccctttcaacagttttgccactgaccggataaaaacggtttcagtctttggatggatgtgtttgtggtttgtaaccattacggtttaaaccatggtttaagaatttgcccaaataacagaaattttgttcgggaagggataaacgagatatagcatatagagcctgtttttgagttttagatactttatttgtaaataacttaaaatagctttctgaaaccgtgcattctgtagtttcttcctttcagtgaaattgctaaatgtgaatgtatttttggcactgcgattttaaccatttattaaataaaaattttgttaaag

SEQ ID NO: 4755 - DNA, 2153 bp, Homo sapiens
  unsure 512: unknown base
gtaagacacctttgcagtccttcctgggaatcgctgagcagcacgggggcccccaaaatgggaccctgatcactcagactctgagccaagccaaccccactgccatcactgcagaagaatacttcaaccccaactttgagctgggcaaccgtgatatgggccgccccatggaactgaccaccaagacacagaagttcaaggccaagctgtggctgtgtgaggagcatcccctgtccctgtgtgagcaggtggcccccatcattgacctcatggccgtcagcaatgcgctttttgccaagctccgggacttcatcaccctgcgtctgcctcctggcttcccagttaagattgaaatcccgatcttccacatcctcaacgcccgcatcaccttcgggaacctcaacggctgcgacgaaccggtgccatcggtgcgaggcagccccagcagcgagacgccttccccaggcagcgactcctccagcgtcagcagctccagctccacgacctcctgnccgcggctgcgagatctccccagcgttgttcgaggccccgcgcggctacagcatgatgggcggccagcgggaggcggcgacccgggacgacgacgacgacctgctgcaattcgccatccagcagagcctgcttgaggcgggcagtgagtatgaccaggtcaccatctgggaggcgctaaccaacagcaagccaggcacccaccccatgtcctacgagggtcgccgacaggacaggagcgccccgcccacgccgcagcgccagcctgcgcccccggcgtcagtgcccagccctcggcccagctcagggccaggttccggcggccacgtgttccggagctacgacgagcagctgcggctggcgatggaactgtcggcgcaggagcaggaggagaggcggcggcgcgcgcgccaggaggaggaggagctggagcgcatcctgaggctctcactgaccgagcagtagcgccccctgccgggaccctcgccagcgccacgcgcgccacgcccagggccaggagccagacaaaccccggcctgcgcgcctgcagagcggcggctggagactggagccaccgcctcgcgggtgcagcagcacagcaggcacggttcggggagggattcggcatggccgcggggtaccttcccaggccagggccctggaggcaactggcacggcctggtccccctgctttgctgtattctgattccccaacccgctcccctgggctcagatctgtcctgtcctagggcggagccaggcggtcctgagggggagatgaatccttagaggagcgctgtccctatcccttgctccttctggccggtccgcatttctgttcactaaccccactccaggacactgcccctgaagcctttgcatctctgctcttcactcctggggggcagctgagctccccgcgtgctgtgtcactgctttgttccagacacaaaccagcacgtctagggcccagcccctcccccaccccggcatttcagcgtcaagtgcacttagcggggtacccggctcccccagcccccacacccgtcctgggtctcagggtggttccagcttctccttgggcagccagaagttggagtcccatcccccaaggcacatttttttttttttttttttgtgatcagggagtgtgtccaacgtagccccctggcctgtgcaagccctgactccctcatggtgcctcggagagtggggagcatattgggctggggtaagcactagacccaagtagactggacacaaagggctcgcccagggccctggcgccacccccaccccttcccaccagctgctgctagcctctgtggttgtacatcccacttgcccccacacggagactgactctaaaacccttcatccaatggtgctaacccccggctctcccctgccccacctcacccacccagagaagcacagaccccgccaggggcaggggcccaccgcacacccttgtcccgggcctgtctgggactggccttcccggctcagccagtgaggctcagaagggacacaaagagggatggaagaaaagaacaaagagaaactgttcctcccacccccttccctgatgccaggggcaccagactgattctgaggcacaaataaaagaggcttcataccgg

SEQ ID NO: 4756 - protein, 453 aa, Homo sapiens
MTWQRGNRSFVFRGQDTSAVVMEIDHDRRVVYTETLALAGQDRELLLAAAQPTEEQVLSRLTAPVVTTQLDTKNISFERNKTGILGWRSEKTEMVNGYEAKVYGASNVELITRTRTEHLSEQHKGKVKGCKTPLQSFLGIAEQHGGPQNGTLITQTLSQANPTAITAEEYFNPNFELGNRDMGRPMELTTKTQKFKAKLWLCEEHPLSLCEQVAPIIDLMAVSNALFAKLRDFITLRLPPGFPVKIEIPIFHILNARITFGNLNGCDEPVPSVRGSPSSETPSPGSDSSSVSSSSSTTSCRGCEISPALFEAPRGYSMMGGQREAATRDDDDDLLQFAIQQSLLEAGSEYDQVTIWEALTNSKPGTHPMSYEGRRQDRSAPPTPQRQPAPPASVPSPRPSSGPGSGGHVFRSYDEQLRLAMELSAQEQEERRRRARQEEEELERILRLSLTEQ

SEQ ID NO: 4757 - DNA, 3504 bp, Homo sapiens
tcgccgctgaggatgtcccgaaaggggccgcgagcggaggtgtgtgcggactgcagcgccccggaccctggctgggcatccatcagcaggggtgtgctggtgtgtgacgagtgctgcagcgtgcaccggagcctgggacgccacatctccattgtcaagcaccttcgccacagcgcctggcctcccacgctgctgcagatggtgcacacgcttgccagcaacggggccaactccatctgggagcactccctgctggaccccgcacaagtgcagagcggccggcgtaaagccaacccccaagacaaagtccaccccatcaagtcagagttcatcagggccaagtaccagatgctggcatttgtgcacaagcttccctgccgggacgatgatggagtcaccgccaaagacctcagcaagcaactacactcgagcgtgcggacaggcaacctggagacatgtctgcgcctgctctccctgggtgcccaggccaacttcttccacccagagaagggcaccacacctctgcacgtggctgccaaggcaggacagacactgcaggccgagctgcttgtagtgtatggggctgaccctggctcccctgatgttaatggccgcacacccattgactatgccaggcaggcggggcaccatgagctggcggaaaggctggttgagtgccaatatgagctcactgaccggctggccttctacctctgtggacgcaagccggatcacaagaatgggcattacatcatcccacagatggctgacagatctcggcaaaagtgcatgtctcagagccttgacttatccgaattggccaaagctgctaagaagaagctgcaggcgctcagcaaccggctttttgaggaactcgccatggacgtgtatgacgaggtggatcgaagagaaaatgatgcagtgtggctggctacccaaaaccacagcactctggtgacagagcgcagtgccgtgcccttcctgcctgttaacccggaatactcagccacgcggaatcaggggcgacaaaagctggcccgctttaatgcccgagagtttgccaccttgatcatcgacattctcaacaacctcgagctgtctctgcggagccagagtgacctcgacgaccaacacgactacgacagcgtggcctctgacgaggacacagaccaggagcccctgcgcagcaccggcgccactcggagcaaccgggcccggagcatggactcctcggacttgtctgacggggctgtgacgctgcaggagtacctggagctgaagaaggccctggctacatcggaggcaaaggtgcagcagctcatgaaggtcaacagtagcctgagcgacgagctccggaggctgcagcgagagatccacaagctgcaggcggagaacctgcagctccggcagcctccagggccggtgcccacacctccactccccagtgaacgggcggaacacacacccatggcgccaggcgggagcacacaccgcagggatcgccaggccttttccatgtatgaacctggctctgccctgaagccctttgggggcccccctggggacgagctcactacgcggctgcagcctttccacagcactgagctagaggacgacgccatctattcagtgcacgtccctgctggcctttaccggatccggaaaggggtgtctgcctcagctgtgcccttcactccctcctccccgctgctgtcctgctcccaggagggaagccgccacacgagcaagctttcccgccacggcagtggagccgacagtgactatgagaacacgcaaagtggggacccactgctggggctggaagggaagaggtttctagagctgggcaaagaggaagacttccacccagagctggaaagcctggatggagacctagatcctgggcttcccagcacagaggatgtcatcttgaagacagagcaggtcaccaagaacattcaggaactgttgcgggcagcccaggagttcaagcatgacagcttcgtgccctgctcagagaagatccatttggctgtgaccgagatggcctccctcttcccaaagaggccagccctggagccagtgcggagctcactgcggctgctcaacgccagcgcctaccggctgcagagtgagtgccggaagacagtgcccccagagcccggcgccccagtggacttccagctgctgactcagcaggtgatccagtgcgcctatgacatcgccaaggctgccaagcagctggtcaccatcaccacccgagagaagaagcagtgacctctctccccacaccctcacctgcaccctaggacctcactggccataggagctgggccactccagacattaatccccaccccaacagagccactggcacaagtgcccttagtgctgccacactccctggcagccaggtgccctggtgcccacccctgtcgagcccctaaggatggggaggttgggggggcaggagcttctgtcccccacattccatgcacctcccctctgtatatagcatctcccccctcctagtgagcaggggcctgcaaggcatcactcccagcccctcgccttctagggcaccctcagcaaaggggcaggtggggacactccaagtggggcagctctccgtacatgcgccccacccccatgagccagttcagccctactgggggctgagcgggggcatcccctcctttgtacatagtctccatggatgtccctgccctgtagccaccagccccttgctgctctccctttaatgccatatggcccctgcctagggcacaggccccaacctgtgtgctggggtccccagcagcaaacactggaaagtctgttttttttttttctttcttcttccccaccccttaattttaactttgtggtaactgagtgcccccgcgtgcctgcgtgttgagtgtgtgggcggcagtgccgttccggaggcctggtccatctggagttttgaggggtgaggggaccagagcagtgggaccagcatggggatcagcttcccttccccacctggagccagggactgtccgggtagccagttttggtcctgccagctgcctccctgatccctccccactctcgccccttctctatgaacttaaatcaaaaaccacttccctccatctcctcctgctcctgcgtggagggggaatgtgtgctggctagggtggaggactgagcacctgagcctggggctggctccccggggtccccgactcagctggtggctgtggagctgagtcccctccccgtaacctctgcaaggccagcacccaccatcactacctgcacctgctgtggtcccaccctctggaggcctgggaacctggctgcagcctgggaaggctggagaggcagacggtgggacccaccagctctctccccatcccgcttcttccctgggggccaggccctacctgtgtggtggtgggtgggctgtcaagacgtgtcatgtacatttgtatcaaaaataaagaagtgaccatg

SEQ ID NO: 4758 - DNA, 2064 bp, Homo sapiens
agccctcgcgggggcaaggcggcgaccgaggcgcgtgggtctgggaaggcgcgcggatttggcccctcttctcacatcagcgggtccaggcccaaccgacagactatgggggctccggcaaccaggcgctgcgtggagtggctgctgggcctctacttcctcagccacatccccatcaccctgttcatggacctgcaggcggtgctgccgcgcgagctctacccagtcgagtttagaaacctgctgaagtggtatgctaaggagttcaaagacccactgctacaggagcccccagcctggtttaagtcctttctgttttgcgagcttgtgtttcagctgcctttctttcccattgcaacgtatgccttcctcaaaggaagctgcaagtggattcgaactcctgcaatcatctactctgttcacaccatgacaaccttaattccgatactctccacatttctgtttgaggatttctccaaagccagtggtttcaagggacaaagacctgagactttgcatgaacggttaacccttgtgtctgtctatgccccctacttactcatcccattcatacttttaattttcatgttgcggagcccctactacaagtatgaagagaaaagaaaaaaaaaatgaaggaaacaaccactggcccagggtagagatgcctacagggtggttgcttgttggatacaatacaaggaacactgctcagaacccacgtcttcagcagcatttgaaacactggcagcaatgcacaagagcaagatggtgtcaggaaccatgtcaaaccctcaccttcttccattttttttttttttttaagacagtctcactctgttgcccaggctggagtaaagggcagtggcatgatctcggctcactgcaacctccgcctcctgggctcaagccatcttccttagcctcccaagtagctagaactacaggtgtgtaccaacacgtatggctaatttgttttgttttttttgtgtgtgtggagacagggttttgccatgttgcccaggttggtctcgaacgcctaggctcaagtgatctgcccacctcagtctccctaagtgctgggattacagacgtgaaccactgggcccagcccaaaccttcaccttctaagggcactgggatgaacagaccgatcggcttgagggtgggcaaaggggtgtgggctaggttataaggaagtggtaccaaataactgtgtgcctgagttccaccgcaagattactaaaagcaggaccagaccagaaactgctaaagaacatggcctgtttgacatgttcatgagtcacctgacccacagcatatatgcttatgactaaaccctccactcctgattctcaagagtgtatcacctgtcagcaaaatgaatagtgggatattttgggccattttaaatgtgaaattttgcctctttaatgttaattcaaaactatatcaatgttttcttgttcccacctctaacccaaggaaaaaagagaaaacatactatgcaaaggaagtttaaacttaagttttccttaagggtcagcccaacaatgactttcagtcaaatggattaaactggaaaatgtttttgtttctgttgtaaacagatcatcctaggcgaaagttttttttgtttgtttgcttttaaattagtttatttctaaatcttagtcttccacatttctagaggccacctgacacaagtccctgtatctgaagtctagcatctcaaggctgatctggaagtgtgctagtatgctccctagtggataacttaatcttttaatacagttccgtcattcccatcttgttttcagaagagaaggtggctacagccaggcataacatatccactgtgtgcatagagggtctcttcacgttgatgcttggcattccatcagctttctctaagtctttgctcaagttcaaccttaaaatgatgttagacaacaggtcccagtcagttccctctattttcacccattttgctcacaagccatattggcccgattagtggtactgtctgactcacgtgtgtgatccaaataaaggtagctgctg

SEQ ID NO: 4759 - protein, 194 aa, Homo sapiens
MKRKEKKNEGNNHWPRVEMPTGWLLVGYNTRNTAQNPRLQQHLKHWQQCTRARWCQEPCQTLTFFHFFFFFKTVSLCCPGWSKGQWHDLGSLQPPPPGLKPSSLASQVARTTGVYQHVWLICFVFFVCVETGFCHVAQVGLERLGSSDLPTSVSLSAGITDVNHWAQPKPSPSKGTGMNRPIGLRVGKGVWARL

SEQ ID NO: 4760 - DNA, 3508 bp, Homo sapiens
gccacccagctgagaggagaggcgcccccggggacgcactgagattatgaggctctggcctccactggccactcactcgtgaccctttccaccacggcggagccttccaagcctacctcctgccgtgtggtgatctacctgcagcgggagatgtcgggggacacctgcctgtgcccagcctcaggggccaagcccaagctcagtggcttcaagggaggagggttgggcaacaagtatgtccagctcaacgtgggcggctctctgtactacaccactgtgcgggccctgacccgccacgacaccatgctcaaggccatgttcagtgggcgcatggaggtgctgaccgacaaagaaggctggatcctcatagaccgttgtggaaagcactttggcaccattttgaattacctccgagatgacaccatcaccctccctcagaaccggcaagaaatcaaggaattgatggctgaagcaaagtattacctcatccaggggctggtgaatatgtgccagagtgccctgcaggacaagaaggactcctaccagcctgtgtgcaacatccccatcatcacatccctaaaggaggaggagcggctcatcgaatcctccaccaagcccgtggtgaagctgctgtacaacagaagcaacaacaagtattcctacaccagcaactctgacgaccacctgctgaaaaacatcgagctgtttgacaagctctccctgcgcttcaacggccgcgtgctcttcatcaaggatgtcattggtgacgagatctgctgctggtccttttatggccagggccgtaagctggcagaggtgtgctgtacctccatcgtgtatgccacggagaagaagcagaccaaggtggaattcccagaggcccgaatctatgaggagacactcaacgtcctactctatgagactccccgcgtccccgacaactccttgttggaggccacaagccgtagccgcagccaggcttcccccagtgaagatgaggagacctttgaactgcgggaccgtgtccgccgcatccacgtcaagcgctacagcacttacgatgaccggcagctcggccaccagtctacccatcgcgactgaccagaccctcagggagtcagggcacgggaggccctatctcccatcctgtggaacccgccccattggccaccccatgctgctgctgcctgggtctctgctctagcacccagaggcatgacaggccctgctcagaggtcagagggtctgggcagaggagggaccacattcccctgccttgcccctgagcacttctggagactgcgtcctgtcctatctgctcaccatcacccttcctgcccgacggagctgcttctgctccctggggcatatggactgacccacctcctgctgagaaccttcccctaggccctgtgcagaaggctactgccccttaggcctcagctgggggaaaggcagttctggtgctgtagaggccctggtgcagaaagtgggacgtcttttttcctaaggtgtttaagcacaggcttgataagtttggtttttaaaaaataatctaggaaatgaataattctaaatctagtaatgaggaaactgagcatttcttttgccctccagggtgccaagaccctacatatgacagaacccttggcccttctccatgcctgtgggatctgtttctttaaagcactttgtactgttattcaggaggttgataatctccttgacccatgtctttctaccctaatccccacttccctgcagaatcaatctgagggaggggataaagaggaagcaataaaaaaaaaacatccgacagagcagctctggctttgcagcctggccagcagctcagagtgcaccgaggagggaaggatggctaagctgggaccggcagtcctcacagggtgcctgtgagaaaggacattttacccccacatcatagtcacatcactgactcctaggtctagcacgactgctctttgtgattctcttgagtacccttggcttccagccatgctgtcctcacatacggtaaagccaaagagctgtcacatgggccagaaacatgagccacggcaggaagaccgtggagcccgtgggcactgcatggtgttggctggcatgcccatcagctgaggacagcaaactcccagcagcccctacagaggtggcacatgcttggccacacatctactccctgcccacaccatctatgctcttggttggtgctggctgggatggcggttctgcccagtggtgtctctgagcgcgggatgacaggagcaaccgaagcaccctgaaggccttcactccttgttgggtaactcagccatggagatgccaagcactagccaggaggtgagttcctctttagggctttggttttcattcctttttgtttggcttggccaaaccagaattcagcttatctgaattattttccaaaggaatgctgtcagggagggactgttctgccagcctaacaaagcaacgtagccacgtatagtacccactttctgctctttggagagaacacaggttatcaagttcatctctcttgactactcttatgatagctgatgccacagagcctatgggcaaatgccagacccagggttagacacaaggacctgaagtgacatgacggcgggacaggggaaatgtgactttctaattaggcattttatgttagtcacagtcttgaatgtataaacagcactaagactctcaggtcaggtaccttggtgatcagctactagttcttccagccctcattgaggtaacaagataaagacaaatccacttctttggccaaattcaggctttggctttatgactttcccacagagactggaatgcgtcagcctgagaccactggcctattttctcagctgccctcttgaggtcctttaacactcaaattcccagctccccactgaggtgttgtgatgcttgccttttgacctccccatcccctttagtccctgcttactactttgacattcacatcctcagtgtctcagtcttttttgccgagaaagcacagtagtctgggactgggcatttatcttctctgactgaaaatctctccttggtcttaaggaaaatactaacattgaactcactgacatgatcttagcttctttaatcagactttgtgacttaaaagtttgggggttttctttgaaagtttccagccctattcagaaagcaactcttggctgtgtgcatttttcaactccaagcagcccaggggtaagtaaacaaagtatggatgaaggtcagattttcttgtcagtttctgagaaacctggcagcctgctgttaacaacacaggccagtattgggttttattgaatttggtatgtgaccaaggtcggcctaaaggatggcgcaggtcctgggcaggaaagaatttttcctttatcacataactgtaatatttggttgctcagcataagtgatggaagcaaacactaatttctaataaaattgtgttaaactc

SEQ ID NO: 4761 - DNA, 2100 bp, Homo sapiens
ccgcgggtcgggctctgtgtcagcagccgggcgggcgctcgggcgggacatggcagcctgtacagcccggcgggccctggccgtgggcagccgctggtggtcccggtcgctgactggggcccggtggccaaggccgctctgtgcggcggccggagctggagccttctcgccagcgtcgaccacgacgacgcggaggcacctctcgtcccgaaaccgaccagagggcaaagtgttggagacagttggtgtgtttgaggtgccaaaacagaatggaaaatatgagaccgggcagcttttccttcatagcatttttggctaccgaggtgtcgtcctgtttccctggcaggccagactgtatgaccgggatgtggcttctgcagctccagaaaaagcagagaaccctgctggccatggctccaaggaggtgaaaggcaaaactcacacttactatcaggtgctgattgatgctcgtgactgcccacatatatctcagagatctcagacagaagctgtgaccttcttggctaaccatgatgacagtcgggccctctatgccatcccaggcttggactatgtcagccatgaagacatcctcccctacacctccactgatcaggttcccatccaacatgaactctttgaaagatttcttctgtatgaccagacaaaagcacctccttttgtggctcgggagacgctaagggcctggcaagagaagaatcacccctggctggagctctccgatgttcatcgggaaacaactgagaacatacgtgtcactgtcatccccttctacatgggcatgagggaagcccagaattcccacgtgtactggtggcgctactgtatccgtttggagaaccttgacagtgatgtggtacagctccgggagcggcactggaggatattcagtctctctggcaccttggagacagtgcgaggccgaggggtagtgggcagggaaccagtgttatccaaggagcagcctgcgttccagtatagcagccacgtctcactgcaggcttccagtgggcacatgtggggcacgttccgctttgaaagacctgatggctcccactttgatgttcggattcctcccttctccctggaaagcaataaagatgagaagacaccaccctcaggccttcactggtaggccagctgaggccccaagtgcccaggcttggtcaccgggaagaacaactctcatcccacaattgctgcagaactcttctctccccatcatgggccacagtgggtctcttaatttgattgtggggttctttttgtggggaggggtggtataacttttcttcagaagacccatgtgggacacctccaaggctggcctcctcataagccctgcctacaccatgttccagtaaacctctccaccaaggaactgtgttcagctgccacaggcctggaggagtttcctggcctgtcacgtgaggtttgatcagtaaaccagtgcacgcttggccacccttgccatttctgctcccagagtctcaggctccccttctgacccagtgtgcgcccttgactgctttctttgctgcccttccagggagctgcccccctggtagggcatgtgcctgtttccctctcagcctggaggctggctggacatctcctagggtcactgtgcctctcagctagttggcgggggtgctggactggactcttgttcactttaccttctgccaaatgcagagagggaggccagtgtcagggtcggagtggcctggctcttagcactgaccgaccattgccatttctggcctcgctaggcccaggagaggagggaggcaagccagtcgggtttcctggagcaatgggtgtgccagccctcagcatgactctgccaagcatccagaccacaaatgcaggaatttggctgaggagcagctttaggtatggattgatgactaagtcaagctacttcctgagcttctctcagatttccaagagccagagatgaattgtgctgcatcttgccccaattcttaggatttcttttcctccgccactgcagtgattgttagaggtagttttcttgaattaatattaaatcacagttccagccctgtaaaaaaa

SEQ ID NO: 4762 - protein, 368 aa, Homo sapiens
MAACTARRALAVGSRWWSRSLTGARWPRPLCAAAGAGAFSPASTTTTRRHLSSRNRPEGKVLETVGVFEVPKQNGKYETGQLFLHSIFGYRGVVLFPWQARLYDRDVASAAPEKAENPAGHGSKEVKGKTHTYYQVLIDARDCPHISQRSQTEAVTFLANHDDSRALYAIPGLDYVSHEDILPYTSTDQVPIQHELFERFLLYDQTKAPPFVARETLRAWQEKNHPWLELSDVHRETTENIRVTVIPFYMGMREAQNSHVYWWRYCIRLENLDSDVVQLRERHWRIFSLSGTLETVRGRGVVGREPVLSKEQPAFQYSSHVSLQASSGHMWGTFRFERPDGSHFDVRIPPFSLESNKDEKTPPSGLHW

SEQ ID NO: 4763 - DNA, 2022 bp, Homo sapiens
caatcatggatcaatagctatgtttggagaaggaatttgtggctgctccagctactgggcattttgtctggtccagttcatgtaatctcccaacaccccatgaagcaaggctttgttaatcctattttactgaaaatgaactaagactcagagagataaagctgttgcccaatgagccttctttctgccctccagatccacggtgctaattccccttccgatgacctaatgattctgagcttggcaaaggtcttatctcccagctcgcccaggcccagtgttccaggaatgtgacctttgctgcagcagccgctggagggggcagaggggatgggctggaggttgagcaaacagagcagcagaaaaggcagttcctcttctccagtgccctccttccctgtctctgcctctccctcccttcctcaggcatcagagcggagacttcagggagaccagagcccagcttgccaggcactgagctagaagccctgccatggcacccctgagaccccttctcatactggccctgctggcatgggttgctctggctgaccaagagtcatgcaagggccgctgcactgagggcttcaacgtggacaagaagtgccagtgtgacgagctctgctcttactaccagagctgctgcacagactatacggctgagtgcaagccccaagtgactcgcggggatgtgttcactatgccggaggatgagtacacggtctatgacgatggcgaggagaaaaacaatgccactgtccatgaacaggtggggggcccctccctgacctctgacctccaggcccagtccaaagggaatcctgagcagacacctgttctgaaacctgaggaagaggcccctgcgcctgaggtgggcgcctctaagcctgaggggatagactcaaggcctgagacccttcatccagggagacctcagcccccagcagaggaggagctgtgcagtgggaagcccttcgacgccttcaccgacctcaagaacggttccctctttgccttccgagggcagtactgctatgaactggacgaaaaggcagtgaggcctgggtaccccaagctcatccgagatgtctggggcatcgagggccccatcgatgccgccttcacccgcatcaactgtcaggggaagacctacctcttcaagggtagtcagtactggcgctttgaggatggtgtcctggaccctgattacccccgaaatatctctgacggcttcgatggcatcccggacaacgtggatgcagccttggccctccctgcccatagctacagtggccgggagcgggtctacttcttcaaggggaaacagtactgggagtaccagttccagcaccagcccagtcaggaggagtgtgaaggcagctccctgtcggctgtgtttgaacactttgccatgatgcagcgggacagctgggaggacatcttcgagcttctcttctggggcagaacctctgctggtaccagacagccccagttcattagccgggactggcacggtgtgccagggcaagtggacgcagccatggctggccgcatctacatctcaggcatggcaccccgcccctccttggccaagaaacaaaggtttaggcatcgcaaccgcaaaggctaccgttcacaacgaggccacagccgtggccgcaaccagaactcccgccggccatcccgcgccatgtggctgtccttgttctccagtgaggagagcaacttgggagccaacaactatgatgactacaggatggactggcttgtgcctgccacctgtgaacccatccagagtgtcttcttcttctctggagacaagtactaccgagtcaatcttcgcacacggcgagtggacactgtggaccctccctacccacgctccatcgctcagtactggctgggctgcccagctcctggccatctgtaggagtcagagcccacatggccgggccctctgtagctccctcctcccatctccttcccccagcccaataaaggtcccttagccccgagtttaaa

SEQ ID NO: 4764 - protein, 478 aa, Homo sapiens
MAPLRPLLILALLAWVALADQESCKGRCTEGFNVDKKCQCDELCSYYQSCCTDYTAECKPQVTRGDVFTMPEDEYTVYDDGEEKNNATVHEQVGGPSLTSDLQAQSKGNPEQTPVLKPEEEAPAPEVGASKPEGIDSRPETLHPGRPQPPAEEELCSGKPFDAFTDLKNGSLFAFRGQYCYELDEKAVRPGYPKLIRDVWGIEGPIDAAFTRINCQGKTYLFKGSQYWRFEDGVLDPDYPRNISDGFDGIPDNVDAALALPAHSYSGRERVYFFKGKQYWEYQFQHQPSQEECEGSSLSAVFEHFAMMQRDSWEDIFELLFWGRTSAGTRQPQFISRDWHGVPGQVDAAMAGRIYISGMAPRPSLAKKQRFRHRNRKGYRSQRGHSRGRNQNSRRPSRAMWLSLFSSEESNLGANNYDDYRMDWLVPATCEPIQSVFFFSGDKYYRVNLRTRRVDTVDPPYPRSIAQYWLGCPAPGHL

SEQ ID NO: 4765 - DNA, 3764 bp, Homo sapiens
acagacggcgggtgaacatggcgtcctcgacttggtctgagacgtgataggcctgccttctggttgaagatgtggcgagtgaaaaaactgagcctcagcctgtcgccttcgccccagacgggaaaaccatctatgagaactcctctccgtgaacttaccctgcagcccggtgccctcaccaactctggaaaaagatcccccgcttgctcctcgctgaccccatcactgtgcaagctggggctgcaggaaggcagcaacaactcatctccagtggattttgtaaataacaagaggacagacttatcttcagaacatttcagtcattcctcaaagtggctagaaacttgtcagcatgaatcagatgagcagcctctagatccaattccccaaattagctctactcctaaaacgtctgaggaagcagtagacccactgggcaattatatggttaaaaccatcgtccttgtaccatctccactggggcagcaacaagacatgatatttgaggcccgtttagataccatggcagagacaaacagcatatctttaaatggacctttgagaacagacgatctggtgagagaggaggtggcaccctgcatgggagacaggttttcagaagttgctgctgtatctgagaaacctatctttcaggaatctccgtcccatctcttagaggagtctccaccaaatccctgttctgaacaactacattgctccaaggaaagcctgagcagtagaactgaggctgtgcgtgaggacttagtaccttctgaaagtaacgccttcttgccttcctctgttctctggctttccccttcaactgccttggcagcagatttccgtgtcaatcatgtggacccagaggaggaaattgtagagcatggagctatggaggaaagagaaatgaggtttcccacacatcctaaggagtctgaaacagaagatcaagcacttgtctcaagtgtggaagatattctgtccacatgcctgacaccaaatctagtagaaatggaatcccaagaagctccaggcccagcagtagaagatgttggtaggattcttggctctgatacagagtcttggatgtccccactggcctggctggaaaaaggtgtaaatacctccgtcatgctggaaaatctccgccaaagcttatcccttccctcgatgcttcgggatgctgcaattggcactacccctttctctacttgctcggtggggacttggtttactccttcagcaccacaggaaaagagtacaaacacatcccagacaggcctggttggcaccaagcacagtacttctgagacagagcagctcctgtgtggccggcctccagatctgactgccttgtctcgacatgacttggaagataacctgctgagctctcttgtcattctggaggttctctcccgccagcttcgggactggaagagccagctggctgtccctcacccagaaacccaggacagtagcacacagactgacacatctcacagtgggataactaataaacttcagcatcttaaggagagccatgagatgggacaggccctacagcaggccagaaatgtcatgcaatcatgggtgcttatctctaaagagctgatatccttgcttcacctatccctgttgcatttagaagaagataagactactgtgagtcaggagtctcggcgtgcagaaacattggtctgttgctgttttgatttgctgaagaaattgagggcaaagctccagagcctcaaagcagaaagggaggaggcaaggcacagagaggaaatggctctcagaggcaaggatgcggcagagatagtgttggaggctttctgtgcacacgccagccagcgcatcagccagctggaacaggacctagcatccatgcgggaattcagaggccttctgaaggatgcccagacccaactggtagggcttcatgccaagcaagaagagctggttcagcagacagtgagtcttacttctaccttgcaacaagactggaggtccatgcaactggattatacaacatggacagctttgctgagtcggtcccgacaactcacagagaaactcacagtcaagagccagcaagccctgcaggaacgtgatgtggcaattgaggaaaagcaggaggtttctagggtgctggaacaagtctctgcccagttagaggagtgcaaaggccaaacagaacaactggagttggaaaacagtcgtctagcaacagatctccgggctcagttgcagattctggccaacatggacagccagctaaaagagctacagagtcagcatacccattgtgcccaggacctggctatgaaggatgagttactctgccagcttacccagagcaatgaggagcaggctgctcagaagagatggcactaaaacacatgcaggcagaactgcagcagcaacaagctgtcctggccaaagaggtgcgggacctgaaagagaccttggagtttgcagaccaggagaatcaggttgctcacctggagctgggtcaggttgagtgtcaattgaaaaccacactggaagtgctccgggagcgcagcttgcagtgtgagaacctcaaggacactgtagagaacctaacggctaaactggccagcaccatagcagataaccaggagcaagatctggagaaaacacggcagtactctcaaaagctagggctgctgactgagcaactacagagcctgactctctttctacagacaaaactaaaggagaagactgaacaagagacccttctgctgagtacagcctgtcctcccacccaggaacaccctctgcctaatgacaggaccttcctgggaagcatcttgacagcagtggcagatgaagagccagaatcaactcctgtgcccttgcttggaagtgacaagagtgctttcacccgagtagcatcaatggtttcccttcagcccgcagagaccccaggcatggaggagagcctggcagaaatgagtattatgactactgagcttcagagtctttgttccctgctacaagagtctaaagaagaagccatcaggactctgcagcgaaaaatttgtgagctgcaagctaggctgcaggcccaggaagaacagcatcaggaagtccagaaggcaaaagaagcagacatagagaagctgaaccaggccttgtgcttgcgctacaagaatgaaaaggagctccaggaagtgatacagcagcagaatgagaagatcctagaacagatagacaagagtggcgagctcataagccttagagaggaggtgacccaccttacccgctcacttcggcgtgcggagacagagaccaaagtgctccaggaggccctggcaggccagctggactccaactgccagcctatggccaccaattggatccaggagaaagtgtggctctctcaggaggtggacaaactgagagtgatgttcctggagatgaaaaatgagaaggaaaaactcatgatcaagttccagagccatagaaatatcctagaggagaaccttcggcgctctgacaaggagttagaaaaactagatgacattgttcagcatatttataagaccctgctctctattccagaggtggtgaggggatgcaaagaactacagggattgctggaatttctgagctaagaaactgaaagccagaatctgcttcacctctttttacctgcaatacccccttaccccaataccaagaccaactggcatagagccaactgagataaatgctatttaaataaagtgtatttaatg

SEQ ID NO: 4766 - protein, 1193 aa, Homo sapiens
MWRVKKLSLSLSPSPQTGKPSMRTPLRELTLQPGALTNSGKRSPACSSLTPSLCKLGLQEGSNNSSPVDFVNNKRTDLSSEHFSHSSKWLETCQHESDEQPLDPIPQISSTPKTSEEAVDPLGNYMVKTIVLVPSPLGQQQDMIFEARLDTMAETNSISLNGPLRTDDLVREEVAPCMGDRFSEVAAVSEKPIFQESPSHLLEESPPNPCSEQLHCSKESLSSRTEAVREDLVPSESNAFLPSSVLWLSPSTALAADFRVNHVDPEEEIVEHGAMEEREMRFPTHPKESETEDQALVSSVEDILSTCLTPNLVEMESQEAPGPAVEDVGRILGSDTESWMSPLAWLEKGVNTSVMLENLRQSLSLPSMLRDAAIGTTPFSTCSVGTWFTPSAPQEKSTNTSQTGLVGTKHSTSETEQLLCGRPPDLTALSRHDLEDNLLSSLVILEVLSRQLRDWKSQLAVPHPETQDSSTQTDTSHSGITNKLQHLKESHEMGQALQQARNVMQSWVLISKELISLLHLSLLHLEEDKTTVSQESRRAETLVCCCFDLLKKLRAKLQSLKAEREEARHREEMALRGKDAAEIVLEAFCAHASQRISQLEQDLASMREFRGLLKDAQTQLVGLHAKQEELVQQTVSLTSTLQQDWRSMQLDYTTWTALLSRSRQLTEKLTVKSQQALQERDVAIEEKQEVSRVLEQVSAQLEECKGQTEQLELENSRLATDLRAQLQILANMDSQLKELQSQHTHCAQDLAMKDELLCQLTQSNEEQAAQWQKEEMALKHMQAELQQQQAVLAKEVRDLKETLEFADQENQVAHLELGQVECQLKTTLEVLRERSLQCENLKDTVENLTAKLASTIADNQEQDLEKTRQYSQKLGLLTEQLQSLTLFLQTKLKEKTEQETLLLSTACPPTQEHPLPNDRTFLGSILTAVADEEPESTPVPLLGSDKSAFTRVASMVSLQPAETPGMEESLAEMSIMTTELQSLCSLLQESKEEAIRTLQRKICELQARLQAQEEQHQEVQKAKEADIEKLNQALCLRYKNEKELQEVIQQQNEKILEQIDKSGELISLREEVTHLTRSLRRAETETKVLQEALAGQLDSNCQPMATNWIQEKVWLSQEVDKLRVMFLEMKNEKEKLMIKFQSHRNILEENLRRSDKELEKLDDIVQHIYKTLLSIPEVVRGCKELQGLLEFLS

SEQ ID NO: 4767 - DNA, 2126 bp, Homo sapiens
cctttgcctttgaggctctgtggctgtggggctgagtggcatcatggcggctcagaaagatctctgggacgccattgtgattggggcggggatccagggctgcttcactgcataccacctggccaaacacaggaagaggatcctcctgctggagcagttctttctaccacactcccgaggaagctcccatggacaaagccggataatccgaaaggcgtacctggaagacttttacacccggatgatgcatgagtgctatcagatatgggcccagctggagcacgaggctggaacccaattgcacaggcagactggattactgctgctgggaatgaaagagaatcaagaattaaagacaatccaggccaatctgtcgaggcagagggtagaacaccagtgtctttcatctgaggaactgaagcaacgtttcccaaatattcggttgcccaggggagaagtggggctcttggacaattccggaggagttatctatgcatataaggccctcagagccctgcaggatgcaattcgacagctaggaggcatagtgcgtgacggagagaaggtggtggagataaacccagggctactggtcacggtgaaaaccacctccaggagctaccaagctaagagcttggtcatcacagcaggtccttggaccaaccagctcctccgtcccctgggcattgagatgcctctccagaccctgcggatcaacgtgtgttactggcgagagatggttcctgggagctatggtgtgtcccaggcctttccgtgcttcctgtggctgggcttgtgtccccaccacatctacggactgcccacaggagagtacccagggctgatgaaggtcagctatcaccacggcaaccacgcagaccctgaggagcgggactgccccacagcacgcacagacatcggagacgtccagatcctgagcagctttgtcagagatcacttacctgatctgaagcccgagcctgctgtcattgagagctgcatgtacacgaatacccctgatgagcagttcattctcgatcgccacccaaagtatgacaacattgtcattggtgctggattctctgggcacgggttcaagctggcccctgtggtggggaagatcctgtatgaattaagcatgaaattaacaccatcttatgacttggcaccttttcgaatcagccgtttcccaagcctgggcaaagcccacctttgacctctggccagaagcctcccttctgtgcacaggagccagtttcacagatggagaagatgtctcagatgaagggagtgtccctgagatatcatccttttcttctgcctcgcctgaatcccccataaacaccagatgattgagtctaccttctttccttggcccgctccctttttcttctgcctcacttgaatcccccgtaaacaccagacgattgagtctaccttcttttcttggccacctccccattcacaactactttctcgctcccagaaggttgatcagatattctacaatcacagagtagcaaggacgtttgagatgggtatatcagtaagaagagggcacaagaactggctctggagaccaaagcagttgttaaaaattctctttgctgggggccgggtgtggtggctcacacctgtaatctcggcactttggggggctgagacaggcggatcacctgaggccaggaattcaagaccagcctggccaacatggtgaaaccctatctccactaaaaatacaaaattagctgggtgtggtggcgcatgcctgtaatcccagctacttgggagactgaggcaagagaatcacttgaacccgggaggtggaggtggcagtgagccgagattgcgccattgcactccagcctgggcaaaaagagtgagactctgtctcaaaaaaaaaacaaaacaaaaaaaacctctttgctggtatatttgaagagcttgggatggatttgactaaatctgccccgaggagggtgaacaaggtgatctcagagatcactactgctcttggagttccttctcctaaagctaaggccagcctccatcacaaatgcccataaaatctggctcgtctttgatgaacaataaatatttgttgaacaaataaataactgccctgc

SEQ ID NO: 4768 - DNA, 404 bp, Homo sapiens
gcttgaccactatgctatcatcaagtttccgctgaccactgagtctgccatgaagaagatagaagacaacaacacacttgtgttcattgtggatgttaaagccaacaagcaccagattaaacaggctgtgaagaagctgtatgacattgatgtggccaaggtcaacaccctgattcggcctgatggagagaagaaggcatatgttcgactggctcctgattacgatgctttggatgttgccaacaaagtaagtttccttcctacaaaccccttaatgctcaccccttgggtgcaaatgatgcatatgttagcgaccaaagcctgatctttgctgattagtcataattaactgactgcacccctatccttgacaaaccttatcctcacattcctcattttgcttt

SEQ ID NO: 4769 - DNA, 1775 bp, Homo sapiens
tcagtgaaggagtcttcaagtgccctgaggaccagcttcctctggactatgccaagatctacccagacccggagctggaagtacaagtattgggcctgcctatccgctgcatccacagtgaggagggctgccgctggagtgggccactacgtcatctacagggccacctgaatacctgcagcttcaatgtcattccctgccctaatcgctgccccatgaagctgagccgccgtgatctacctgcacacttgcagcatgactgccccaagcggcgcctcaagtgcgagttttgtggctgtgacttcagtggggaggcctatgagagccatgagggtatgtgcccccaggagagtgtctactgtgagaataagtgtggtgcccgcatgatgcggcggctgctggcccagcatgccacctctgagtgccccaagcgcactcagccctgcacctactgcactaaggagttcgtctttgacaccatccagagccaccagtaccagtgcccaaggctgcctgttgcctgccccaaccaatgtggtgtgggcactgtggctcgggaggacctgccaggccatctgaaggacagctgtaacaccgccctggtgctctgcccattcaaagactccggctgcaagcacaggtgccctaagctggcaatggcacggcatgtggaggagagtgtgaagccacatctggccatgatgtgtgccctggtgagccggcaacggcaggagctgcaggagcttcggcgagagctggaggagctatcagtgggcagtgatggcgtgctcatctggaagattggcagctatggacggcggctacaggaggccaaggccaagcccaaccttgagtgcttcagcccagccttctacacacataagtatggttacaagctgcaggtgtctgcattcctcaatggcaatggcagtggtgagggcacacacctctcactgtacattcgtgtgctgcctggtgcctttgacaatctccttgagtggccctttgcccgccgtgtcaccttctccctgctggatcagagcgaccctgggctggctaaaccacagcacgtcactgagaccttccaccccgacccaaactggaagaatttccagaagccaggcacgtggcggggctccctggatgagagttctctgggctttggttatcccaagttcatctcccaccaggacattcgaaagcgaaactatgtgcgggatgatgcagtcttcatccgtgctgctgttgaactgccccggaagatcctcagctgagtgcaggtggggttcgaggggaaaggacgatggggcatgacctcagtcaggcactggctgaacttggagagggggccggacccccgtcagctgcttctgctgcctaggttctgttaccccatcctccctcccccagccaccaccctcaggtgcctccaattggtgcttcagccctggcccctgtggggaacaggtcttggggtcatgaagggctggaaacaagtgaccccagggcctgtctcccttcttgggtagggcagacatgccttggtgccggtcacactctacacggactgaggtgcctgctcaggtgctatgtcccaagagccataagggggtgggaattggggagggagaaagggtagttcaaagagtctgtcttgagatctgattttttccccctttacctagctgtgccccctctggttatttatttccttagtgccaggagggcacagcaggggagccctgatttttaataaatccggaattgtatttatt

SEQ ID NO: 4770 - protein, 240 aa, Homo sapiens
  unsure 199: unknown amino acid
  unsure 201: unknown amino acid
  unsure 202: unknown amino acid
MPGFDYKFLEKPKRRLLCPLCGKPMREPVQVSTCGHRFCDTCLQEFLSEGVFKCPEDQLPLDYAKIYPDPELEVQVLGLPIRCIHSEEGCRWSGPLRHLQGHLNTCSFNVIPCPNRCPMKLSRRDLPAHLQHDCPKRRLKCEFCGCDFSGEAYESHEGMCPQESVYCENKCGARMMRRLLAQHATSECPKRTQPCTYCXLXXSSSLTPSRATSTSAQGCLLPAPTNVVWALWLGRTCQAI

SEQ ID NO: 4771 - DNA, 1947 bp, Homo sapiens
gagactcgcccggctcaaccccgacgtccgcgccccggccgcctgttggccatggcgggcctgggcctgggctccgccgttcccgtgtggctggccgaggacgacctcggctgcatcatctgccaggggctgctggactggcccgccacgctgccctgcggccacagcttctgccgccactgcctggaggccctgtggggcgcccgcgacgcccgccgctgggcctgccccacttgccgccagggcgccgcgcagcagccgcacctgcggaagaacacgctactgcaggacctggccgacaagtaccgccgcgccgcacgcgagatacaggcgggctccgaccctgcccactgcccctgcccgggctccagttccctctccagcgcggccgcgaggccccggcgccgcccggaactgcagcgggtggcagtagagaagagcatcacagaagttgctcaggagctgacagagctggtggaacatcttgtagacattgtcagaagcctgcagaatcagaggcccctatcagaatctggaccagacaacgaactgagcatcctgggcaaggagaactcctggaagccccgtcttcctcctcatgcccattgcctgaccagagccaccctgcactcaggagagcttctcggtttgctcagtgggccatccatccaacctttaacttgaagagcctttcctgcagcctggaggtgtccaaggattcccgtacagtgactgtgtctcaccgcccacaaccctatcgctggagctgtgagaggttttctaccagccaggtcttatgttcccaggccctgtcttctggaaagcattactgggaagtggacactaggaattgcagccactgggcagttggggtggcttcctgggagatgagccgcgaccaggtcctgggaaggactatggactcttgttgtgtggaatggaaggggactagccagctctctgcatggcacatggtcaaggaaactgtccttggctcagacagacctggggtggtgggcatctggctgaaccttgaggagggaaagcttgccttctattcagtggacaatcaggagaagcttctgtatgagtgtaccatctctgcctcctctcctttgtaccctgccttctggctgtatggcttacatcctggaaattacctgataataaagcaagtaaaggtgtaaggtttcctaagggattacaacacagtggtttcctggtctctctccctgtcatcaatcagggtagtaacttgacttaagaataccactttttagaaaaattacgatagagatgggatctcactaggttgcccaggctggtgtcgaattcctggtctcaagcagtcctcccacctcagcctcccaaggtgctgggattacaggtgtgagccaccacacctggccaagaataccacttttgaagttaatccttttgtgtgatacaggatgaacttgggatgtttgaaccctggacattccaaataaagaataggcccctgcctggctcctgggagataacctctaagccattagaatatcttgcctgataagagtgtttttgtttacctgtgggccttgggccatgcagtatcagcttgaccttgcaaggtcaagctgaggagactaagttagccatgtgggcagtgaagcatgccaatgtgatcaatccctagtaaaagccctggacacctaggcatgggtgagctactctggttggtaatactctgtgcacacatcattgtagccacacatcattgctgggagaattaagcattatcctgaagactctgccaggagaggataattggaagttctcttggaccttaccttatgtgcctttcttcattgctgattttaatctgtatcctttcactgtaataaactgtaactatgagtgcaaaaaaaaaaaaaaaaaaaaaaaaaaaaaaaaaaaaaaaaaaaa

SEQ ID NO: 4772 - protein, 210 aa, Homo sapiens
MAGLGLGSAVPVWLAEDDLGCIICQGLLDWPATLPCGHSFCRHCLEALWGARDARRWACPTCRQGAAQQPHLRKNTLLQDLADKYRRAAREIQAGSDPAHCPCPGSSSLSSAAARPRRRPELQRVAVEKSITEVAQELTELVEHLVDIVRSLQNQRPLSESGPDNELSILGKENSWKPRLPPHAHCLTRATLHSGELLGLLSGPSIQPLT

SEQ ID NO: 4773 - DNA, 5288 bp, Homo sapiens
aggtggaaaaacttgtgaaatatttggatcccaacgacctggggagaatcaacttcaaggacttttgccggggggtgttcgccatgaaagggtgcgaggagctgctgaaggatgtgctgtcggtggagagcgcggggacgctgccgtgcgcgccagagatcccagactgcgtggagcagggcagcgaggtcacaggccccacctttgctgatggcgagctcatccccagggaacccggcttttttcccgaggacgaggaggaggctatgacgctggcgccacctgagggcccccaggagttgtacacagacagccccatggagagcactcagagcctggaggggtctgtcgggagtcctgccgagaaggacgggggacttgggggcctgtttctgccagaagacaagtccctggtccacactccatccatgacgacctcagacctttctacacactccaccacctcgctcatcagcaatgaggagcagtttgaagactatggggagggtgacgatgtggactgtgcccccagcagcccttgccccgatgatgagaccaggaccaacgtctactcggacctggggtcttcggtgtcttccagtgcggggcagacgcctaggaaaatgcggcacgtgtacaacagcgaattgctagatgtttactgctctcaatgctgcaagaaaatcaacctgctcaatgacttggaagcccgactgaaaaacctgaaggccaacagccccaaccgaaagatctccagcacggcctttggacggcagctcatgcacagcagcaacttcagcagcagcaatggcagcaccgaagacctgttccgggacagcattgactcttgcgacaatgacatcacagagaaggtaagcttcctggaaaagaaggtgacagagctggagaatgacagcctgaccaatggggacctgaagagcaagctgaagcaagagaacacacagctggtgcacagggtgcatgagctggaggagatggtgaaggatcaggagaccacggccgagcaggctctggaggaggaggcgcggcgccaccgcgaggcctacggcaagctggagagggagaaggctaccgaggtggagctgctcaatgccagggtgcagcagttggaggaagaaaatacagagcttagaacaacagtgactcggctcaagtctcaaacagagaaactggatgaggagcggcagcgcatgtctgaccgtctggaggacaccagcctgcggctcaaagatgagatggacctgtacaagcgcatgatggacaagctgcgacagaaccgccttgagttccagaaggagcgggaggcgacgcaggagctcatcgaggacttgcggaaggagctggagcacctgcagatgtacaagctggactgcgagcggccaggcaggggccgcagtgcctcctctggcctaggcgagttcaatgccagggcccgcgaggtggagctcgagcacgaggtcaagcggctcaagcaggagaattataagctgcgggatcagaacgacgacttgaatgggcagattttgagcctcagcctctacgaagcaaaaaacctctttgctgcccagactaaagcccagtctctggctgcggagatagacaccgcctcgcgcgatgagctaatggaagccctgaaggagcaggaggagatcaacttccggctgaggcagtacatggacaagattatcctcgccatcctggaccacaatccctccatcctcgagatcaaacactaaggcacggggctggctgcagagcagccttaggaccctgggaccaagggcagaccctgcccaaggatgcaggcctaagccgggcctcacactcacactgtaaatgtctctctggccaccatgcgttacgtgtacccgtgtatatgtggggaggctgtgcacacgagcgaggggtgagtggccgtggctgtgggcagcatccacacggttagccgtgcatgcactttgtggcccctttgcaaggggcagagggtactggaagtgggaggaggcaaggtctgctatcaggagttactgtaaaaacaagaactggaagctcgtgtttccggtactgggtaaaatgattctacctctggggataaggattcacattcgctctagtacgatgggctctttcaccccactcctagtccccttgggagtgggagcaaaattgtgatctttcctaggagtttgaatgccccatatttgtgtcctcgccagctctttggccacctttcaagccccagtgttcaagctcagagaggatgaaggggcatctggagggtccatgagatggggccctcaccaaatgccttggccaccggccagcagccctctgtgatgtgtgtgcagagtgaacagaggactcaggtttcatagcagctagtgcggggcatcctcatcctgtacctatagagttcgtgcactcccccatccatgctacctacctccccgtttctgtttcagttttaagacaatgaagcagcattcactgcgtcattgtaacatgaagggataaaaatgaaggagaaggagggtttgggatgggtgtctaaggcaggagttgacatcgggcaaccaaagaaatgagttttggggaggaacacaactcccatcccagtcagtttccttcccatggctgcatcttaagatggatgcacggagaaaccgtctgcctggctccctgtcttcattctccacgcagcctggtgatggcaggcctgggtttggatttcagaatcctagctccgggctccactcgtgtggcagcaagactgcttcgttccagcgtttagaaacacacctgtatttgattctcagccaggggagcactcgctgcactggtgggaggcggttgggaaagttgcaggaaaaccttagtcttccatccttctgacccatggtggaaattcacaccatggatttttaatggatctttgttctaggcagctgggaatagacatggtacttaccttagagttttccaatttatctcaattttatatggcttgtgattcattttcttaatccaaatatatataaacgtgtgtggtcttattcttccccctgcagtttcttgctttcttcagcacatcttatagtatgagaaggaaggtttgggcatgttgggaagggcggtggagggggagttgcagaaagagagggcagtgagggtgaggagaggggatctggggacttgggtgtgacacctgcttgacagaggcagggctgtggccaggaccaaccttcaattccattccaatcagcctttgcatttgttggatctcgtggcttctttttaatcttttgttggggattagtttcatgctgcacataatggggttgcactggtctgacccaggactttggagccacccacactgggaagactaggctaggcagtcggtcttctaggagtttctcagccccttaggacgcgggtctccttgggctcccccaagggttctgcgaagaggcagtggaagaaggcatgaggagagggtctcttgagaatttgccaataggaaggagtggccacggctgaaaggaacaagacagatcctgacatagctttggcctgggtgttaggtcagaaggagtactggtgcgtgggggccttaccccagggttgagtattttatctgtaaaatgttatctgccctttggctgcattggaatttcagagaaggctgcagaggcctgggttacacagcctgagtcacaacgtgggaaggaatctctgccacgggaaaggtgggcggaagcagctggcagcctggggcgtgcttcaggctcctccctctaaggggcgccatgggaacaggctccggagggagccggcgtctgaaaggcccccgggacctgctgcagtgccagaggggcctctggagcaggcctggcttttaaatggggggctgaattccagctcacacacacctcaagtccaaccttactttcttcagccagaatacatttcttgtaaaacctggcttgttgcttggcttttaaagatggtgtatgtttgtaaaaatattcttctgggctcaaaagctagcttgagggggcagatgccccaggtgtcccagctccacagcccctggcagatcccagaccccttggtggcaggtcccagagcctaggtggtaggagcttgatctttgtttctgcccttacccctcagtagtggggctgcgaggtagtagacaggatgcccagttaagtttgaatttcagatagaaaataattttagaataaatatgttctatctaatacatgggacagatgttatttttagagataggatcttgctctgttgcccaggctggagtgtagtggtatgatcatagctcaccacaaccttgaactcccaggctcaagcgatcctcccgccttaactgcctgagtagctgggactacaggcatgcaccaccacgcccagctaatttttcttattttttgtagagacagggtctcactgtgttgcctcactcgagctgctgacctcaagtgatcctcccacctcagcctgccaaagcactgggattacaggcatgagccaccatgcctggccaggacatatttgaaatggggagattttaaaaattctgatgattagactgaatcctcagacgttctggtttgattgttgtgggtgtagcccaggcatgggattttttaaagagctgctcaggtaattccaatttaattgcgtgtcctacttgggttttttgtttgtttttattgtttttgctaaacctggcaaccctaccgagtagggattagcagtaacttatctgaaatttagaggtgttttgggggtggggcgagggtttctgtagtagactcagattttacatggccctgagctgcccttgcgttcagttggaagccacgcaaaatgaactgaaccaggagtgagcttcgtgtacattatctattagaaaatgaagtaccttctggttcagctagtccctgtgcgttgagaggctttaagaaacttctagtaaaaatgtttttttcttttagctttgaattggccagagtttatcctagattattttattttaaattggtagaattctttgcgaactgtcacagagaaattccttttcatgactttatttctgacctattaaaacatgaacaggccaggcatggtggctcacgcctgtaatcctagcacttgggaggcagtggcaggcggatcacttgagctcaggagtcctaaaccagcctgggcaacatagtgataccttgtctctaccaaaagtt

SEQ ID NO: 4774 - protein, 557 aa, Homo sapiens
MKGCEELLKDVLSVESAGTLPCAPEIPDCVEQGSEVTGPTFADGELIPREPGFFPEDEEEAMTLAPPEGPQELYTDSPMESTQSLEGSVGSPAEKDGGLGGLFLPEDKSLVHTPSMTTSDLSTHSTTSLISNEEQFEDYGEGDDVDCAPSSPCPDDETRTNVYSDLGSSVSSSAGQTPRKMRHVYNSELLDVYCSQCCKKINLLNDLEARLKNLKANSPNRKISSTAFGRQLMHSSNFSSSNGSTEDLFRDSIDSCDNDITEKVSFLEKKVTELENDSLTNGDLKSKLKQENTQLVHRVHELEEMVKDQETTAEQALEEEARRHREAYGKLEREKATEVELLNARVQQLEEENTELRTTVTRLKSQTEKLDEERQRMSDRLEDTSLRLKDEMDLYKRMMDKLRQNRLEFQKEREATQELIEDLRKELEHLQMYKLDCERPGRGRSASSGLGEFNARAREVELEHEVKRLKQENYKLRDQNDDLNGQILSLSLYEAKNLFAAQTKAQSLAAEIDTASRDELMEALKEQEEINFRLRQYMDKIILAILDHNPSILEIKH

SEQ ID NO: 4775 - DNA, 920 bp, Homo sapiens
ggctgattggcgcttctgcggcggatcctcgggcgggcagccgggccggcgcgtcacgtggcccacggcgtccagggcgaccagccgcgggccgcagggcatggaccttcaggccgccggggcccaggcgcagggggccgcggagccgtctcggggcccgccgctgcctagcgcgcggggggcgccccccagcccggaggctggctttgctacagctgaccactccagtcaggagagagagactgagaaggctatggatcgactagcccgtggaacacagagcattcctaatgacagtcctgcccggggtgagggcacccattctgaagaggaaggctttgccatggatgaggaggactctgatggagaactgaatacctgggagctgtcagaagggacaaactgtccacccaaggaacagcctggcgatctttttaatgaggactgggactcggagttgaaagcagatcaagggaatccatatgatgctgacgacatccaggagagcatttctcaagagcttaaaccttgggtgtgctgtgccccacaaggagacatgatctatgaccccagctggcaccatccgcctccactgataccctattattccaagatggtctttgaaacaggacagtttgacgatgctgaagattgagtgtggagctttctgccttgtaggtgggcgggcctccacgtcaagatctcttttcctgtcttggaggtgaaaagtcatatctgagaaaatgtttgcagtgacccctagtctggggtacacagaccagtgttccttattgacagtgttcaataaggccccgtcattctcgccagtctgttgttgttcttaatgggctcctccttgaaatgtgtgtgtgtttgtgtcaagaggagttgtgttctttgtaaataaaggttaaaaagag

SEQ ID NO: 4776 - protein, 184 aa, Homo sapiens
MDLQAAGAQAQGAAEPSRGPPLPSARGAPPSPEAGFATADHSSQERETEKAMDRLARGTQSIPNDSPARGEGTHSEEEGFAMDEEDSDGELNTWELSEGTNCPPKEQPGDLFNEDWDSELKADQGNPYDADDIQESISQELKPWVCCAPQGDMIYDPSWHHPPPLIPYYSKMVFETGQFDDAED

SEQ ID NO: 4777 - DNA, 2327 bp, Homo sapiens
gaggcggagcggggaacgaggccgtcggccattttgtgtctgcttcctgtgggacgtggtggtagccgttgggttgggaaagtgagggatttttggcctcgtttctcctgcttcttttctcctcccttttactttgccggtagaacacagttatgggtcgcaagaagaagaagcagctgaagccgtggtgctggtattgtaatagagattttgatgatgagaagatccttattcagcaccaaaaagcaaagcattttaaatgccatatatgtcacaagaaattgtatacaggacctggcttagctattcattgcatgcaggtacataaagaaacaatagatgccgtaccaaatgcaatacctggaagaacagacatagagttggaaatatatggtatggaaggtattccagaaaaagacatggatgaaagacgacgacttcttgaacagaaaacacaagaaagtcaaaaaaagaagcaacaagatgattctgatgaatatgatgatgacgactctgcagcctcaacttcatttcagccacagcctgttcaacctcagcaaggttatattcctccaatggcacagccaggactgccaccagtaccaggagcaccaggaatgcctccaggcatacctccattaatgccaggtgttcctcctctgatgccaggaatgccaccagttatgccaggcatgccacctggattgcatcatcagagaaaatacacccagtcattttgcggtgaaaacataatgatgccaatgggtggaatgatgccacctggaccaggaataccacctctgatgcctggaatgccaccaggtatgcccccacctgttccacgtcctggaattcctccaatgactcaagcacaggctgtttcagcgccaggtattcttaatagaccacctgcaccaacagcaactgtacctgccccacagcctccagttactaagcctcttttccccagtgctggacagatggggacacctgtcacaagctcaagtacagcttcatccaattcagaaagtctgtctgcatcttctaaagctctgtttcctagcacagcacaagctcaggcagctgtccaaggacctgttggtacagatttcaaacccttaaatagtacccctgcaacaactacagaacccccaaagcctacattccctgcttatacacagtctacagcttcaacaactagtacaacaaatagtactgcagctaaaccagcggcttcaataacaagtaagcctgctacacttacaacaactagtgcaaccagtaagttgatccatccagatgaggatatatccctggaagagagaagggcacagttacctaagtatcaacgtaatcttcctcggccaggacaggcccccatcggtaatccaccagttggaccaattggaggtatgatgccaccacagccaggcatcccacagcaacaaggaatgagacccccaatgccacctcatggtcagtatggtggtcatcatcaaggcatgccaggataccttcctggtgctatgcccccgtatgggcagggaccgccaatggtgcccccttaccagggtgggcctcctcgacctccgatgggaatgagacctcctgtaatgtcgcaaggtggccgttactgatcttacttcatccagtctaataggtttggagattaaaccttttctcaacttgtgctgtttatatagccaagcttccgtcaataaggcttcattgtgactttaacaaacattatcttcccacataccaggaactattggacatttattttacatgggaaaaattatttggaataataaagcaggaacttttcctgaagttgcaatttatactgtatggcttctttttcatgtttcatctaggtttttagaagtgaagtatagtaaatttggttcgttaaattgtgaaggcgctggaattacatgaacataccaccctagtaaaggcaagttctgtaagcttacattgctatttgtaaagtttgccttcacagcatttcagatgctgttggacttcatgtccccaacctagcttggtgagggctgtaactgtttccaagtacttgtacattggaagtctgaatgtgtaacaatatttaatgtatttagagttcctcatgttgcagggtttaagaaatctgacccaccaaggtcatgtgacttttctgtactgttaaacttcattgtaataaaatgagagaaaaatttatgcctttttattcataacccagctgtggaccactgcctgaaaggtttgtacagatgcatgccacagtagatgtccacataataaaattcatagttaccaatgca

SEQ ID NO: 4778 - DNA, 1269 bp, Homo sapiens
atggcggcggcggcggtggtggagttccagagagcccagtctctactcagcaccgaccgggaggcctccatcgacatcctccactccatcgtgaagcgtgacattcaggaaaacgatgaagaggcagtgcaagtcaaagagcagagcatcctggaactgggatctctcctggcaaagactggacaagctgcagagcttggaggactcctgaagtatgtacgacccttcttgaattccatcagcaaggctaaagcagctcgcctggtccgatctcttcttgatctgtttcttgatatggaagcagctacagggcaggaggtcgagctgtgtttagagtccatcgaatgggccaagtcagagaaaagaactttcttacgccaagctttggaggcaagactggtgtctttgtactttgataccaagaggtaccaggaagcattgcatttgggttctcagctgctgcgggagttgaaaaagatggacgacaaagctcttttggtggaagtacagcttttagaaagcaaaacataccatgccctgagcaacctgccgaaagcccgagctgccttaacttctgctcgaaccacagcaaatgccatctactgcccccctaaattgcaggccaccttggacatgcagtcgggtattatccatgcagcagaagagaaggactggaaaactgcgtactcatacttctatgaggcatttgagggttatgactccatcgacagccccaaggccatcacatctctgaagtacatgttgctgtgcaaaatcatgctcaacaccccagaagatgtccaggctttggtgagcgggaagcttgcacttcggtatgcagggaggcagacagaagcattaaaatgcgtggctcaggctagcaagaacagatcactggcagattttgaaaaggctctgacagattaccgggcagagctccgggatgacccaatcatcagcacacacttggccaagttgtatgataacttactagaacagaatctgatccgagtcattgagcctttttccagagtacagattgaacacatatctagtctcatcaaactctccaaggccgacgtggaaaggaaattatcacagatgattcttgacaagaaatttcatgggattttggaccagggggagggtgtcctgattattttcgatgaacccccagtagataaaacttacgaagctgctctggaaacaattcagaacatgagcaaagtagtggattccctctacaacaaagccaagaaactgacatag

SEQ ID NO: 4779 - protein, 422 aa, Homo sapiens [sequence omitted]

SEQ ID NO: 4780 - DNA, 1560 bp, Homo sapiens
ggcaggcccgcgcccgcgcccggactttgccatcggcggggcagtcgcgggatgcgcccgggagccacagcctgaggccctcaggtctctgcaggtgtcgtggaggaacctagcacctgccatcctcttccccaatttgccacttccagcagctttagcccatgaggaggatgtgaccgggactgagtcaggagccctctggaagcatggagactgtggtgattgttgccataggtgtcctggccaccatctttctggcttcgtttgcagccttggtgctggtttgcaggcagcgctactgccggccgcgagacctgctgcagcgctatgattctaagcccattgtggacctcattggtgccatggagacccagtctgagccctctgagttagaactggacgatgtcgttatcaccaacccccacattgaggccattctggagaatgaagactggatcgaagatgcctcgggtctcatgtcccactgcattgccatcttgaagatttgtcacactccgacagagaagcttgttgccatgacaatgggctctggggccaagatgaagacttcagccagtgtcagcgacatcattgtggtggccaagcggatcagccccagggtggatgatgttgtgaagtcgatgtaccctccgttggaccccaaactcctggacgcacggacgactgccctgctcctgtctgtcagtcacctggtgctggtgacaaggaatgcctgccatctgacgggaggcctggactggattgaccagtctctgtcggctgctgaggagcgtttggaagtccttcgagaagcagccctagcttctgagccagataaaggcctcccaggccctgaaggcttcctgcaggagcagtctgcaatttagtgcctacaggccagcagctagccatgaaggcccctgccgccatccctggatggctcagcttagccttctactttttcctatagagttagttgttctccacggctggagagttcagctgtgtgtgcatagtaaagcaggagatccccgtcagtttatgcctcttttgcagttgcaaactgtggctggtgagtggcagtctaatactacagttaggggagatgccattcactctctgcaagaggagtattgaaaactggtggactgtcagctttatttagctcacctagtgttttcaagaaaattgagccaccgtctaagaaatcaagaggtttcacattaaaattagaatttctggcctctctcgatcggtcagaatgtgtggcaattctgatctgcattttcagaagaggacaatcaattgaaactaagtaggggtttcttcttttggcaagacttgtactctctcacctggcctgtttcatttatttgtattatctgcctggtccctgaggcgtctgggtctctcctctcccttgcaggtttgggtttgaagctgaggaactacaaagttgatgatttcttttttatctttatgcctgcaattttacctagctaccactaggtggatagtaaatttatacttatgtttccctaaaaaaaaaaaaaaaaaaaa

SEQ ID NO: 4781 - protein, 226 aa, Homo sapiens
METVVIVAIGVLATIFLASFAALVLVCRQRYCRPRDLLQRYDSKPIVDLIGAMETQSEPSELELDDVVITNPHIEAILENEDWIEDASGLMSHCIAILKICHTPTEKLVAMTMGSGAKMKTSASVSDIIVVAKRISPRVDDVVKSMYPPLDPKLLDARTTALLLSVSHLVLVTRNACHLTGGLDWIDQSLSAAEERLEVLREAALASEPDKGLPGPEGFLQEQSAI

SEQ ID NO: 4782 - DNA, 330 bp, Homo sapiens
atgctgaagctcacacccttgccctccaagatgaaggtttctgcagcgcttctgtgcctgctgctcatggcagccactttcagccctcagggacttgctcagccagattcagtttccattccaatcacctgctgctttaacgtgatcaataggaaaattcctatccagaggctggagagctacacaagaatcaccaacatccaatgtcccaaggaagctgtgatcttcaagacccaacggggcaaggaggtctgtgctgaccccaaggagagatgggtcagggattccatgaagcatctggaccaaatatttcaaaatctgaagccatga

SEQ ID NO: 4783 - protein, 109 aa, Homo sapiens
MLKLTPLPSKMKVSAALLCLLLMAATFSPQGLAQPDSVSIPITCCFNVINRKIPIQRLESYTRITNIQCPKEAVIFKTQRGKEVCADPKERWVRDSMKHLDQIFQNLKP

SEQ ID NO: 4784 - DNA, 1849 bp, Homo sapiens
ctggaacccggaagcggcagcgcggcgcgacccggcgggcgggctctgggcgcgggaatcccggcggatcccgggcgggcggatgacccccagccctacccttggtgccgcctcctcctctctcctttctcctccggcagccagcgcgcctgtgtcctctctaggaaggggtaggggaggggcgtctggagaggaccccccgcgaatgcccacgtgacgtgcagtccccctggggctgttccggcctgcggggaacatgggcgtgctcagggtcggactgtgccctggccttaccgaggagatgatccagcttctcaggagccacaggatcaagacagtggtggacctggtttctgcagacctggaagaggtagctcagaaatgtggcttgtcttacaaggccctggttgccctgaggcgggtgctgctggctcagttctcggctttccccgtgaatggcgctgatctccacgaggaactgaagacctctactgccatcctgtccactggcattggcagtcttgataaactgcttgatgctggtctctatactggagaagtgactgaaattgtaggaggcccaggtagcggcaaaactcaggtatgtctctgtatggcagcaaatgtggcccatggcctgcagcaaaacgtcctatatgtagattccaatggagggctgacagcttcccgcctcctccagctgcttcaggctaaaacccaggatgaggaggaacaggcagaagctctccggaggatccaggtggtgcatgcatttgacatcttccagatgctggatgtgctgcaggagctccgaggcactgtggcccagcaggtgactggttcttcaggaactgtgaaggtggtggttgtggactcggtcactgcggtggtttccccacttctgggaggtcagcagagggaaggcttggccttgatgatgcagctggcccgagagctgaagaccctggcccgggaccttggcatggcagtggtggtgaccaaccacataactcgagacagggacagcgggaggctcaaacctgccctcggacgctcctggagctttgtgcccagcactcggattctcctggacaccatcgagggagcaggagcatcaggcggccggcgcatggcgtgtctggccaaatcttcccgacagccaacaggtttccaggagatggtagacattgggacctgggggacctcagagcagagtgccacattacagggtgatcagacatgacctgtgctgttgtttgggaaacagggaagcattggggacccctcccaacttttcttcccagtaacgcctgctgtttactgccacctggcactggtgactacagacgttctcaggctggccagaagagacatcttgggttccttggcctcactctctgtaagcatataaaccacaggcgaaagaggatgctgcattgcgaggacccagaaattcatactggtgccacgtttccttcccttatttctaacgtgtatgtttctggtggaaaccaagttcaccctggctgggagcatctctgatgaggcatgctggcgactggatggataatcctgtgcatcaccattgtgtcctgtgctccctcctagcgcagtggccaagccgggaaagcctctaacttgcctttgctgctgctgccttttttttcttttgtctctgcctttccatttgttagatgggggcccactcttccttagctctgtctctgagttactgggtggaaataagcttataaatgaaatactcttcttcatctctgttttgctcttaaaaatataaaaaggcaattccccgaaaaaaaaaaaaaaaaaaaaaaaaaaaaaaaaaaaa

SEQ ID NO: 4785 - protein, 328 aa, Homo sapiens
MGVLRVGLCPGLTEEMIQLLRSHRIKTVVDLVSADLEEVAQKCGLSYKALVALRRVLLAQFSAFPVNGADLHEELKTSTAILSTGIGSLDKLLDAGLYTGEVTEIVGGPGSGKTQVCLCMAANVAHGLQQNVLYVDSNGGLTASRLLQLLQAKTQDEEEQAEALRRIQVVHAFDIFQMLDVLQELRGTVAQQVTGSSGTVKVVVVDSVTAVVSPLLGGQQREGLALMMQLARELKTLARDLGMAVVVTNHITRDRDSGRLKPALGRSWSFVPSTRILLDTIEGAGASGGRRMACLAKSSRQPTGFQEMVDIGTWGTSEQSATLQGDQT

SEQ ID NO: 4786 - DNA, 1694 bp, Homo sapiens
ctggaacccggaagcggcagcgcggcgcgacccggcgggcgggctctgggcgcgggaatcccggcggatcccgggcgggcggatgacccccagccctacccttggtgccgcctcctcctctctcctttctcctccggcagccagcgcgcctgtgtcctctctaggaaggggtaggggaggggcgtctggagaggaccccccgcgaatgcccacgtgacgtgcagtccccctggggctgttccggcctgcggggaacatgggcgtgctcagggtcggactgtgccctggccttaccgaggagatgatccagcttctcaggagccacaggatcaagacagtggtggacctggtttctgcagacctggaagaggtagctcagaaatgtggcttgtcttacaagtcttgataaactgcttgatgctggtctctatactggagaagtgactgaaattgtaggaggcccaggtagcggcaaaactcaggtatgtctctgtatggcagcaaatgtggcccatggcctgcagcaaaacgtcctatatgtagattccaatggagggctgacagcttcccgcctcctccagctgcttcaggctaaaacccaggatgaggaggaacaggcagaagctctccggaggatccaggtggtgcatgcatttgacatcttccagatgctggatgtgctgcaggagctccgaggcactgtggcccagcaggtgactggttcttcaggaactgtgaaggtggtggttgtggactcggtcactgcggtggtttccccacttctgggaggtcagcagagggaaggcttggccttgatgatgcagctggcccgagagctgaagaccctggcccgggaccttggcatggcagtggtggtgaccaaccacataactcgagacagggacagcgggaggctcaaacctgccctcggacgctcctggagctttgtgcccagcactcggattctcctggacaccatcgagggagcaggagcatcaggcggccggcgcatggcgtgtctggccaaatcttcccgacagccaacaggtttccaggagatggtagacattgggacctgggggacctcagagcagagtgccacattacagggtgatcagacatgacctgtgctgttgtttgggaaacagggaagcattggggacccctcccaacttttcttcccagtaacgcctgctgtttactgccacctggcactggtgactacagacgttctcaggctggccagaagagacatcttgggttccttggcctcactctctgtaagcatataaaccacaggcgaaagaggatgctgcattgcgaggacccagaaattcatactggtgccacgtttccttcccttatttctaacgtgtatgtttctggtggaaaccaagttcaccctggctgggagcatctctgatgaggcatgctggcgactggatggataatcctgtgcatcaccattgtgtcctgtgctccctcctagcgcagtggccaagccgggaaagcctctaacttgcctttgctgctgctgccttttttttcttttgtctctgcctttccatttgttagatgggggcccactcttccttagctctgtctctgagttactgggtggaaataagcttataaatgaaatactcttcttcatctctgttttgctcttaaaaatataaaaaggcaattccccg

SEQ ID NO: 4787 - protein, 49 aa, Homo sapiens
MGVLRVGLCPGLTEEMIQLLRSHRIKTVVDLVSADLEEVAQKCGLSYKS

SEQ ID NO: 4788 - DNA, 1559 bp, Homo sapiens
ctggaacccggaagcggcagcgcggcgcgacccggcgggcgggctctgggcgcgggaatcccggcggatcccgggcgggcggatgacccccagccctacccttggtgccgcctcctcctctctcctttctcctccggcagccagcgcgcctgtgtcctctctaggaaggggtaggggaggggcgtctggagaggaccccccgcgaatgcccacgtgacgtgcagtccccctggggctgttccggcctgcggggaacatgggcgtgctcagggtcggactgtgccctggccttaccgaggagatgatccagcttctcaggagccacaggatcaagacagtggtggacctggtttctgcagacctggaagaggtagctcagaaatgtggcttgtcttacaagtcttgataaactgcttgatgctggtctctatactggagaagtgactgaaattgtaggaggcccaggtagcggcaaaactcaggcagaagctctccggaggatccaggtggtgcatgcatttgacatcttccagatgctggatgtgctgcaggagctccgaggcactgtggcccagcaggtgactggttcttcaggaactgtgaaggtggtggttgtggactcggtcactgcggtggtttccccacttctgggaggtcagcagagggaaggcttggccttgatgatgcagctggcccgagagctgaagaccctggcccgggaccttggcatggcagtggtggtgaccaaccacataactcgagacagggacagcgggaggctcaaacctgccctcggacgctcctggagctttgtgcccagcactcggattctcctggacaccatcgagggagcaggagcatcaggcggccggcgcatggcgtgtctggccaaatcttcccgacagccaacaggtttccaggagatggtagacattgggacctgggggacctcagagcagagtgccacattacagggtgatcagacatgacctgtgctgttgtttgggaaacagggaagcattggggacccctcccaacttttcttcccagtaacgcctgctgtttactgccacctggcactggtgactacagacgttctcaggctggccagaagagacatcttgggttccttggcctcactctctgtaagcatataaaccacaggcgaaagaggatgctgcattgcgaggacccagaaattcatactggtgccacgtttccttcccttatttctaacgtgtatgtttctggtggaaaccaagttcaccctggctgggagcatctctgatgaggcatgctggcgactggatggataatcctgtgcatcaccattgtgtcctgtgctccctcctagcgcagtggccaagccgggaaagcctctaacttgcctttgctgctgctgccttttttttcttttgtctctgcctttccatttgttagatgggggcccactcttccttagctctgtctctgagttactgggtggaaataagcttataaatgaaatactcttcttcatctctgttttgctcttaaaaatataaaaaggcaattccccg

SEQ ID NO: 4789 - protein, 49 aa, Homo sapiens; identical to SEQ ID NO: 4787

SEQ ID NO: 4790 - DNA, 1477 bp, Homo sapiens
ctggaacccggaagcggcagcgcggcgcgacccggcgggcgggctctgggcgcgggaatcccggcggatcccgggcgggcggatgacccccagccctacccttggtgccgcctcctcctctctcctttctcctccggcagccagcgcgcctgtgtcctctctaggaaggggtaggggaggggcgtctggagaggaccccccgcgaatgcccacgtgacgtgcagtccccctggggctgttccggcctgcggggaacatgggcgtgctcagggtcggactgtgccctggccttaccgaggagatgatccagcttctcaggagccacaggatcaagacagtggtggacctggtttctgcagacctggaagaggtagctcagaaatgtggcttgtcttacaaggcagaagctctccggaggatccaggtggtgcatgcatttgacatcttccagatgctggatgtgctgcaggagctccgaggcactgtggcccagcaggtgactggttcttcaggaactgtgaaggtggtggttgtggactcggtcactgcggtggtttccccacttctgggaggtcagcagagggaaggcttggccttgatgatgcagctggcccgagagctgaagaccctggcccgggaccttggcatggcagtggtggtgaccaaccacataactcgagacagggacagcgggaggctcaaacctgccctcggacgctcctggagctttgtgcccagcactcggattctcctggacaccatcgagggagcaggagcatcaggcggccggcgcatggcgtgtctggccaaatcttcccgacagccaacaggtttccaggagatggtagacattgggacctgggggacctcagagcagagtgccacattacagggtgatcagacatgacctgtgctgttgtttgggaaacagggaagcattggggacccctcccaacttttcttcccagtaacgcctgctgtttactgccacctggcactggtgactacagacgttctcaggctggccagaagagacatcttgggttccttggcctcactctctgtaagcatataaaccacaggcgaaagaggatgctgcattgcgaggacccagaaattcatactggtgccacgtttccttcccttatttctaacgtgtatgtttctggtggaaaccaagttcaccctggctgggagcatctctgatgaggcatgctggcgactggatggataatcctgtgcatcaccattgtgtcctgtgctccctcctagcgcagtggccaagccgggaaagcctctaacttgcctttgctgctgctgccttttttttcttttgtctctgcctttccatttgttagatgggggcccactcttccttagctctgtctctgagttactgggtggaaataagcttataaatgaaatactcttcttcatctctgttttgctcttaaaaatataaaaaggcaattccccg

SEQ ID NO: 4791 - protein, 216 aa, Homo sapiens
MGVLRVGLCPGLTEEMIQLLRSHRIKTVVDLVSADLEEVAQKCGLSYKAEALRRIQVVHAFDIFQMLDVLQELRGTVAQQVTGSSGTVKVVVVDSVTAVVSPLLGGQQREGLALMMQLARELKTLARDLGMAVVVTNHITRDRDSGRLKPALGRSWSFVPSTRILLDTIEGAGASGGRRMACLAKSSRQPTGFQEMVDIGTWGTSEQSATLQGDQT

SEQ ID NO: 4792 - DNA, 2593 bp, Homo sapiens
gtggggacgcaggatggcggcagcagtggcggacgaggcggtggcgcgcgatgtgcagcggttgctagtgcagttccaggatgagggcgggcagctgctgggttccccgttcgacgtgcccgtggacatcaccccggacaggctgcagctcgtgtgcaacgcgctactggcccaggaggatcccctgccactggctttctttgtccacgatgctgagatcgtctcctcactggggaagacgttggagtcccaggcagtggagacagagaaggtcctagacatcatctaccagccacaggctatcttcagagtccgggctgtgactcgctgcaccagctccttggagggtcacagtgaggcagtcatttctgtggccttcagccctacgggaaagtacctggccagtggctctggagacaccaccgtgcgcttctgggatctcagcacagagacaccacatttcacatgcaagggacacagacactgggtccttagtatatcctggtctccagatggcaagaagctggcctcaggctgcaagaatggccagattctcctctgggacccaagcacagggaagcaggtgggcaggaccctcgctggccacagcaagtggatcacaggcctgagctgggagcccctccatgcgaaccctgagtgccgctatgtggccagcagctccaaggatggcagtgtgcggatctgggacacaactgcaggccgctgtgagcgcatcctcaccgggcacacccagtcggtcacctgtctccggtggggaggggacgggcttctctactctgcctcccaggaccgcaccatcaaagtctggagagctcatgacggtgtgctgtgccggactctgcaaggccacggccactgggtgaacaccatggccctcagcactgactatgccctgcgcactggggcctttgaacctgctgaggcctcagttaatccccaagacctccaaggatccttgcaggagttgaaggagagggctctgagccgatacaacctcgtgcggggccagggtccagagaggctggtgtctggctccgacgacttcaccttattcctgtggtccccagcagaggacaaaaagcctctcactcggatgacaggacaccaagctctcatcaaccaggtgctcttctctcctgactcccgcatcgtggctagtgcctcctttgacaagtccatcaagctgtgggatggcaggacgggcaagtacctggcttccctacgcggccacgtggctgccgtgtaccagattgcgtggtcagctgacagtcggctcctggtcagcggcagcagtgacagcacactgaaggtgtgggatgtgaaggcccagaagctggccatggacctgcccggccacgcggatgaggtatatgctgttgactggagtccagatggccagagagtggcaagtggtgggaaggacaaatgcctccggatatggaggagatgagacggcccgaagttctctctgacccccacctcgactcggcctctgccagctgccttccctgccagagaacaaaggctgagatggcagtgcacacaccctccccaccagtggggacctgagaatgcgtgtggcctgctgtcctcgatagaccggaatggggttttcccacagatccccgcctgtggcacaccccagagccagaaatcgaaggtcacaggaagttgtcactgaacttggcccgtgtctgctactctgtaccttgctggtacagacaggggtggtgggcagccaggctctatgagtgggcccctagtgtcagctctgtacagggtcagatcccaggttctatgaccaaataagtaacttaagttttgtgtgttgggttctaattccttgtcctagaatccccatgactcaatcaaggactgtgctaaatgagattgtccagcccccgcccttgcactggactacgccaaaaccacactgaccaggcacttgccttccctctcttcccccgtgttggtaagagagaggccagttgtgatagtggccaaggagaatctagggctgtattgttgtccactgcagtaggcaccggccacatgtgactgctggcatgaaatagaagtgcagttcctccatcgcactgggtaaggcctccagtattggacagcacacagaaaggttttcatcatcaagagagttctgctggtcagccctgctccaggggatgcctctgccttcgcatagcacactgcttgaggccctgccaggcaccaagcactgccctgggcccatgggatagagcggggaaggtgatggctcttccagaggattccctcagatggggaggcagcagtatgagctctgagcagaagtgggtattgttgatacagaggaagttctttgccacgagaactttcaagcagtgaaaggaattcccatcaggactcagaccccaggccgagatcttgccctgaatgtaccctgcctctgctttctcctgcatcccatgctaagcagggtcatggtctgaactactcagattggatttccaaaccatccttgtataaactgctcagaactaaaaaaaaaaaaaaaaaaaaaaaaaaaaaaaaaaaa

SEQ ID NO: 4793 - protein, 485 aa, Homo sapiens
MAAAVADEAVARDVQRLLVQFQDEGGQLLGSPFDVPVDITPDRLQLVCNALLAQEDPLPLAFFVHDAEIVSSLGKTLESQAVETEKVLDIIYQPQAIFRVRAVTRCTSSLEGHSEAVISVAFSPTGKYLASGSGDTTVRFWDLSTETPHFTCKGHRHWVLSISWSPDGKKLASGCKNGQILLWDPSTGKQVGRTLAGHSKWITGLSWEPLHANPECRYVASSSKDGSVRIWDTTAGRCERILTGHTQSVTCLRWGGDGLLYSASQDRTIKVWRAHDGVLCRTLQGHGHWVNTMALSTDYALRTGAFEPAEASVNPQDLQGSLQELKERALSRYNLVRGQGPERLVSGSDDFTLFLWSPAEDKKPLTRMTGHQALINQVLFSPDSRIVASASFDKSIKLWDGRTGKYLASLRGHVAAVYQIAWSADSRLLVSGSSDSTLKVWDVKAQKLAMDLPGHADEVYAVDWSPDGQRVASGGKDKCLRIWRR

SEQ ID NO: 4794 - DNA, 4860 bp, Homo sapiens
gtgcagtggcacgatcttggttcaccacaatctcgtctcgaaggctcaggtgattctctcacctcagccgcctgagtagctgggaccacagtttcagctgtgagttcaacatggaggcaaatcagtgccccctggttgtggaaccatcttacccagacctggtcatcaatgtaggagaagtgactcttggagaagaaaacagaaaaaagctgcagaaaattcagagagaccaagagaaggagagagttatgcgggctgcatgtgctttattaaactcaggaggaggagtgattcgaatggccaagaaggttgagcatcccgtggagatgggactggatttagaacagtctttgagagagcttattcagtcttcagatctgcaggctttctttgagaccaagcaacaaggaaggtgtttttacatttttgttaaatcttggagcagtggccctttccctgaagatcgctctgtcaagccccgcctttgcagcctcagttcttcattataccgtagatctgagacctctgtgcgttccatggactcaagagaggcattctgtttcctgaagaccaaaaggaagccaaaaatcttggaagaaggaccttttcacaaaattcacaagggtgtataccaagagctccctaactcggatcctgctgacccaaactcggatcctgctgacctaattttccaaaaagactatcttgaatatggtgaaatcctgccttttcctgagtctcagttagtagagtttaaacagttctctacaaaacacttccaagaatatgtaaaaaggacaattccagaatacgtccctgcatttgcaaacactggaggaggctatctttttattggagtggatgataagagtagggaagtcctgggatgtgcaaaagaaaatgttgaccctgactctttgagaaggaaaatagaacaagccatatacaaactaccttgtgttcatttttgccaaccccaacgcccgataaccttcacactcaaaattgtgaatgtgttaaaaaggggagagctctatggctatgcttgcatgatcagagtaaatcccttctgctgtgcagtgttctcagaagctcccaattcatggatagtggaggacaagtacgtctgcagcctgacaaccgagaaatgggtaggcatgatgacagacacagatccagatcttctacagttgtctgaagattttgaatgtcagctgagtctatctagtgggcctccccttagcagaccagtgtactccaagaaaggcctggaacataaaaaggaactccagcaacttttattttcagtcccaccaggatatttgcgatatactccagagtcactctggagggacctgatctcagagcacagaggactagaggagttaataaataagcaaatgcaacctttctttcggggaattttgatcttctctagaagttgggctgtggacctgaacttgcaggagaagccaggagtcatctgtgatgctctgctgatagcacagaacagcacccccattctctacaccattctcagggagcaagatgcagagggccaggactactgcactcgcaccgcctttactttgaagcagaagctagtgaacatggggggctacaccgggaaggtgtgtgtcagggccaaggtcctctgcctgagtcctgagagcagcgcagaggccttggaggctgcagtgtctccgatggattaccctgcgtcctatagccttgcaggcacccagcacatggaagccctgctgcagtccctcgtgattgtcttactcggcttcaggtctctcttgagtgaccagctcggctgtgaggttttaaatctgctcacagcccagcagtatgagatattctccagaagcctccgcaagaacagagagttgtttgtccacggcttacctggctcagggaagaccatcatggccatgaagatcatggagaagatcaggaatgtgtttcactgtgaggcacacagaattctctacgtttgtgaaaaccagcctctgaggaactttatcagtgatagaaatatctgccgagcagagacccggaaaactttcctaagagaaaactttgaacacattcaacacatcgtcattgacgaagctcagaatttccgtactgaagatggggactggtatgggaaggcaaaaagcatcactcggagagcaaagggtggcccaggaattctctggatctttctggattactttcagaccagccacttggattgcagtggcctccctcctctctcagaccaatatccaagagaagagctcaccagaatagttcgcaatgcagatccaatagccaagtacttacaaaaagaaatgcaagtaattagaagtaatccttcatttaacatccccactgggtgcctcgaggtatttcctgaagccgaatggtcccagggtgttcagggaaccttacgaattaagaaatacttgactgtggagcaaataatgacctgtgtggcagacacgtgcaggcgcttctttgataggggctattctccaaaggatgttgctgtgcttgtcagcaccgcaaaagaagtggagcactataagtatgagctcttgaaagcaatgaggaagaaaagggtggtgcagctcagtgatgcatgtgatatgttgggtgatcacattgtgttggacagtgttcggcgattctcaggcctggaaaggagcatagtgtttgggatccatccaaggacagctgacccagctatcttacccaatgttctgatctgtctggcttccagggcaaaacaacacctgtatatttttccgtggggtggccattaggaagaactccaaatcaaaatgctatgtaaatgtctatgggtgacagtctgctgatggtagaaacctttctttttagttcacaagtcagagatttggacggagctgacacaaagagtttggagctcccccatttctggctctcctttcaggggttccttccccaaccctttcagcagcggtggctgccccccattctgacccctgactcttccagccagaaagatggtggttttctaaaggaactttagctgtcctgcacaatgccgatctgtgtcttgcattttgggtaaaagccataaaaataagaaactcagcctgtggcctttctttcttccaaggctgggcttctttttttaagtgacttcatgcagtttgttgcttttaaaaatttgtccagaatcgttttctgcagaagcatggtctgttaggagcttactggccgtagcagaagcaattgtttcctgaattcttgacatttatctttgctgtattcatttagggcttgggagagtccgaagataattcagtcactgtcagattaataattttgtcaggacaaagaataccgttatgattatttaatcctttaaaattgtggtctccagagcttgttctcagaatggcccagaccaagccttaattgtgatagtgaatattaatggtcactttaaggagaaattataggccaagatgaaatgaacataaacctgtttgccctggctttcagtggaagatgatattagagaccaaaatctggttctgaaggtgtgtatcagccctaaggtgaaccagacttgggaaagattgtctttaaaaatcaatgagtttatgttttaacttctcagcttagttctatgcattgctctataacacacctagttaagttttatgttattcttgaactgtgattttttttctatttactttcatggtttggtgggccattgttatggactgaatgtttgtgtcccacccttcacccccaaattcccgtgttgaagccccaacctgcactgtggagctggggctgctaaggaagtaattaaggttacatgaagtcatggtggggctctgatctgctaaggttggtgtccttatagggagagaccccagagagcttgttccctccctccctgtgcatgcaaacaagagggcatgggagcacacagagagatggcagccacctacaagccaagaggagaagcctcacaatcaaactctcgctgctggcgagagtcttggactctgtcttggacttccagcctccagactgtgagaaacaaatttctgttgtttcagcttctcagtctctggtgttttgttattgcagcctgagaacacagctgtacgattatttgtcaaacagaaaacactgatacttaacaatgctaatgcaattatttatttgcttttcagtctctacaaaacgttctaaaacactaatctaaatattaacagtaaaatatttgcataactaatggaaactaagaaatcatatgaccaatatttcacttattggtaatcttactctactgatttccccccagactgtgatttttgaacttccttgcctttctcctgtctttctgtgtttattcatggaattccagttatctgggcttgaaattgcaggctctcctaacttaagcaaaatctgacagatcagcaaaatgagataaatgtttcttttttctttctgactgcattaaatcagatacaactcagcattaaaaagctatctttgtaaatgttgttactaataaattagtcttataagatccctggactttggagttgttgcaatgtctttgagagtaattctttaaaagtctaatttcgactggttgtatctctttatgatttattgccccactaacaatatttgaaacaatataatattttaaaatgtataaataattatgaatttttgtttagaacaaagaggattactgatatttgtttccctatgaatggcaaaaggtttagcttactactgcatttctgttttaaataaaaagttgagagtttgtgtctcattaaactg

SEQ ID NO: 4795 - protein, 901 aa, Homo sapiens
MEANQCPLVVEPSYPDLVINVGEVTLGEENRKKLQKIQRDQEKERVMRAACALLNSGGGVIRMAKKVEHPVEMGLDLEQSLRELIQSSDLQAFFETKQQGRCFYIFVKSWSSGPFPEDRSVKPRLCSLSSSLYRRSETSVRSMDSREAFCFLKTKRKPKILEEGPFHKIHKGVYQELPNSDPADPNSDPADLIFQKDYLEYGEILPFPESQLVEFKQFSTKHFQEYVKRTIPEYVPAFANTGGGYLFIGVDDKSREVLGCAKENVDPDSLRRKIEQAIYKLPCVHFCQPQRPITFTLKIVNVLKRGELYGYACMIRVNPFCCAVFSEAPNSWIVEDKYVCSLTTEKWVGMMTDTDPDLLQLSEDFECQLSLSSGPPLSRPVYSKKGLEHKKELQQLLFSVPPGYLRYTPESLWRDLISEHRGLEELINKQMQPFFRGILIFSRSWAVDLNLQEKPGVICDALLIAQNSTPILYTILREQDAEGQDYCTRTAFTLKQKLVNMGGYTGKVCVRAKVLCLSPESSAEALEAAVSPMDYPASYSLAGTQHMEALLQSLVIVLLGFRSLLSDQLGCEVLNLLTAQQYEIFSRSLRKNRELFVHGLPGSGKTIMAMKIMEKIRNVFHCEAHRILYVCENQPLRNFISDRNICRAETRKTFLRENFEHIQHIVIDEAQNFRTEDGDWYGKAKSITRRAKGGPGILWIFLDYFQTSHLDCSGLPPLSDQYPREELTRIVRNADPIAKYLQKEMQVIRSNPSFNIPTGCLEVFPEAEWSQGVQGTLRIKKYLTVEQIMTCVADTCRRFFDRGYSPKDVAVLVSTAKEVEHYKYELLKAMRKKRVVQLSDACDMLGDHIVLDSVRRFSGLERSIVFGIHPRTADPAILPNVLICLASRAKQHLYIFPWGGH

SEQ ID NO: 4796 - DNA, 4530 bp, Homo sapiens
aattctcgagctcgtcgaccggtcgacgagctcgagggtcgacgagctcgagggcgcgcgcccggcccccacccctcgcagcaccccgcgccccgcgccctcccagccgggtccagccggagccatggggccggagccgcagtgagcaccatggagctggcggccttgtgccgctgggggctcctcctcgccctcttgccccccggagccgcgagcacccaagtgtgcaccggcacagacatgaagctgcggctccctgccagtcccgagacccacctggacatgctccgccacctctaccagggctgccaggtggtgcagggaaacctggaactcacctacctgcccaccaatgccagcctgtccttcctgcaggatatccaggaggtgcagggctacgtgctcatcgctcacaaccaagtgaggcaggtcccactgcagaggctgcggattgtgcgaggcacccagctctttgaggacaactatgccctggccgtgctagacaatggagacccgctgaacaataccacccctgtcacaggggcctccccaggaggcctgcgggagctgcagcttcgaagcctcacagagatcttgaaaggaggggtcttgatccagcggaacccccagctctgctaccaggacacgattttgtggaaggacatcttccacaagaacaaccagctggctctcacactgatagacaccaaccgctctcgggcctgccacccctgttctccgatgtgtaagggctcccgctgctggggagagagttctgaggattgtcagagcctgacgcgcactgtctgtgccggtggctgtgcccgctgcaaggggccactgcccactgactgctgccatgagcagtgtgctgccggctgcacgggccccaagcactctgactgcctggcctgcctccacttcaaccacagtggcatctgtgagctgcactgcccagccctggtcacctacaacacagacacgtttgagtccatgcccaatcccgagggccggtatacattcggcgccagctgtgtgactgcctgtccctacaactacctttctacggacgtgggatcctgcaccctcgtctgccccctgcacaaccaagaggtgacagcagaggatggaacacagcggtgtgagaagtgcagcaagccctgtgcccgagtgtgctatggtctgggcatggagcacttgcgagaggtgagggcagttaccagtgccaatatccaggagtttgctggctgcaagaagatctttgggagcctggcatttctgccggagagctttgatggggacccagcctccaacactgccccgctccagccagagcagctccaagtgtttgagactctggaagagatcacaggttacctatacatctcagcatggccggacagcctgcctgacctcagcgtcttccagaacctgcaagtaatccggggacgaattctgcacaatggcgcctactcgctgaccctgcaagggctgggcatcagctggctggggctgcgctcactgagggaactgggcagtggactggccctcatccaccataacacccacctctgcttcgtgcacacggtgccctgggaccagctctttcggaacccgcaccaagctctgctccacactgccaaccggccagaggacgagtgtgtgggcgagggcctggcctgccaccagctgtgcgcccgagggcactgctggggtccagggcccacccagtgtgtcaactgcagccagttccttcggggccaggagtgcgtggaggaatgccgagtactgcaggggctccccagggagtatgtgaatgccaggcactgtttgccgtgccaccctgagtgtcagccccagaatggctcagtgacctgttttggaccggaggctgaccagtgtgtggcctgtgcccactataaggaccctcccttctgcgtggcccgctgccccagcggtgtgaaacctgacctctcctacatgcccatctggaagtttccagatgaggagggcgcatgccagccttgccccatcaactgcacccactcctgtgtggacctggatgacaagggctgccccgccgagcagagagccagccctctgacgtccatcgtctctgcggtggttggcattctgctggtcgtggtcttgggggtggtctttgggatcctcatcaagcgacggcagcagaagatccggaagtacacgatgcggagactgctgcaggaaacggagctggtggagccgctgacacctagcggagcgatgcccaaccaggcgcagatgcggatcctgaaagagacggagctgaggaaggtgaaggtgcttggatctggcgcttttggcacagtctacaagggcatctggatccctgatggggagaatgtgaaaattccagtggccatcaaagtgttgagggaaaacacatcccccaaagccaacaaagaaatcttagacgaagcatacgtgatggctggtgtgggctccccatatgtctcccgccttctgggcatctgcctgacatccacggtgcagctggtgacacagcttatgccctatggctgcctcttagaccatgtccgggaaaaccgcggacgcctgggctcccaggacctgctgaactggtgtatgcagattgccaaggggatgagctacctggaggatgtgcggctcgtacacagggacttggccgctcggaacgtgctggtcaagagtcccaaccatgtcaaaattacagacttcgggctggctcggctgctggacattgacgagacagagtaccatgcagatgggggcaaggtgcccatcaagtggatggcgctggagtccattctccgccggcggttcacccaccagagtgatgtgtggagttatggtgtgactgtgtgggagctgatgacttttggggccaaaccttacgatgggatcccagcccgggagatccctgacctgctggaaaagggggagcggctgccccagccccccatctgcaccattgatgtctacatgatcatggtcaaatgttggatgattgactctgaatgtcggccaagattccgggagttggtgtctgaattctcccgcatggccagggacccccagcgctttgtggtcatccagaatgaggacttgggcccagccagtcccttggacagcaccttctaccgctcactgctggaggacgatgacatgggggacctggtggatgctgaggagtatctggtaccccagcagggcttcttctgtccagaccctgccccgggcgctgggggcatggtccaccacaggcaccgcagctcatctaccaggagtggcggtggggacctgacactagggctggagccctctgaagaggaggcccccaggtctccactggcaccctccgaaggggctggctccgatgtatttgatggtgacctgggaatgggggcagccaaggggctgcaaagcctccccacacatgaccccagccctctacagcggtacagtgaggaccccacagtacccctgccctctgagactgatggctacgttgcccccctgacctgcagcccccagcctgaatatgtgaaccagccagatgttcggccccagcccccttcgccccgagagggccctctgcctgctgcccgacctgctggtgccactctggaaagggccaagactctctccccagggaagaatggggtcgtcaaagacgtttttgcctttgggggtgccgtggagaaccccgagtacttgacaccccagggaggagctgcccctcagccccaccctcctcctgccttcagcccagccttcgacaacctctattactgggaccaggacccaccagagcggggggctccacccagcaccttcaaagggacacctacggcagagaacccagagtacctgggtctggacgtgccagtgtgaaccagaaggccaagtccgcagaagccctgatgtgtcctcagggagcagggaaggcctgacttctgctggcatcaagaggtgggagggccctccgaccacttccaggggaacctgccatgccaggaacctgtcctaaggaaccttccttcctgcttgagttcccagatggctggaaggggtccagcctcgttggaagaggaacagcactggggagtctttgtggattctgaggccctgcccaatgagactctagggtccagtggatgccacagcccagcttggccctttccttccagatcctgggtactgaaagccttagggaagctggcctgagaggggaagcggccctaagggagtgtctaagaacaaaagcgacccattcagagactgtccctgaaacctagtactgccccccatgaggaaggaacagcaatggtgtcagtatccaggctttgtacagagtgcttttctgtttagtttttactttttttgttttgtttttttaaagacgaaataaagacccaggggagaatgggtgttgtatggggaggcaagtgtggggggtccttctccacacccactttgtccatttgcaaatatattttggaaaac

SEQ ID NO: 4797 - protein, 1255 aa, Homo sapiens
MELAALCRWGLLLALLPPGAASTQVCTGTDMKLRLPASPETHLDMLRHLYQGCQVVQGNLELTYLPTNASLSFLQDIQEVQGYVLIAHNQVRQVPLQRLRIVRGTQLFEDNYALAVLDNGDPLNNTTPVTGASPGGLRELQLRSLTEILKGGVLIQRNPQLCYQDTILWKDIFHKNNQLALTLIDTNRSRACHPCSPMCKGSRCWGESSEDCQSLTRTVCAGGCARCKGPLPTDCCHEQCAAGCTGPKHSDCLACLHFNHSGICELHCPALVTYNTDTFESMPNPEGRYTFGASCVTACPYNYLSTDVGSCTLVCPLHNQEVTAEDGTQRCEKCSKPCARVCYGLGMEHLREVRAVTSANIQEFAGCKKIFGSLAFLPESFDGDPASNTAPLQPEQLQVFETLEEITGYLYISAWPDSLPDLSVFQNLQVIRGRILHNGAYSLTLQGLGISWLGLRSLRELGSGLALIHHNTHLCFVHTVPWDQLFRNPHQALLHTANRPEDECVGEGLACHQLCARGHCWGPGPTQCVNCSQFLRGQECVEECRVLQGLPREYVNARHCLPCHPECQPQNGSVTCFGPEADQCVACAHYKDPPFCVARCPSGVKPDLSYMPIWKFPDEEGACQPCPINCTHSCVDLDDKGCPAEQRASPLTSIVSAVVGILLVVVLGVVFGILIKRRQQKIRKYTMRRLLQETELVEPLTPSGAMPNQAQMRILKETELRKVKVLGSGAFGTVYKGIWIPDGENVKIPVAIKVLRENTSPKANKEILDEAYVMAGVGSPYVSRLLGICLTSTVQLVTQLMPYGCLLDHVRENRGRLGSQDLLNWCMQIAKGMSYLEDVRLVHRDLAARNVLVKSPNHVKITDFGLARLLDIDETEYHADGGKVPIKWMALESILRRRFTHQSDVWSYGVTVWELMTFGAKPYDGIPAREIPDLLEKGERLPQPPICTIDVYMIMVKCWMIDSECRPRFRELVSEFSRMARDPQRFVVIQNEDLGPASPLDSTFYRSLLEDDDMGDLVDAEEYLVPQQGFFCPDPAPGAGGMVHHRHRSSSTRSGGGDLTLGLEPSEEEAPRSPLAPSEGAGSDVFDGDLGMGAAKGLQSLPTHDPSPLQRYSEDPTVPLPSETDGYVAPLTCSPQPEYVNQPDVRPQPPSPREGPLPAARPAGATLERAKTLSPGKNGVVKDVFAFGGAVENPEYLTPQGGAAPQPHPPPAFSPAFDNLYYWDQDPPERGAPPSTFKGTPTAENPEYLGLDVPV

SEQ ID NO: 4798 - DNA, 698 bp, Homo sapiens
ctttcctttcgctgctgcggccgcagccatgagtatgctcaggcttcagaagaggctcgcctctagtgtcctccgctgtggcaagaagaaggtctggttagaccccaatgagaccaatgaaatcgccaatgccaactcccgtcagcagatccggaagctcatcaaagatgggctgatcatccgcaagcctgtgacggtccattcccgggctcgatgccggaaaaacaccttggcccgccggaagggcaggcacatgggcataggtaagcggaagggtacagccaatgcccgaatgccagagaaggtcacatggatgaggagaatgaggattttgcgccggctgctcagaagataccgtgaatctaagaagatcgatcgccacatgtatcacagcctgtacctgaaggtgaaggggaatgtgttcaaaaacaagcggattctcatggaacacatccacaagctgaaggcagacaaggcccgcaagaagctcctggctgaccaggctgaggcccgcaggtctaagaccaaggaagcacgcaagcgccgtgaagagcgcctccaggccaagaaggaggagatcatcaagactttatccaaggaggaagagaccaagaaataaaacctcccactttgtctgtacatactggcctctgtgattacatagatcagccattaaaataaaacaagccttaatctgc

SEQ ID NO: 4799 - protein, 196 aa, Homo sapiens [sequence omitted]

SEQ ID NO: 4800 - DNA, 3621 bp, Homo sapiens
  unsure 97: unknown base
agctccagccgccgtcgctgctgcctgtgtagttgcagccgcggccgcctcccgccagctcgcctcggggaacaggacgcgcgtgagctccagggcntccccgccccagcttttctcggaaccatgaaccccaactgcgcccggtgcggcaagatcgtgtatcccacggagaaggtgaactgtctggataagttctggcataaagcatgcttccattgcgagacctgcaagatgacactgaacatgaagaactacaagggctacgagaagaagccctactgcaacgcacactaccccaagcagtccttcaccatggtggcggacaccccggaaaaccttcgcctcaagcaacagagtgagctccagagtcaggtgcgctacaaggaggagtttgagaagaacaagggcaaaggtttcagcgtagtggcagacacgcccgagctccagagaatcaagaagacccaggaccagatcagtaacataaaataccatgaggagtttgagaagagccgcatgggccctagcgggggcgagggcatggagccagagcgtcgggattcacaggacggcagcagctaccggcggcccctggagcagcagcagcctcaccacatcccgaccagtgccccggtttaccagcagccccagcagcagccggtggcccagtcctatggtggctacaaggagcctgcagccccagtctccatacagcgcagcgcccccatctgtcttcagcacattccacggcatcgcatccgtcctgggcgtgacccgtccattcttcagtgtctctgttttttaaaacctgcgacagcttgtgattcctacccctcttccagcttcttttgccaactgaagccttcttctgccacttctgcgggctccctcctctggcaggcttcccccttgatcgacttcttggttttctctctggatggaacgggcatgggcctctctgggggaggcagggctggaatgggagacctgttggcctgtgggcctcacctgcccctctgttctctcccctcacatcctcctgcccagctcctcacatacccacacattccagggctggggtgagcctgactgccaggaccccaggtcaggggctccctacattccccagagtgggatccacttcttggttcctgggatggcgatggggactctgccgctgtgtagggaccagtgggatgggctctacctctctttctcaaagagggggctctgcccacctggggtctctctccctacctccctcctcaggggcaacaacaggagaatggggttcctgctgtggggcgaattcatcccctccccgcgcgttccttcgcacactgtgattttgccctcctgcccacgcagacctgcagcgggcaaagagctcccgaggaagcacagcttgggtcaggttcttgcctttcttaattttagggacagctaccggaaggaggggaacaaggagttctcttccgcagcccctttccccacgcccacccccagtctccagggacccttgcctgcctcctaggctggaagccatggtcccgaagtgtagggcaagggtgcctcaggaccttttggtcttcagcctccctcagcccccaggatctgggttaggtggccgctcctccctgctcctcatgggaagatgtctcagagccttccatgacctcccctccccagcccaatgccaagtggacttggagctgcacaaagtcagcagggaccactaaatctccaagacctggtgtgcggaggcaggagcatgtatgtctgcaggtgtctgacacgcaagtgtgtgagtgtgagtgtgagagatggggcgggggtgtgtctgtaggtgtctctgggcctgtgtgtgggtggggttatgtgagggtatgaagagctgtcttcccctgagagtttcctcagaacccacagtgagaggggagggctcctggggcagagaagttccttaggttttctttggaatgaaattcctccttccccccatctctgagtggaggaagcccaccaatctgccctttgcagtgtgcagggtggaaggtaagaggttggtgtggagttggggctgccatagggtctgcagcctgctggggctaagcggtggaggaaggctctgtcactccaggcatatgtttccccatctctgtctggggctacagaatagggtggcagaagtgtcaccctgtgggtgtctccctcgggggctcttcccctagacctccccctcacttacataaagctcccttgaagcaagaaagctctctgctcatgggtggctgtgacaaccctggcctcacttgattcatctctggttttcttgccaccctctgggagtccccatcccattttcatcctgagcccaaccaggccctgccattggcctcttgtcccttggcacacttgtacccacaggtgaggggcaggacctgaaggtattggcctgttcaacaatcagtcatcatgggtgtttttgtcaactgcttgttaattgatttggggatgtttgccccgaatgagaggttgaggaaaagactgtgggtggggaggccctgcctgacccatcccttttcctttctggccccagcctaggtggaggcaagtggaatatcttatattgggcgatttgggggctcggggaggcagagaatctcttgggagtcttgggtggcgctggtgcattctgtttcctcttgatctcaaagcacaatgtggatttggggaccaaaggtcagggacacatccccttagaggacctgagtttgggagagtggtgagtggaagggaggagcagcaagaagcagcctgttttcactcagcttaattctccttcccagataaggcaagccagtcatggaatcttgctgcaggccctccctctactcttcctgtcctaaaaataggggccgttttcttacacacccccagagagaggagggactgtcacactggtgctgagtgaccgggggctgctgggcgtctgttctttaccaaaaccatccatccctagaagagcacagagccctgaggggctgggctgggctgggctgagcccctggtcttctctacagttcacagaggtctttcagctcatttaatcccaggaaagaggcatcaaagctagaatgtgaatataacttttgtggaccaatactaagaataacaagaagcccagtggtgaggaaagtgcgttctcccagcactgcctcctgttttctccctctcatgtccctccagggaaaatgactttattgcttaatttctgcctttcccccctcacacatgcacttttgggcctttttttatagctggaaaaaacaaaataccaccctacaaacctgtatttaaaaagaaacagaaatgaccacgtgaaatttgcctctgtccaaacatttcatccgtgtgtatgtgtatgtgtgtgagtgtgtgaagccgccagttcatctttttatatggggttgttgtctcattttggtctgttttggtcccctccctcgtgggcttgtgctcgggatcaaacctttctggcctgttatgattctgaacatttgacttgaaccacaagtgaatctttctcctggtgactcaaataaaagtataatttttacctgc

SEQ ID NO: 4801 - DNA, 493 bp, Homo sapiens
cttttttcttttttccggcgttcaagatgtcgaagcgaggacgtggtgggtcctctggtgcgaaattccggatttccttgggtcttccggtaggagctgtaatcaattgtgctgacaacacaggagccaaaaacctgtatatcatctccgtgaaggggatcaagggacggctgaacagacttcccgctgctggtgtgggtgacatggtgatggccacagtcaagaaaggcaaaccagagctcagaaaaaaggtacatccagcagtggtcattcgacaacgaaagtcataccgtagaaaagatggcgtgtttctttattttgaagataatgcaggagtcatagtgaacaataaaggcgagatgaaaggttctgccattacaggaccagtagcaaaggagtgtgcagacttgtggccccggattgcatccaatgctggcagcattgcatgattctccagtatatttgtaaaaaataaaaaaaaactaaacccatt

SEQ ID NO: 4802 - protein, 140 aa, Homo sapiens [sequence omitted]

SEQ ID NO: 4803 - DNA, 1350 bp, Homo sapiens
  unsure 1225: unknown base
tgccagcggggaggctgcagccgcgggttgttacagctgctggagcagcagcggcccccgctcccgggaaccgttcccgggccgttgatcttcggccccacacgaacagcagagaggggcagcaggatgaatgtgggcacagcgcacagcgaggtgaaccccaacacgcgggtgatgaacagccgtggcatctggctctcctacgtgctggccatcggtctcctccacatcgtgctgctgagcatcccgtttgtgagtgtccctgtcgtctggaccctcaccaacctcattcacaacatgggcatgtatatcttcctgcacacggtgaaggggacaccctttgagaccccggaccagggcaaggcgaggctgctaacccactgggagcagatggattatggggtccagttcacggcctctcggaagttcttgaccatcacacccatcgtgctgtacttcctcaccagcttctacactaagtacgaccagatccattttgtgctcaacaccgtgtccctgatgagcgtgcttatccccaagctgccccagctccacggagtccggatttttggaatcaataagtactgagagtgcagccccttcccctgcccagggtggcaggggaggggtagggtaaaaggcatgtgctgcaacactgaagacagaaagaagaagcctctggacactgccagagatgggggttgagcctctggcctaatttcccccctcgcttcccccagtagccaacttggagtagcttgtagtggggttggggtaggccccctgggctctgaccttttctgaattttttgatcttttccttttgctttttgaatagagactccatggagttggtcatggaatgggctgggctcctgggctgaacatggaccacgcagttgcgacaggaggccaggggaaaaacccctgctcacttgtttgccctcaggcagccaaagcactttaacccctgcatagggagcagagggcggtacggcttctggattgtttcactgtgattcctaggttttttcgatgccacgcagtgtgtgcttttgtgtatggaagcaagtgtgggatgggtctttgcctttctgggtagggagctgtctaatccaagtcccaggcttttggcagcttctctgcaacccaccgtgggtcctggttgggagtggggagggtcaggttggggaaagatggggtagagtgtagatggcttggttcncagaggtgagggggccagggctgctgccatcctggcctggtggaggttggggagctgtaggagagctagtgagtcgagacttagaagaatggggccacatagcagcagaggactggtgtaaggga

SEQ ID NO: 4804 - protein, 153 aa, Homo sapiens
MNVGTAHSEVNPNTRVMNSRGIWLSYVLAIGLLHIVLLSIPFVSVPVVWTLTNLIHNMGMYIFLHTVKGTPFETPDQGKARLLTHWEQMDYGVQFTASRKFLTITPIVLYFLTSFYTKYDQIHFVLNTVSLMSVLIPKLPQLHGVRIFGINKY

SEQ ID NO: 4805 - DNA, 2177 bp, Homo sapiens
gaattcgcggccgctggtttgcagctgctccgtcatcgtgcggcccgacgctatctcgcgctcgtgtgcaggcccggctcggctcctggtccccggtgcgagggttaacgcgaggccccggcctcggtccccggactaggccgtgaccccgggtgccatgaagcaggagggctcggcgcggcgccgcggcgcggacaaggcgaaaccgccgcccggcggaggagaacaagaacccccaccgccgccggccccccaggatgtggagatgaaagaggaggcagcgacgggtggcgggtcaacgggggaggcagacggcaagacggcggcggcagcggttgagcactcccagcgagagctggacacagtcaccttggaggacatcaaggagcacgtgaaacagctagagaaagcggtttcaggcaaggagccgagattcgtgctgcgggccctgcggatgctgccttccacatcacgccgcctcaaccactatgttctgtataaggctgtgcagggcttcttcacttcaaataatgccactcgagactttttgctccccttcctggaagagcccatggacacagaggctgatttacagttccgtccccgcacgggaaaagctgcgtcgacacccctcctgcctgaagtggaagcctatctccaactcctcgtggtcatcttcatgatgaacagcaagcgctacaaagaggcacagaagatctctgatgatctgatgcagaagatcagtactcagaaccgccgggccctagaccttgtagccgcaaagtgttactattatcacgcccgggtctatgagttcctggacaagctggatgtggtgcgcagcttcttgcatgctcggctccggacagctacgcttcggcatgacgcagacgggcaggccaccctgttgaacctcctgctgcggaattacctacactacagcttgtacgaccaggctgagaagctggtgtccaagtctgtgttcccagagcaggccaacaacaatgagtgggccaggtacctctactacacagggcgaatcaaagccatccagctggagtactcagaggcccggagaacgatgaccaacgcccttcgcaaggcccctcagcacacagctgtcggcttcaaacagacggtgcacaagcttctcatcgtggtggagctgttgctgggggagatccctgaccggctgcagttccgccagccctccctcaagcgctcactcatgccctatttccttctgactcaagctgtcaggacaggaaacctagccaagttcaaccaggtcctggatcagtttggggagaagtttcaagcagatgggacctacaccctaattatccggctgcggcacaacgtgattaagacaggtgtacgcatgatcagcctctcctattcccgaatctccttggctgacatcgcccagaagctgcagttggatagccccgaagatgcagagttcattgttgccaaggccatccgggatggtgtcattgaggccagcatcaaccacgagaagggctatgtccaatccaaggagatgattgacatctattccacccgagagccccagctagccttccaccagcgcatctccttctgcctagatatccacaacatgtctgtcaaggccatgaggtttcctcccaaatcgtacaacaaggacttggagtctgcagaggaacggcgtgagcgagaacagcaggacttggagtttgccaaggagatggcagaagatgatgatgacagcttcccttgagctggggggctggggaggggtagggggaatggggacaggctctttcccccttgggggtcccctgcccagggcactgtccccattttcccacacacagctcatatgctgcattcgtgcagggggtgggggtgctgggagccagccaccctgacctcccccagggctcctccccagccggtgacttactgtacagcaggcaggagggtgggcaggcaacctccccgggcagggtcctggccagcagtgtgggagcaggaggggaaggatagttctgtgtactcctttagggagtgggggactagaactgggatgtcttggcttgtatgttttttgaagcttcgattatgatttttaaacaataaaaagttctcccaaaaaaaaaaaaaaaaaaaaaaaaaaaagcggccgcgaattc

SEQ ID NO: 4806 - protein, 534 aa, Homo sapiens [sequence omitted]

SEQ ID NO: 4807 - DNA, 1512 bp, Homo sapiens
ctcctctccagcccttctcctgtgtgcctgcctcctgccgccgccaccatgaccacctccatccgccagttcacctcctccagctccatcaagggctcctccggcctggggggcggctcgtcccgcacctcctgccggctgtctggcggcctgggtgccggctcctgcaggctgggatctgctggcggcctgggcagcaccctcgggggtagcagctactccagctgctacagctttggctctggtggtggctatggcagcagctttgggggtgttgatgggctgctggctggaggtgagaaggccaccatgcagaacctcaatgaccgcctggcctcctacctggacaaggtgcgtgccctggaggaggccaacactgagctggaggtgaagatccgtgactggtaccagaggcaggccccggggcccgcccgtgactacagccagtactacaggacaattgaggagctgcagaacaagatcctcacagccaccgtggacaatgccaacatcctgctacagattgacaatgcccgtctggctgctgatgacttccgcaccaagtttgagacagagcaggccctgcgcctgagtgtggaggccgacatcaatggcctgcgcagggtgctggatgagctgaccctggccagagccgacctggagatgcagattgagaacctcaaggaggagctggcctacctgaagaagaaccacgaggaggagatgaacgccctgcgaggccaggtgggtggtgagatcaatgtggagatggacgctgccccaggcgtggacctgagccgcatcctcaacgagatgcgtgaccagtatgagaagatggcagagaagaaccgcaaggatgccgaggattggttcttcagcaagacagaggaactgaaccgcgaggtggccaccaacagtgagctggtgcagagtggcaagagtgagatctcggagctccggcgcaccatgcaggccttggagatagagctgcagtcccagctcagcatgaaagcatccctggagggcaacctggcggagacagagaaccgctactgcgtgcagctgtcccagatccaggggctgattggcagcgtggaggagcagctggcccagcttcgctgcgagatggagcagcagaaccaggaatacaaaatcctgctggatgtgaagacgcggctggagcaggagattgccacctaccgccgcctgctggagggagaggatgcccacctgactcagtacaagaaagaaccggtgaccacccgtcaggtgcgtaccattgtggaagaggtccaggatggcaaggtcatctcctcccgcgagcaggtccaccagaccacccgctgaggactcagctaccccggccggccacccaggaggcagggagcagccgccccatctgccccacagtctccggcctctccagcctcagccccctgcttcagtcccttccccatgcttccttgcctgatgacaataaagcttgttgactcagctaaaaaaaaaaaaaaa

SEQ ID NO: 4808 - protein, 432 aa, Homo sapiens
MTTSIRQFTSSSSIKGSSGLGGGSSRTSCRLSGGLGAGSCRLGSAGGLGSTLGGSSYSSCYSFGSGGGYGSSFGGVDGLLAGGEKATMQNLNDRLASYLDKVRALEEANTELEVKIRDWYQRQAPGPARDYSQYYRTIEELQNKILTATVDNANILLQIDNARLAADDFRTKFETEQALRLSVEADINGLRRVLDELTLARADLEMQIENLKEELAYLKKNHEEEMNALRGQVGGEINVEMDAAPGVDLSRILNEMRDQYEKMAEKNRKDAEDWFFSKTEELNREVATNSELVQSGKSEISELRRTMQALEIELQSQLSMKASLEGNLAETENRYCVQLSQIQGLIGSVEEQLAQLRCEMEQQNQEYKILLDVKTRLEQEIATYRRLLEGEDAHLTQYKKEPVTTRQVRTIVEEVQDGKVISSREQVHQTTR

SEQ ID NO: 4809 - DNA, 1422 bp, Homo sapiens
atgaccacctgcagccgccagttcacctcctccagctccatgaagggctcctgcggcatcggaggcggcatcgggggcggctccagccgcatctcctccgtcctggccggagggtcctgccgtgcccccagcacctacgggggcggcctgtctgtctcctctcgcttctcctctgggggagcctgcgggctggggggcggctatggcggtggcttcagcagcagcagcagctttggtagtggcttcgggggaggatatggtggtggccttggtgctggcttcggtggtggcttgggtgctggctttggtggtggttttgctggtggtgatgggcttctggtgggcagtgagaaggtgaccatgcagaacctcaatgaccgcctggcctcctacctggacaaggtgcgtgctctggaggaggccaacgccgacctggaagtgaagatccgtgactggtaccagaggcagcggcccagtgagatcaaagactacagtccctacttcaagaccatcgaggacctgaggaacaagatcattgcggccaccattgagaatgcgcagcccattttgcagattgacaatgccaggctggcagccgatgacttcaggaccaagtatgagcacgaactggccctgcggcagactgtggaggccgacgtcaatggcctgcgccgggtgttggatgagctgaccctggccaggactgacctggagatgcagatcgaaggcctgaaggaggagctggcctacctgaggaagaaccacgaggaggagatgcttgctctgagaggtcagaccggcggagatgtgaacgtggagatggatgctgcacctggcgtggacctgagccgcatcctgaatgagatgcgtgaccagtacgagcagatggcagagaaaaaccgcagagacgctgagacctggttcctgagcaagaccgaggagctgaacaaagaagtggcctccaacagcgaactggtacagagcagccgcagtgaggtgacggagctccggagggtgctccagggcctggagattgagctgcagtcccagctcagcatgaaagcatccctggagaacagcctggaggagaccaaaggccgctactgcatgcagctgtcccagatccagggactgattggcagtgtggaggagcagctggcccagctacgctgtgagatggagcagcagagccaggagtaccagatcttgctggatgtgaagacgcggctggagcaggagattgccacctaccgccgcctgctggagggcgaggatgcccacctttcctcccagcaagcatctggccaatcctattcttcccgcgaggtcttcacctcctcctcgtcctcttcgagccgtcagacccggcccatcctcaaggagcagagctcatccagcttcagccagggccagagctcctag

SEQ ID NO: 4810 - DNA, 1360 bp, Homo sapiens
cgggggttgctccgtccgtgctccgcctcgccatgacttcctacagctatcgccagtcgtcggccacgtcgtccttcggaggcctgggcggcggctccgtgcgttttgggccgggggtcgcttttcgcgcgcccagcattcacgggggctccggcggccgcggcgtatccgtgtcctccgcccgctttgtgtcctcgtcctcctcggggggctacggcggcggctacggcggcgtcctgaccgcgtccgacgggctgctggcgggcaacgagaagctaaccatgcagaacctcaacgaccgcctggcctcctacctggacaaggtgcgcgccctggaggcggccaacggcgagctagaggtgaagatccgcgactggtaccagaagcaggggcctgggccctcccgcgactacagccactactacacgaccatccaggacctgcgggacaagattcttggtgccaccattgagaactccaggattgtcctgcagatcgacaacgcccgtctggctgcagatgacttccgaaccaagtttgagacggaacaggctctgcgcatgagcgtggaggccgacatcaacggcctgcgcagggtgctggatgagctgaccctggccaggaccgacctggagatgcagatcgaaggcctgaaggaagagctggcctacctgaagaagaaccatgaggaggaaatcagtacgctgaggggccaagtgggaggccaggtcagtgtggaggtggattccgctccgggcaccgatctcgccaagatcctgagtgacatgcgaagccaatatgaggtcatggccgagcagaaccggaaggatgctgaagcctggttcaccagccggactgaagaattgaaccgggaggtcgctggccacacggagcagctccagatgagcaggtccgaggttactgacctgcggcgcacccttcagggtcttgagattgagctgcagtcacagctgagcatgaaagctgccttggaagacacactggcagaaacggaggcgcgctttggagcccagctggcgcatatccaggcgctgatcagcggtattgaagcccagctggcggatgtgcgagctgatagtgagcggcagaatcaggagtaccagcggctcatggacatcaagtcgcggctggagcaggagattgccacctaccgcagcctgctcgagggacaggaagatcactacaacaatttgtctgcctccaaggtcctctgaggcagcaggctctggggcttctgctgtcctttggagggtgtcttctgggtagagggatgggaaggaagggacccttacccccggctcttctcctgacctgccaataaaaatttatggtccaaggg

SEQ ID NO: 4811 - protein, 400 aa, Homo sapiens
MTSYSYRQSSATSSFGGLGGGSVRFGPGVAFRAPSIHGGSGGRGVSVSSARFVSSSSSGGYGGGYGGVLTASDGLLAGNEKLTMQNLNDRLASYLDKVRALEAANGELEVKIRDWYQKQGPGPSRDYSHYYTTIQDLRDKILGATIENSRIVLQIDNARLAADDFRTKFETEQALRMSVEADINGLRRVLDELTLARTDLEMQIEGLKEELAYLKKNHEEEISTLRGQVGGQVSVEVDSAPGTDLAKILSDMRSQYEVMAEQNRKDAEAWFTSRTEELNREVAGHTEQLQMSRSEVTDLRRTLQGLEIELQSQLSMKAALEDTLAETEARFGAQLAHIQALISGIEAQLADVRADSERQNQEYQRLMDIKSRLEQEIATYRSLLEGQEDHYNNLSASKVL

SEQ ID NO: 4812 - DNA, 1709 bp, Homo sapiens
ggtacctcctgccagcacctcttgggtttgctgagaactcacgggctccagctacctggccatgaccaccacatttctgcaaacttcttcctccacctttgggggtggctcaacccgagggggttccctcctggctgggggaggtggctttggtggggggagtctctctgggggaggtggaagccgaagtatctcagcttcttctgctaggtttgtctcttcagggtcaggaggaggatatgggggtggcatgagggtctgtggctttggtggaggggctggtagtgttttcggtggaggctttggagggggcgttggtgggggttttggtggtggctttggtggtggcgatggtggtctcctctctggcaatgagaaaattaccatgcagaacctcaatgaccgcctggcctcctacctggacaaggtacgtgccctggaggaggccaatgctgacctggaggtgaagatccatgactggtaccagaagcagaccccagccagcccagaatgcgactacagccaatacttcaagaccattgaagagctccgggacaagatcatggccaccaccatcgacaactcccgggtcatcctggagatcgacaatgccaggctggctgcggacgacttcaggctcaagtatgagaatgagctggccctgcgccagggcgttgaggctgacatcaacggcttgcgccgagtcctggatgagctgaccctggccaggactgacctggagatgcagatcgagggcctgaatgaggagctagcctacctgaagaagaaccacgaagaggagatgaaggagttcagcagccagctggccggccaggtcaatgtggagatggacgcagcaccgggtgtggacctgacccgtgtgctggcagagatgagggagcagtacgaggccatggcggagaagaaccgccgggatgtcgaggcctggttcttcagcaagactgaggagctgaacaaagaggtggcctccaacacagaaatgatccagaccagcaagacggagatcacagacctgagacgcacgatgcaggagctggagatcgagctgcagtcccagctcagcatgaaagctgggctggagaactcactggccgagacagagtgccgctatgccacgcagctgcagcagatccaggggctcattggtggcctggaggcccagctgagtgagctccgatgcgagatggaggctcagaaccaggagtacaagatgctgcttgacataaagacacggctggagcaggagatcgctacttaccgcagcctgctcgagggccaggatgccaagatggctggcattggcatcagggaagcctcttcaggaggtggtggtagcagcagcaatttccacatcaatgtagaagagtcagtggatggacaggtggtttcttcccacaagagagaaatctaagtgtctattgcaggagaaacgtcccttgccactccccactctcatcaggccaagtggaggactggccagagggcctgcacatgcaaactccagtccctgccttcagagagctgaaaagggtccctcggtcttttatttcagggctttgcatgcgctctattccccctctgcctctccccaccttctttggagcaaggagatgcagctgtattgtgtaacaagctcatttgtacagtgtctgttcatgtaataaagaattacttttccttttgcaaat

SEQ ID NO: 4813 - protein, 456 aa, Homo sapiens
MTTTFLQTSSSTFGGGSTRGGSLLAGGGGFGGGSLSGGGGSRSISASSARFVSSGSGGGYGGGMRVCGFGGGAGSVFGGGFGGGVGGGFGGGFGGGDGGLLSGNEKITMQNLNDRLASYLDKVRALEEANADLEVKIHDWYQKQTPASPECDYSQYFKTIEELRDKIMATTIDNSRVILEIDNARLAADDFRLKYENELALRQGVEADINGLRRVLDELTLARTDLEMQIEGLNEELAYLKKNHEEEMKEFSSQLAGQVNVEMDAAPGVDLTRVLAEMREQYEAMAEKNRRDVEAWFFSKTEELNKEVASNTEMIQTSKTEITDLRRTMQELEIELQSQLSMKAGLENSLAETECRYATQLQQIQGLIGGLEAQLSELRCEMEAQNQEYKMLLDIKTRLEQEIATYRSLLEGQDAKMAGIGIREASSGGGGSSSNFHINVEESVDGQVVSSHKREI

SEQ ID NO: 4814 - DNA, 1677 bp, Homo sapiens
ggccaagcaagcttctatctgcacctgctctcaatcctgctctcaccatgagcctccgcctgcagagctcctctgccagctatggaggtggtttcgggggtggctcttgccagctgggaggaggccgtggtgtctctacctgttcaactcggtttgtgtctgggggatcagctgggggctatggaggcggcgtgagctgtggttttggtggaggggctggtagtggctttggaggtggctatggaggtggccttggaggtggctatggaggtggccttggaggtggctttggtgggggttttgctggtggctttgttgactttggtgcttgtgatggcggcctcctcactggcaatgagaagatcaccatgcagaacctcaacgaccgcctggcttcctacctggagaaggtgcgcgccctggaggaggccaacgctgacctggaggtgaagatccgtgactggcacctgaagcagagcccagctagccctgagcgggactacagcccctactacaagaccattgaagagctccgggacaagatcctgaccgccaccattgaaaacaaccgggtcatcctggagattgacaatgccaggctggctgtggacgacttcaggctcaagtatgagaatgagctggccctgcgccagagcgtggaggccgacatcaacggcctgcgccgggtgctggatgagctcactctgtctaagactgacctggagatgcagatcgagagcctgaatgaagagctagcctacatgaagaagaaccatgaagaggagatgaaggaatttagcaaccaggtggtcggccaggtcaacgtggagatggatgccaccccaggcattgacctgacccgcgtgctggcagagatgagggagcagtacgaggccatggcagagaggaaccgccgggatgctgaggaatggttccacgccaagagtgcagagctgaacaaggaggtgtctaccaacactgccatgattcagaccagcaagacagagatcacggagctcaggcgcacgctccaaggcctggagattgagctgcagtcccagctgagcatgaaagcggggctggagaacacggtggcagagacggagtgccgctatgccctgcagctgcagcagatccagggactcatcagcagcatcgaggcccagctgagcgagctccgcagtgagatggagtgccagaaccaagagtacaagatgctgctggacatcaagacacgtctggagcaggagatcgccacctaccgcagcctgctcgagggccaggacgccaagaagcgtcagcccccgtagcacctctgttaccacgacttctagtgcctctgttaccaccacctctaatgcctctggtcgccgcacttctgatgtccgtaggccttaaatctgcctggcgtcccctccctctgtcttcagcacccagaggaggagagagccggcagttccctgcaggagagaggaggggctgctggacccaaggctcagtccctctgctctcaggaccccctgtcctgactctctcctgatggtgggccctctgtgctcttctcttccggtcggatctctctcctctctgacctggatacgctttggtttctcaacttctctaccccaaagaaaagattattcaataaagtttcctgcctttctgcaaacataaaaa

SEQ ID NO: 4815 - protein, 420 aa, Homo sapiens
MSLRLQSSSASYGGGFGGGSCQLGGGRGVSTCSTRFVSGGSAGGYGGGVSCGFGGGAGSGFGGGYGGGLGGGYGGGLGGGFGGGFAGGFVDFGACDGGLLTGNEKITMQNLNDRLASYLEKVRALEEANADLEVKIRDWHLKQSPASPERDYSPYYKTIEELRDKILTATIENNRVILEIDNARLAVDDFRLKYENELALRQSVEADINGLRRVLDELTLSKTDLEMQIESLNEELAYMKKNHEEEMKEFSNQVVGQVNVEMDATPGIDLTRVLAEMREQYEAMAERNRRDAEEWFHAKSAELNKEVSTNTAMIQTSKTEITELRRTLQGLEIELQSQLSMKAGLENTVAETECRYALQLQQIQGLISSIEAQLSELRSEMECQNQEYKMLLDIKTRLEQEIATYRSLLEGQDAKKRQPP

SEQ ID NO: 4816 - DNA, 1634 bp, Homo sapiens
acccgagcaccttctcttcactcagccaactgctcgctcgctcacctccctcctctgcaccatgactacctgcagccgccagttcacctcctccagctccatgaagggctcctgcggcatcgggggcggcatcgggggcggctccagccgcatctcctccgtcctggccggagggtcctgccgcgcccccagcacctacgggggcggcctgtctgtctcatcctcccgcttctcctctgggggagcctacgggctggggggcggctatggcggtggcttcagcagcagcagcagcagctttggtagtggctttgggggaggatatggtggtggccttggtgctggcttgggtggtggctttggtggtggctttgctggtggtgatgggcttctggtgggcagtgagaaggtgaccatgcagaacctcaatgaccgcctggcctcctacctggacaaggtgcgtgctctggaggaggccaacgccgacctggaagtgaagatccgtgactggtaccagaggcagcggcctgctgagatcaaagactacagtccctacttcaagaccattgaggacctgaggaacaagattctcacagccacagtggacaatgccaatgtccttctgcagattgacaatgcccgtctggccgcggatgacttccgcaccaagtatgagacagagttgaacctgcgcatgagtgtggaagccgacatcaatggcctgcgcagggtgctggacgaactgaccctggccagagctgacctggagatgcagattgagagcctgaaggaggagctggcctacctgaagaagaaccacgaggaggagatgaatgccctgagaggccaggtgggtggagatgtcaatgtggagatggacgctgcacctggcgtggacctgagccgcattctgaacgagatgcgtgaccagtatgagaagatggcagagaagaaccgcaaggatgccgaggaatggttcttcaccaagacagaggagctgaaccgcgaggtggccaccaacagcgagctggtgcagagcggcaagagcgagatctcggagctccggcgcaccatgcagaacctggagattgagctgcagtcccagctcagcatgaaagcatccctggagaacagcctggaggagaccaaaggtcgctactgcatgcagctggcccagatccaggagatgattggcagcgtggaggagcagctggcccagctccgctgcgagatggagcagcagaaccaggagtacaagatcctgctggacgtgaagacgcggctggagcaggagatcgccacctaccgccgcctgctggagggcgaggacgcccacctctcctcctcccagttctcctctggatcgcagtcatccagagatgtgacctcctccagccgccaaatccgcaccaaggtcatggatgtgcacgatggcaaggtggtgtccacccacgagcaggtccttcgcaccaagaactgaggctgcccagccccgctcaggcctaggaggccccccgtgtggacacagatcccactggaagatcccctctcctgcccaagcacttcacagctggaccctgcttcaccctcaccccctcctggcaatcaatacagcttcattatctgagttgcat

SEQ ID NO: 4817 - protein, 472 aa, Homo sapiens
MTTCSRQFTSSSSMKGSCGIGGGIGGGSSRISSVLAGGSCRAPSTYGGGLSVSSSRFSSGGAYGLGGGYGGGFSSSSSSFGSGFGGGYGGGLGAGLGGGFGGGFAGGDGLLVGSEKVTMQNLNDRLASYLDKVRALEEANADLEVKIRDWYQRQRPAEIKDYSPYFKTIEDLRNKILTATVDNANVLLQIDNARLAADDFRTKYETELNLRMSVEADINGLRRVLDELTLARADLEMQIESLKEELAYLKKNHEEEMNALRGQVGGDVNVEMDAAPGVDLSRILNEMRDQYEKMAEKNRKDAEEWFFTKTEELNREVATNSELVQSGKSEISELRRTMQNLEIELQSQLSMKASLENSLEETKGRYCMQLAQIQEMIGSVEEQLAQLRCEMEQQNQEYKILLDVKTRLEQEIATYRRLLEGEDAHLSSSQFSSGSQSSRDVTSSSRQIRTKVMDVHDGKVVSTHEQVLRTKN

SEQ ID NO: 4818 - DNA, 2151 bp, Homo sapiens
agccccctgcccctcgccgcccgccgcctgcctgggccgggccgaggatgcggcgcagcgcctcggcggccaggcttgctcccctccggcacgcctgctaacttcccccgctacgtccccgttcgcccgccgggccgccccgtctccccgcgccctccgggtcgggtcctccaggagcgccaggcgctgccgccgtgtgccctccgccgctcgcccgcgcgcccgcgctccccgcctgcgcccagcgccccgcgcccgcgcccagtcctcgggcggtcatgctgcccctctgcctcgtggccgccctgctgctggccgccgggcccgggccgagcctgggcgacgaagccatccactgcccgccctgctccgaggagaagctggcgcgctgccgcccccccgtgggctgcgaggagctggtgcgagagccgggctgcggctgttgcgccacttgcgccctgggcttggggatgccctgcggggtgtacaccccccgttgcggctcgggcctgcgctgctacccgccccgaggggtggagaagcccctgcacacactgatgcacgggcaaggcgtgtgcatggagctggcggagatcgaggccatccaggaaagcctgcagccctctgacaaggacgagggtgaccaccccaacaacagcttcagcccctgtagcgcccatgaccgcaggtgcctgcagaagcacttcgccaaaattcgagaccggagcaccagtgggggcaagatgaaggtcaatggggcgccccgggaggatgcccggcctgtgccccagggctcctgccagagcgagctgcaccgggcgctggagcggctggccgcttcacagagccgcacccacgaggacctctacatcatccccatccccaactgcgaccgcaacggcaacttccaccccaagcagtgtcacccagctctggatgggcagcgtggcaagtgctggtgtgtggaccggaagacgggggtgaagcttccggggggcctggagccaaagggggagctggactgccaccagctggctgacagctttcgagagtgaggcctgccagcaggccagggactcagcgtcccctgctactcctgtgctctggaggctgcagagctgacccagagtggagtctgagtctgagtcctgtctctgcctgcggcccagaagtttccctcaaatgcgcgtgtgcacgtgtgcgtgtgcgtgcgtgtgtgtgtgtttgtgagcatgggtgtgcccttggggtaagccagagcctggggtgttctctttggtgttacacagcccaagaggactgagactggcacttagcccaagaggtctgagccctggtgtgtttccagatcgatcctggattcactcactcactcattccttcactcatccagccacctaaaaacatttactgaccatgtactacgtgccagctctagttttcagccttgggaggttttattctgacttcctctgattttggcatgtggagacactcctataaggagagttcaagcctgtgggagtagaaaaatctcattcccagagtcagaggagaagagacatgtaccttgaccatcgtccttcctctcaagctagccagagggtgggagcctaaggaagcgtggggtagcagatggagtaatggtcacgaggtccagacccactcccaaagctcagacttgccaggctccctttctcttcttccccaggtccttcctttaggtctggttgttgcaccatctgcttggttggctggcagctgagagccctgctgtgggagagcgaagggggtcaaaggaagacttgaagcacagagggctagggaggtggggtacatttctctgagcagtcagggtgggaagaaagaatgcaagagtggactgaatgtgcctaatggagaagacccacgtgctaggggatgaggggcttcctgggtcctgttccctaccccatttgtggtcacagccatgaagtcaccgggatgaacctatccttccagtggctcgctccctgtagctctgcctccctctccatatctccttcccctacacctccctccccacacctccctactcccctgggcatcttctggcttgactggatggaaggagacttaggaacctaccagttggccatgatgtcttttctt

SEQ ID NO: 4819 - DNA, 4774 bp, Homo sapiens
cccttcacgaccgtcaccatggaagtgtcaccattgcagcctgtaaatgaaaatatgcaagtcaacaaaataaagaaaaatgaagatgctaagaaaagactgtctgttgaaagaatctatcaaaagaaaacacaattggaacatattttgctccgcccagacacctacattggttctgtggaattagtgacccagcaaatgtgggtttacgatgaagatgttggcattaactatagggaagtcacttttgttcctggtttgtacaaaatctttgatgagattctagttaatgctgcggacaacaaacaaagggacccaaaaatgtcttgtattagagtcacaattgatccggaaaacaatttaattagtatatggaataatggaaaaggtattcctgttgttgaacacaaagttgaaaagatgtatgtcccagctctcatatttggacagctcctaacttctagtaactatgatgatgatgaaaagaaagtgacaggtggtcgaaatggctatggagccaaattgtgtaacatattcagtaccaaatttactgtggaaacagccagtagagaatacaagaaaatgttcaaacagacatggatggataatatgggaagagctggtgagatggaactcaagcccttcaatggagaagattatacatgtatcacctttcagcctgatttgtctaagtttaaaatgcaaagcctggacaaagatattgttgcactaatggtcagaagagcatatgatattgctggatccaccaaagatgtcaaagtctttcttaatggaaataaactgccagtaaaaggatttcgtagttatgtggacatgtatttgaaggacaagttggatgaaactggtaactccttgaaagtaatacatgaacaagtaaaccacaggtgggaagtgtgtttaactatgagtgaaaaaggctttcagcaaattagctttgtcaacagcattgctacatccaagggtggcagacatgttgattatgtagctgatcagattgtgactaaacttgttgatgttgtgaagaagaagaacaagggtggtgttgcagtaaaagcacatcaggtgaaaaatcacatgtggatttttgtaaatgccttaattgaaaacccaacctttgactctcagacaaaagaaaacatgactttacaacccaagagctttggatcaacatgccaattgagtgaaaaatttatcaaagctgccattggctgtggtattgtagaaagcatactaaactgggtgaagtttaaggcccaagtccagttaaacaagaagtgttcagctgtaaaacataatagaatcaagggaattcccaaactcgatgatgccaatgatgcagggggccgaaactccactgagtgtacgcttatcctgactgagggagattcagccaaaactttggctgtttcaggccttggtgtggttgggagagacaaatatggggttttccctcttagaggaaaaatactcaatgttcgagaagcttctcataagcagatcatggaaaatgctgagattaacaatatcatcaagattgtgggtcttcagtacaagaaaaactatgaagatgaagattcattgaagacgcttcgttatgggaagataatgattatgacagatcaggaccaagatggttcccacatcaaaggcttgctgattaattttatccatcacaactggccctctcttctgcgacatcgttttctggaggaatttatcactcccattgtaaaggtatctaaaaacaagcaagaaatggcattttacagccttcctgaatttgaagagtggaagagttctactccaaatcataaaaaatggaaagtcaaatattacaaaggtttgggcaccagcacatcaaaggaagctaaagaatactttgcagatatgaaaagacatcgtatccagttcaaatattctggtcctgaagatgatgctgctatcagcctggcctttagcaaaaaacagatagatgatcgaaaggaatggttaactaatttcatggaggatagaagacaacgaaagttacttgggcttcctgaggattacttgtatggacaaactaccacatatctgacatataatgacttcatcaacaaggaacttatcttgttctcaaattctgataacgagagatctatcccttctatggtggatggtttgaaaccaggtcagagaaaggttttgtttacttgcttcaaacggaatgacaagcgagaagtaaaggttgcccaattagctggatcagtggctgaaatgtcttcttatcatcatggtgagatgtcactaatgatgaccattatcaatttggctcagaattttgtgggtagcaataatctaaacctcttgcagcccattggtcagtttggtaccaggctacatggtggcaaggattctgctagtccacgatacatctttacaatgctcagctctttggctcgattgttatttccaccaaaagatgatcacacgttgaagtttttatatgatgacaaccagcgtgttgagcctgaatggtacattcctattattcccatggtgctgataaatggtgctgaaggaatcggtactgggtggtcctgcaaaatccccaactttgatgtgcgtgaaattgtaaataacatcaggcgtttgatggatggagaagaacctttgccaatgcttccaagttacaagaacttcaagggtactattgaagaactggctccaaatcaatatgtgattagtggtgaagtagctattcttaattctacaaccattgaaatctcagagcttcccgtcagaacatggacccagacatacaaagaacaagttctagaacccatgttgaatggcaccgagaagacacctcctctcataacagactatagggaataccatacagataccactgtgaaatttgttgtgaagatgactgaagaaaaactggcagaggcagagagagttggactacacaaagtcttcaaactccaaactagtctcacatgcaactctatggtgctttttgaccacgtaggctgtttaaagaaatatgacacggtgttggatattctaagagacttttttgaactcagacttaaatattatggattaagaaaagaatggctcctaggaatgcttggtgctgaatctgctaaactgaataatcaggctcgctttatcttagagaaaatagatggcaaaataatcattgaaaataagcctaagaaagaattaattaaagttctgattcagaggggatatgattcggatcctgtgaaggcctggaaagaagcccagcaaaaggttccagatgaagaagaaaatgaagagagtgacaacgaaaaggaaactgaaaagagtgactccgtaacagattctggaccaaccttcaactatcttcttgatatgcccctttggtatttaaccaaggaaaagaaagatgaactctgcaggctaagaaatgaaaaagaacaagagctggacacattaaaaagaaagagtccatcagatttgtggaaagaagacttggctacatttattgaagaattggaggctgttgaagccaaggaaaaacaagatgaacaagtcggacttcctgggaaaggggggaaggccaaggggaaaaaaacacaaatggctgaagttttgccttctccgcgtggtcaaagagtcattccacgaataaccatagaaatgaaagcagaggcagaaaagaaaaataaaaagaaaattaagaatgaaaatactgaaggaagccctcaagaagatggtgtggaactagaaggcctaaaacaaagattagaaaagaaacagaaaagagaaccaggtacaaagacaaagaaacaaactacattggcatttaagccaatcaaaaaaggaaagaagagaaatccctggtctgattcagaatcagataggagcagtgacgaaagtaattttgatgtccctccacgagaaacagagccacggagagcagcaacaaaaacaaaattcacaatggatttggattcagatgaagatttctcagattttgatgaaaaaactgatgatgaagattttgtcccatcagatgctagtccacctaagaccaaaacttccccaaaacttagtaacaaagaactgaaaccacagaaaagtgtcgtgtcagaccttgaagctgatgatgttaagggcagtgtaccactgtcttcaagccctcctgctacacatttcccagatgaaactgaaattacaaacccagttcctaaaaagaatgtgacagtgaagaagacagcagcaaaaagtcagtcttccacctccactaccggtgccaaaaaaagggctgccccaaaaggaactaaaagggatccagctttgaattctggtgtctctcaaaagcctgatcctgccaaaaccaagaatcgccgcaaaaggaagccatccacttctgatgattctgactctaattttgagaaaattgtttcgaaagcagtcacaagcaagaaatccaagggggagagtgatgacttccatatggactttgactcagctgtggctcctcgggcaaaatctgtacgggcaaagaaacctataaagtacctggaagagtcagatgaagatgatctgttttaaaatgtgaggcgattattttaagtaattatcttaccaagcccaagactggttttaaagttacctgaagctcttaacttcctcccctctgaatttagtttggggaaggtgtttttagtacaagacatcaaagtgaagtaaagcccaagtgttctttagcttt

SEQ ID NO: 4820 - DNA, 2907 bp, Homo sapiens
gccatctgggcccaggccccatgccccgaggaggggtggtctgaagcccaccagagccccctgccagactgtctgcctcccttctgactgtggccgcttggcatggccagcaacagcagctcctgcccgacacctgggggcgggcacctcaatgggtacccggtgcctccctacgccttcttcttcccccctatgctgggtggactctccccgccaggcgctctgaccactctccagcaccagcttccagttagtggatatagcacaccatccccagccaccattgagacccagagcagcagttctgaagagatagtgcccagccctccctcgccaccccctctaccccgcatctacaagccttgctttgtctgtcaggacaagtcctcaggctaccactatggggtcagcgcctgtgagggctgcaagggcttcttccgccgcagcatccagaagaacatggtgtacacgtgtcaccgggacaagaactgcatcatcaacaaggtgacccggaaccgctgccagtactgccgactgcagaagtgctttgaagtgggcatgtccaaggagtctgtgagaaacgaccgaaacaagaagaagaaggaggtgcccaagcccgagtgctctgagagctacacgctgacgccggaggtgggggagctcattgagaaggtgcgcaaagcgcaccaggaaaccttccctgccctctgccagctgggcaaatacactacgaacaacagctcagaacaacgtgtctctctggacattgacctctgggacaagttcagtgaactctccaccaagtgcatcattaagactgtggagttcgccaagcagctgcccggcttcaccaccctcaccatcgccgaccagatcaccctcctcaaggctgcctgcctggacatcctgatcctgcggatctgcacgcggtacacgcccgagcaggacaccatgaccttctcggacgggctgaccctgaaccggacccagatgcacaacgctggcttcggccccctcaccgacctggtctttgccttcgccaaccagctgctgcccctggagatggatgatgcggagacggggctgctcagcgccatctgcctcatctgcggagaccgccaggacctggagcagccggaccgggtggacatgctgcaggagccgctgctggaggcgctaaaggtctacgtgcggaagcggaggcccagccgcccccacatgttccccaagatgctaatgaagattactgacctgcgaagcatcagcgccaagggggctgagcgggtgatcacgctgaagatggagatcccgggctccatgccgcctctcatccaggaaatgttggagaactcagagggcctggacactctgagcggacagccggggggtggggggcgggacgggggtggcctggcccccccgccaggcagctgtagccccagcctcagccccagctccaacagaagcagcccggccacccactccccgtgaccgcccacgccacatggacacagccctcgccctccgccccggcttttctctgcctttctaccgaccatgtgaccccgcaccagccctgcccccacctgccctcccgggcagtactggggaccttccctgggggacggggagggaggaggcagcgactccttggacagaggcctgggccctcagtggactgcctgctcccacagcctgggctgacgtcagaggccgaggccaggaactgagtgaggcccctggtcctgggtctcaggatgggtcctgggggcctcgtgttcatcaagacacccctctgcccagctcaccacatcttcatcaccagcaaacgccaggacttggctcccccatcctcagaactcacaagccattgctccccagctggggaacctcaacctcccccctgcctcggttggtgacagagggggtgggacaggggcggggggttccccctgtacataccctgccataccaaccccaggtattaattctcgctggttttgtttttattttaatttttttgttttgatttttttaataagaattttcattttaagcacatttatactgaaggaatttgtgctgtgtattggggggagctggatccagagctggagggggtgggtccgggggagggagtggctcggaaggggcccccactctcctttcatgtccctgtgccccccagttctcctcctcagccttttcctcctcagttttctctttaaaactgtgaagtactaactttccaaggcctgccttcccctccctcccactggagaagccgccagcccctttctccctctgcctgaccactgggtgtggacggtgtggggcagccctgaaaggacaggctcctggccttggcacttgcctgcacccaccatgaggcatggagcagggcagagcaagggccccgggacagagttttcccagacctggctcctcggcagagctgcctcccgtcagggcccacatcatctaggctccccagcccccactgtgaaggggctggccaggggcccgagctgcccccacccccggcctcagccaccagcacccccatagggcccccagacaccacacacatgcgcgtgcgcacacacacaaacacacacacactggacagtagatgggccgacacacacttggcccgagttcctccatttccctggcctgccccccacccccaacctgtcccacccccgtgccccctccttaccccgcaggacgggcctacaggggggtctcccctcacccctgcacccccagctgggggagctggctctgccccgacctccttcaccaggggttggggccccttcccctggagcccgtgggtgcacctgttactgttgggctttccactgagatctactggataaagaataaagttctatttattct

SEQ ID NO: 4821 - protein, 462 aa, Homo sapiens
MASNSSSCPTPGGGHLNGYPVPPYAFFFPPMLGGLSPPGALTTLQHQLPVSGYSTPSPATIETQSSSSEEIVPSPPSPPPLPRIYKPCFVCQDKSSGYHYGVSACEGCKGFFRRSIQKNMVYTCHRDKNCIINKVTRNRCQYCRLQKCFEVGMSKESVRNDRNKKKKEVPKPECSESYTLTPEVGELIEKVRKAHQETFPALCQLGKYTTNNSSEQRVSLDIDLWDKFSELSTKCIIKTVEFAKQLPGFTTLTIADQITLLKAACLDILILRICTRYTPEQDTMTFSDGLTLNRTQMHNAGFGPLTDLVFAFANQLLPLEMDDAETGLLSAICLICGDRQDLEQPDRVDMLQEPLLEALKVYVRKRRPSRPHMFPKMLMKITDLRSISAKGAERVITLKMEIPGSMPPLIQEMLENSEGLDTLSGQPGGGGRDGGGLAPPPGSCSPSLSPSSNRSSPATHSP

SEQ ID NO: 4822 - DNA, 2347 bp, Homo sapiens
gcgcggcgggcatggctcgggtggcgtgggggctgctgtggttgctgctgggcagcgccggggcgcagtacgagaagtacagcttccggggcttcccgcccgaggacctgatgccgctggccgcggcgtacgggcacgctctggagcagtacgagggagagagctggcgcgagagcgcgcgctacctggaggcggcgctgcggctgcaccggctcctgcgcgacagcgaggccttctgccacgccaactgcagcggccccgcgcccgcggccaagcccgatcccgacggcggccgcgcagacgagtgggcctgcgagctgcggctcttcggccgcgtcctggagcgagccgcctgcctgcggcgctgcaagcggacgctgcccgccttccaggtgccctacccgccgcggcagctgctgcgtgacttccagagccgcctgccctaccagtacctgcactacgcgctgttcaaggctaaccggctggagaaggcggtggcggcggcctacaccttcctccagaggaacccgaagcacgagctgaccgccaagtatctcaactactatcaggggatgctggacgtcgccgacgagtccctcacggacctagaggcccagccctacgaggccgtgttcctccgggctgtgaagctctacaacagcggggatttccgcagcagcacggaggacatggagcgggccttgtcagagtacctggcagtctttgcccggtgcctggccggctgtgaaggggcccatgagcaggtggacttcaaggacttctacccggccatagcagatctctttgcagagtccctgcagtgcaaggtggactgtgaggccaatttgacccccaatgtgggtggctacttcgtggacaagttcgtggccaccatgtaccactacctgcagtttgcctactataagttgaatgatgtgcgccaggctgcccgcagcgccgccagctacatgctcttcgaccccaaggacagcgtcatgcagcagaacctggtgtattaccggttccaccgggctcgctggggcctggaagaggaggacttccagccccgggaggaggccatgctctaccacaaccagaccgccgagctgcgggagctgctggagttcacccacatgtacctgcagtcagatgatgagatggagctggaggagacagaaccgcccctggagcctgaggatgccctatctgacgccgagtttgagggggagggtgactacgaggagggcatgtatgctgactggtggcaggagccggatgccaagggtgacgaggccgaggctgagccagagcctgaactcgcatgagaaggggacaccccacaccgctcaagcttgggaagcctggtgccgatggccccaccctcaccagcctgggcagcagcaagaactatttattaaaaacttaagatgggccaggtgcggtggctcacacctgtaatcccagcattttgggaggccaaggtgggtggatcacttgaggccaggagttcaagaccagcctggccaacatgatgagacctccgtctctactaaaatacataaattagccgggtgtggtggcaggcgcctgaaatcccagctactcaagaggctgaggcaggagaatcgcttgaacctgggaggcaaaggttgcggtgaactgagattgcgccaccgcactccagcctgggcgacagagcgagactccatctttaaaaaaaaacaagacgggccggcacggtggctcacgcctgtaatcccagcactgagaggccgatcacttgaggtcaggagttcaagacctgcctggccaacatggtgaaaccccatctctactaaaaaatacaaaaattagccaggcatggtggcacacacctgtaatcgtagctgaggcaggagaatcgcctgaacccaggaggcggagcttgcagtgagccgagatcgtgccactgcactccagcctgggcgacagagtgagactccatctcaaaaaaaaaaaaaaaaaacttaagatggacacagctgactggacccccatcctgcctcacccatgggtgctgcaccccagacccatcctgccacttctatgtctctggaccacaggatggtggtggcattgcaggttggcaagtgggctgatggggtccgccctcctcactgctgagctcctcacctggacagtctcctggacaaggagtttccagctgctggctggagtctcaggccaaattgcagagggtcctccagggtcctgaagagcactggactaagagtctagtggttccagggccctgaccagtaggtgctcaataaatgtttgttgttgaatgaaaaaaaaaaaaaaaaaa

SEQ ID NO: 4823 - protein, 437 aa, Homo sapiens
MARVAWGLLWLLLGSAGAQYEKYSFRGFPPEDLMPLAAAYGHALEQYEGESWRESARYLEAALRLHRLLRDSEAFCHANCSGPAPAAKPDPDGGRADEWACELRLFGRVLERAACLRRCKRTLPAFQVPYPPRQLLRDFQSRLPYQYLHYALFKANRLEKAVAAAYTFLQRNPKHELTAKYLNYYQGMLDVADESLTDLEAQPYEAVFLRAVKLYNSGDFRSSTEDMERALSEYLAVFARCLAGCEGAHEQVDFKDFYPAIADLFAESLQCKVDCEANLTPNVGGYFVDKFVATMYHYLQFAYYKLNDVRQAARSAASYMLFDPKDSVMQQNLVYYRFHRARWGLEEEDFQPREEAMLYHNQTAELRELLEFTHMYLQSDDEMELEETEPPLEPEDALSDAEFEGEGDYEEGMYADWWQEPDAKGDEAEAEPEPELA

SEQ ID NO: 4824 - DNA, 499 bp, Homo sapiens
tctttcgcgggcacttcgaattctagtcccctccaggcaggagcccgggccgacggagaggacttaacgacactatcggaccctctgggaaaagaggggagacgtcgtgacccaggccccgccccaccttgccgcctcgtgcccggcgctaagacccagcgggcgcgccgcccgcccggggcccggccctgtccccttccgtccgcggggcagccagctcagctccggagagccggcggcgcggcgggcatggctcgggtggcgtgggggctgctgtggttgctgctgggcagcgccggggcgcagtacgagaagtacagcttccggggcttcccgcccgaggacctgatgccgctggccgcggcgtacgggcacgctctggagcagtacgagggagagagctggcgcgagagcgcgcgctacctggaggcggcgctgcggctgcaccggctcctgcgcgacagcgaggccttctgccacgccaactgcagcggccccg

SEQ ID NO: 4825 - DNA, 2309 bp, Homo sapiens
agctatgatcgcaacaccttggtggccatcgtggtgggtgtggggcgcctcatcactggcatggaccgaggcctcatgggcatgtgtgtcaacgagcggcgacgcctcattgtgcctccccacctgggctatgggagcatcggcctggcggggctcattccaccggatgccaccctctacttcgatgtggttctgctggatgtgtggaacaaggaagacaccgtgcaggtgagcacattgctgcgcccgccccactgcccccgcatggtccaggacggcgactttgtccgctaccactacaatggcaccctgctggacggcacctccttcgacaccagctacagtaagggcggcacttatgacacctacgtcggctctggttggctgatcaagggcatggaccaggggctgctgggcatgtgtcctggagagagaaggaagattatcatccctccattcctggcctatggcgagaaaggctatgggacagtgatccccccacaggcctcgctggtctttcacgtcctcctgattgacgtgcacaacccgaaggacgctgtccagctagagacgctggagctcccccccggctgtgtccgcagagccggggccggggacttcatgcgctaccactacaatggctccttgatggacggcaccctcttcgattccagctactcccgcaaccacacctacaatacctatatcgggcagggttacatcatccccgggatggaccaggggctgcagggtgcctgcatgggggaacgccggagaattaccatccccccgcacctcgcctatggggagaatggaactggagacaagatccctggctctgccgtgctaatcttcaacgtccatgtcattgacttccacaaccctgcggatgtggtggaaatcaggacactgtcccggccatctgagacctgcaatgagaccaccaagcttggggactttgttcgataccattacaactgttctttgctggacggcacccagctgttcacctcgcatgactacggggccccccaggaggcgactctcggggccaacaaggtgatcgaaggcctggacacgggcctgcagggcatgtgtgtgggagagaggcggcagctcatcgtgcccccgcacctggcccacggggagagtggagcccggggagtcccaggcagtgctgtgctgctgtttgaggtggagctggtgtcccgggaggatgggctgcccacaggctacctgtttgtgtggcacaaggaccctcctgccaacctgtttgaagacatggacctcaacaaggatggcgaggtccctccggaggagttctccaccttcatcaaggctcaagtgagtgagggcaaaggacgcctcatgcctgggcaggaccctgagaaaaccataggagacatgttccagaaccaggaccgcaaccaggacggcaagatcacagtcgacgagctcaagctgaagtcagatgaggacgaggagcgggtccacgaggagctctgaggggcagggagcctggccaggcctgagacacagaggcccactgcgagggggacagtggcggtgggactgacctgctgacagtcaccctccctctgctgggatgaggtccaggagccaactaaaacaatggcagaggagacatctctggtgttcccaccaccctagatgaaaatccacagcacagacctctaccgtgtttctcttccatccctaaaccacttccttaaaatgtttggatttgcaaagccaatttggggcctgtggagcctggggttggatagggccatggctggtcccccaccatacctcccctccacatcactgacacagctgagcttgttatccatctccccaaactttctctttctttgtacttcttgtcatccccactcccagccccttttcctctatgtgacagctccctaggacccctctgccttcctccccaatcctgactggctcctagggaaggggaaggctcctggagggcagccctacctctcccatgccctttgccctcctccctcgcctccagtggaggctgagctgaccctgggctgctggaggccagactgggctgtagttagcttttcatccctaaagaaggctcctttccctaaggaaccatagaagagaggaagaaaacaaagggcatgtgtgagggaagctgcttgggtgggtgttagggctatgaaatcttggatttggggctgaggggtgggagggagggcagagctctgcacactcaaaggctaaactggtgtcagtccttttttcctttgttccaaataaaagattaaacc

SEQ ID NO: 4826 - DNA, 1446 bp, Homo sapiens
gggatggcagaggaggtgaggagggaggaagcgtccggagtggggcgggcccggactccgacccccggggcgcttcgagccccccagctggtcaccgaggcaccgccgcttcacccaggccagtagccgccccctcgcgcaccccggccccgcctcacacgcgcgcccgagcgagccccgggctcccctcgggcccagcgtggcgcaggggtcagtggttctctcgggtctcgggacaggtgagcaccctgatgaaggccacggtcctgatgcggcagcctgggcgggtgcaggagatcgtgggcgccctccgcaagggcggcggagaccggttacaggtgatttctgattttgacatgaccttgagcaggtttgcatataatggaaagcgatgcccttcttcttacaatattctggataatagcaagatcatcagtgaggagtgtcggaaagagctcacagcgctccttcaccactattacccaattgagatcgacccacaccggaccgtcaaggagaagctacctcatatggtggaatggtggaccaaagcacacaatctcctatgtcagcagaagattcagaagtttcagatagcccaggtggttagagagtccaatgcaatgctcagggagggatataagaccttcttcaacacactctaccataacaacattccccttttcatcttttctgcgggcattggtgatatcctggaagaaattatccgacagatgaaagtgttccaccccaacatccacatcgtgtctaactacatggattttaatgaagatggttttctccagggatttaagggccagctcatacacacatacaacaagaacagctctgcgtgtgagaactctggttacttccagcaacttgagggcaaaaccaatgtcatcctgctgggagactctatcggggacctcaccatggccgatggggttcctggtgtgcagaacattctcaaaattggcttcctgaatgacaaggtggaggagcggcgggagcgctacatggactcctatgacatcgtgctggagaaggacgagactctggatgtggtcaacgggctactgcagcacatcctgtgccagggggtccagctggagatgcaaggcccctgaaggcgcaggctccagcccggcctgcaggccgtggtgaggaggggcgcctccccagagtctgctcccccgtgaacacagagcagaggccagggtggccagcagtggctgggtccttccgcgcccctccgtcctcctttccctgagcaccttcatcaccagaggcttgaaggaaccccgccatgtggcagggcacaggcactgttcctggtgaaccttggaccacagcatgtcagtgctctagggattgtctactccagggattttcttcaaaatttttaaacatgggaagttcaaacaaatataatgtgtgaaacag

SEQ ID NO: 4827 - DNA, 4273 bp, Homo sapiens
ccggattttgcggggttcgtcgggcctgtggaagaagcgccgcgcacggacttcggcagaggtagagcaggtctctctgcagccatgtcggccaaggcaatttcagagcagacgggcaaagaactcctttacaagttcatctgtaccacctcagccatccagaatcggttcaagtatgctcgggtcactcctgacacagactgggcccgcttgctgcaggaccacccctggctgctcagccagaacttggtagtcaagccagaccagctgatcaaacgtcgtggaaaacttggtctcgttggggtcaacctcactctggatggggtcaagtcctggctgaagccacggctgggacaggaagccacagttggcaaggccacaggcttcctcaagaactttctgatcgagcccttcgtcccccacagtcaggctgaggagttctatgtctgcatctatgccacccgagaaggggactacgtcctgttccaccacgaggggggtgtggacgtgggtgatgtggacgccaaggcccagaagctgcttgttggcgtggatgagaaactgaatcctgaggacatcaaaaaacacctgttggtccacgcccctgaagacaagaaagaaattctggccagttttatctccggcctcttcaatttctacgaggacttgtacttcacctacctcgagatcaatccccttgtagtgaccaaagatggagtctatgtccttgacttggcggccaaggtggacgccactgccgactacatctgcaaagtgaagtggggtgacatcgagttccctccccccttcgggcgggaggcatatccagaggaagcctacattgcagacctcgatgccaaaagtggggcaagcctgaagctgaccttgctgaaccccaaagggaggatctggaccatggtggccgggggtggcgcctctgtcgtgtacagcgataccatctgtgatctagggggtgtcaacgagctggcaaactatggggagtactcaggcgcccccagcgagcagcagacctatgactatgccaagactatcctctccctcatgacccgagagaagcacccagatggcaagatcctcatcattggaggcagcatcgcaaacttcaccaacgtggctgccacgttcaagggcatcgtgagagcaattcgagattaccagggccccctgaaggagcacgaagtcacaatctttgtccgaagaggtggccccaactatcaggagggcttacgggtgatgggagaagtcgggaagaccactgggatccccatccatgtctttggcacagagactcacatgacggccattgtgggcatggccctgggccaccggcccatccccaaccagccacccacagcggcccacactgcaaacttcctcctcaacgccagcgggagcacatcgacgccagcccccagcaggacagcatctttttctgagtccagggccgatgaggtggcgcctgcaaagaaggccaagcctgccatgccacaagattcagtcccaagtccaagatccctgcaaggaaagagcaccaccctcttcagccgccacaccaaggccattgtgtggggcatgcagacccgggccgtgcaaggcatgctggactttgactatgtctgctcccgagacgagccctcagtggctgccatggtctaccctttcactggggaccacaagcagaagttttactgggggcacaaagagatcctgatccctgtcttcaagaacatggctgatgccatgaggaagcatccggaggtagatgtgctcatcaactttgcctctctccgctctgcctatgacagcaccatggagaccatgaactatgcccagatccggaccatcgccatcatagctgaaggcatccctgaggccctcacgagaaagctgatcaagaaggcggaccagaagggagtgaccatcatcggacctgccactgttggaggcatcaagcctgggtgctttaagattggcaacacaggtgggatgctggacaacatcctggcctccaaactgtaccgcccaggcagcgtggcctatgtctcacgttccggaggcatgtccaacgagctcaacaatatcatctctcggaccacggatggcgtctatgagggcgtggccattggtggggacaggtacccgggctccacattcatggatcatgtgttacgctatcaggacactccaggagtcaaaatgattgtggttcttggagagattgggggcactgaggaatataagatttgccggggcatcaaggagggccgcctcactaagcccatcgtctgctggtgcatcgggacgtgtgccaccatgttctcctctgaggtccagtttggccatgctggagcttgtgccaaccaggcttctgaaactgcagtagccaagaaccaggctttgaaggaagcaggagtgtttgtgccccggagctttgatgagcttggagagatcatccagtctgtatacgaagatctcgtggccaatggagtcattgtacctgcccaggaggtgccgcccccaaccgtgcccatggactactcctgggccagggagcttggtttgatccgcaaacctgcctcgttcatgaccagcatctgcgatgagcgaggacaggagctcatctacgcgggcatgcccatcactgaggtcttcaaggaagagatgggcattggcggggtcctcggcctcctctggttccagaaaaggttgcctaagtactcttgccagttcattgagatgtgtctgatggtgacagctgatcacgggccagccgtctctggagcccacaacaccatcatttgtgcgcgagctgggaaagacctggtctccagcctcacctcggggctgctcaccatcggggatcggtttgggggtgccttggatgcagcagccaagatgttcagtaaagcctttgacagtggcattatccccatggagtttgtgaacaagatgaagaaggaagggaagctgatcatgggcattggtcaccgagtgaagtcgataaacaacccagacatgcgagtgcagatcctcaaagattacgtcaggcagcacttccctgccactcctctgctcgattatgcactggaagtagagaagattaccacctcgaagaagccaaatcttatcctgaatgtagatggtctcatcggagtcgcatttgtagacatgcttagaaactgtgggtcctttactcgggaggaagctgatgaatatattgacattggagccctcaatggcatctttgtgctgggaaggagtatggggttcattggacactatcttgatcagaagaggctgaagcaggggctgtatcgtcatccgtgggatgatatttcatatgttcttccggaacacatgagcatgtaacagagccaggaaccctactgcagtaaactgaagacaagatctcttcccccaagaaaaagtgtacagacagctggcagtggagcctgctttatttagcaggggcctggaatgtaaacagccactggggtacaggcaccgaagaccaacatccacaggctaacaccccttcagtccacacaaagaagcttcatattttttttataagcatagaaataaaaaccaagccaatatttgtgactttgctctgctacctgctgtatttattatatggaagcatctaagtactgtcaggatggggtcttcctcattgtagggcgttaggatgttgctttctttttccattagttaaacatttttttctcctttggaggaagggaatgaaacatttatggcctcaagatactatacatttaaagcaccccaatgtctctctttttttttttttacttccctttcttcttccttatataacatgaagaacattgtattaatctgatttttaaagatctttttgtatgttacgtgttaagggcttgtttggtatcccactgaaatgttctgtgttgcagaccagagtctgtttatgtcagggggatggggccattgcatccttagccattgtcacaaaatatgtggagtagtaacttaatatgtaaagttgtaacatacatacatttaaaatggaaatgcagaaagctgtgaaatgtcttgtgtcttatgttctctgtatttatgcagctgatttgtctgtctgtaactgaagtgtgggtccaaggactcctaactactttgcatctgtaatccacaaagattctgggcagctgccacctcagtctcttctctgtattatcatagtctggtttaaataaactatatagtaaca

SEQ ID NO: 4828 - protein, 947 aa, Homo sapiens
  unsure 936: unknown amino acid
MSAKAISEQTGKELLYKFICTTSAIQNRFKYARVTPDTDWARLLQDHPWLLSQNLVVKPDQLIKRRGKLGLVGVNLTLDGVKSWLKPRLGQEATVGKATGFLKNFLIEPFVPHSQAEEFYVCIYATREGDYVLFHHEGGVDVGDVDAKAQKLLVGVDEKLNPEDIKKHLLVHAPEDKKEILASFISGLFNFYEDLYFTYLEINPLVVTKDGVYVLDLAAKVDATADYICKVKWGDIEFPPPFGREAYPEEAYIADLDAKSGASLKLTLLNPKGRIWTMVAGGGASVVYSDTICDLGGVNELANYGEYSGAPSEQQTYDYAKTILSLMTREKHPDGKILIIGGSIANFTNVAATFKGIVRAIRDYQGPLKEHEVTIFVRRGGPNYQEGLRVMGEVGKTTGIPIHVFGTETHMTAIVGMALGHRPIPNQPPTAAHTANFLLNASGSTSTPAPSRTASFSESRADEVAPAKKAKPAMPQDSVPSPRSLQGKSTTLFSRHTKAIVWGMQTRAVQGMLDFDYVCSRDEPSVAAMVYPFTGDHKQKFYWGHKEILIPVFKNMADAMRKHPEVDVLINFASLRSAYDSTMETMNYAQIRTIAIIAEGIPEALTRKLIKKADQKGVTIIGPATVGGIKPGCFKIGNTGGMLDNILASKLYRPGSVAYVSRSGGMSNELNNIISRTTDGVYEGVAIGGDRYPGSTFMDHVLRYQDTPGVKMIVVLGEIGGTEEYKICRGIKEGRLSTPVVCWCIGTCATMFSSEVQFGHAGACANQASETAVAKNQALKEAGVFVPRSFDELGEIIQSVYEDLVANGVIVPAQEVPPPTVPMDYSWARELGLIRKPASFMTSICDERGQELIYAGMPITEVFKEEMGIGGVLGLLWFQKRLPKYSCQFIEMCLMVTADHGPAVSGAHNTIICARAGKDLVSSLTSGLLTIGDRFXGCLGCSSQDVQ

SEQ ID NO: 4829 - DNA, 2140 bp, Homo sapiens
ggctgaggggagggccgttggccggggcctgcggtacgccgcttcagtgagggacgccactgcggccacccggcttgctgccttcctgggcgccactcccccaggcgacccgacgcgacgcgccagcagcgcagcaccgattcctctcgggctcttgggcgctgctctgagcagcgtcaccctttacaccagaaagctggcgggcactatggggaaaaaacaaaacaagaagaaagtggaggaggtgctagaagaggaggaagaggaatatgtggtggaaaaagttctcgaccgtcgagtggtaaagggcaaagtggagtacctcctaaagtggaagggattctcagatgaggacaacacatgggagccagaagagaacctggattgccccgacctcattgctgagtttctgcagtcacagaaaacagcacatgagacagataaatcagagggaggcaagcgcaaagctgattctgattctgaagataagggagaggagagcaaaccaaagaagaagaaagaagagtcagaaaagccacgaggctttgctcgaggtttggagccggagcggattattggagctacagactccagtggagagctcatgttcctgatgaaatggaaaaactctgatgaggctgacctggtccctgccaaggaagccaatgtcaagtgcccacaggttgtcatatccttctatgaggaaaggctgacgtggcattcctacccctcggaggatgatgacaaaaaagatgacaagaactaacgctcctgagtaccagcccctgtcacatctgactgtgggtttcaagtgggaagggaaggagttctacttgtcttgacaccatagaggtggcttgagaagatgtcctttgaagagccagtatagtttctgtgccctgcagcagcccaagtgctttaaagccgtttcaagctgtatagtttgcacacccatcccagtggaggggaaaggggataagtgtttcaaggcaaccttttctgcactttgctgcgaaaagcaaagggccttctatgaaggacaaaacttgcagaattgggtgtgtgggagagcaaaaaaatactgtagatcttcaaagagcatctccacaacccacagccttcttcccaatagtgttaactctgcatttttacagcgtagcatgtgtgtagtttttggctattactggtgtattatttgggggagggagggatggggaggggagaaagggagatgggtagcatcattttgattaacatttggggcctgataggggaaatggtgaagcaatggaaaagaacagacaactaatgatttgcttctatgtccagaatattttacctttaaaaaaatgtcattggcaccataaataaggactgtgagagactgtttaaaagctgtgaaagtctgaaacctataagccaaggtgttccctgcctaaacttattgctgttcccacaaaggactaagcctgttcataagttaccaaagttgccattttggagatggaaattgacgaggagggaaggtcttttattggagagtatacagtacaagcagatcattctgccttagaggtgctaattcccgaaattagaagaccctttcttttccagtaacgaagttataaatatcagcttgttcatccaagccactggctgaggtgttaggaagaggaagagggtggtagaggaggtaagacagtagggaaagacaagggcccatgctcttagtggggaaaactcttggagccgtttactttgagctttgaacactgaaaccattgttggcagggttcagtcactgacagcacaagtttcactgaattgatccaagagtttagtgatttcaaaagccttggtctcaggagaagattaaactttcatattgggcagtggttcactttaaaacacacacatacacacacaaaacaattttttaagaaatcctaataagtaacatacccaaaatgctctgtcttgagtcatgagaaccatcagttcttgatattgtctagacttgcatctagagctacgttgtaaaattcttttaggcatgtgttagatttctgtgtaaactttgtttaaatgtaaacttcatactacattgtcagtttttgtcttaataaaactatagatttat

SEQ ID NO: 4830 - DNA, 2538 bp, Homo sapiens
ctgaagcggaagtggaggaaagatggaggaccatcagcacgtgcccatcgacatccagaccagcaagctgctcgattggctggtggacagaaggcactgcagcctgaaatggcagagtctggtgctgacgatccgcgagaagatcaatgctgccatccaggacatgccagagagcgaagagatcgcccagctgctgtctgggtcctacattcactactttcactgcctaagaatcctggaccttctcaaaggcacagaggcctccacgaagaatatttttggccgatactcttcacagcggatgaaggattggcaggagattatagctctgtatgagaaggacaacacctacttaggtaaagtggcccggcctgggagccctggtatccatggggaagcccactctcagagttctgagataccaggcttataggaggcacagtctgtgagtgggaagagactggagtgtagatgttgcccatttgtaggtggtaaaatcaattgtttttgatggaattgattttccctgagtggagtgctgggggaaggaggaggtccaggccggtagtggccattcgccgtgcctcagcgagcaggtgtgtgtgggtcctccaccactcacctcttggttagcgggagtgtgctgcccccacccccacccccgcacccccattctacacaaggcagaagaggcacgggttttcctgggagcgaatatcaagtgcctgagagcaactacaggactaactgtgtttgggttgggtgtagtataaataataataatggctaatatttcctgagcatctactaaatgcaaggaattgtgcttggtgtgtcatgtggattctctcttgcatcttcatgataaatgttattgtcgctgttttaccgatgagggttggattagaggggttaaacaacttgtcttaggctccacagctgggaacaagtggggctgggaagctgacttcgtgctcttcaccaccacaaaggatgtgtgtgcatcctggggcatgcctgcctcatgtgggggtgtcctgggctgaatttcctgggcacttctcagtggaactctctagcctcctggttcggaatgtcaactatgagatcccctcactgaagaagcagattgccaagtgccagcagctgcagcaagaatacagccgcaaggaggaggagtgccaggcaggggctgccgagatgcgggagcagttctaccactcctgcaagcagtatggcatcacgggcgaaaatgtccgaggagaactgctggccctggtgaaggacctgccgagtcagctggctgagattggggcagcggctcagcagtccctgggggaagccattgacgtgtaccaggcgtctgtggggtttgtgtgtgagagccccacagagcaggtgttgccaatgctgcggttcgtgcagaagcggggaaactcaacggtgtacgagtggaggacagggacagagccctctgtggtggaacgaccccacctcgaggagcttcctgagcaggtggcagaagatgcgattgactggggcgactttggggtagaggcagtgtctgaggggactgactctggcatctctgccgaggctgctggaatcgactggggcatcttcccggaatcagattcaaaggatcctggaggtgatgggatagactggggagacgatgctgttgctttgcagatcacagtgctggaagcaggaacccaggctccagaaggtgttgccaggggcccagatgccctgacactgcttgaatacactgagacccggaatcagttccttgatgagctcatggagcttgagatcttcttagcccagagagcagtggagttgagtgaggaggcagatgtcctgtctgtgagccagttccagctggctccagccatcctgcagggccagaccaaagagaagatggttaccatggtgtcagtgctggaggatctgattggcaagcttaccagtcttcagctgcaacacctgtttatgatcctggcctcaccaaggtatgtggaccgagtgactgaattcctccagcaaaagctgaagcagtcccagctgctggctttgaagaaagagctgatggtgcagaagcagcaggaggcacttgaggagcaggcggctctggagcctaagctggacctgctactggagaagaccaaggagctgcagaagctgattgaagctgacatctccaagaggtacagcgggcgccctgtgaacctgatgggaacctctctgtgacaccctccgtgttcttgcctgcccatcttctccgcttttgggatgaagatgatagccagggctgttgttttggggcctttcaaggcaaaagaccaggctgactggaagatggaaagccacaggaaggaagcggcacctgatggtgatcttggcactctccatgttctctacaagaagctgtggtgattggccctgtggtctaccaggcgaaaaccacagattctccttctagttagtatagcggacttaataaaagaggaaaaaacaaaaaaaaaaaaaaaaaaa

SEQ ID NO: 4831 - protein, 419 aa, Homo sapiens
MCVHPGACLPHVGVSWAEFPGHFSVELSSLLVRNVNYEIPSLKKQIAKCQQLQQEYSRKEEECQAGAAEMREQFYHSCKQYGITGENVRGELLALVKDLPSQLAEIGAAAQQSLGEAIDVYQASVGFVCESPTEQVLPMLRFVQKRGNSTVYEWRTGTEPSVVERPHLEELPEQVAEDAIDWGDFGVEAVSEGTDSGISAEAAGIDWGIFPESDSKDPGGDGIDWGDDAVALQITVLEAGTQAPEGVARGPDALTLLEYTETRNQFLDELMELEIFLAQRAVELSEEADVLSVSQFQLAPAILQGQTKEKMVTMVSVLEDLIGKLTSLQLQHLFMILASPRYVDRVTEFLQQKLKQSQLLALKKELMVQKQQEALEEQAALEPKLDLLLEKTKELQKLIEADISKRYSGRPVNLMGTSL

SEQ ID NO: 4832 - DNA, 1752 bp, Homo sapiens
gaagagggtcgggtatctgggcatgcgcagggccgcaggactcttggtggggtagcgagggggacggtcccacgactgctccgaagggccgggactcccagtgggggcgggacccccggagtgcccgcctgcggactcccaagcctggagcctggggagagggtgggcacctccgttcccgcacacccgtccatggtgtgtgcgccgagcgtccaggagccacggcggtgtcttccttgcgcgtcttttacacgtgtgggggtaggctgctcctcggggctgagccgtggccagggttatggagaggcccgcctctccccagatggcgtcgtcgagccctgactccccatgttcctgcgactgctttgtctccgtgcccccggcctcagccatcccggctgtgatctttgccaagaactcggaccgaccccgggacgaggtgcaggaggtggtgtttgtccccgcaggcactcacactcctgggagccggctccagtgcacctacattgaagtggaacaggtgtcgaagacgcacgctgtgattctgagccgtccttcttggctatggggggctgagatgggcgccaacgagcatggtgtctgcattggcaacgaggctgtgtggacgaaggagccagttggggagggggaagccctgctgggcatggacctactcaggctggctttggaacggagcagctctgcccaggaggccttgcatgtgatcacagggttactggagcactatgggcaggggggcaactgcctggaggatgctgcgccattctcctaccatagcaccttcctgctggctgaccgcactgaggcgtgggtgctggagacagctgggaggctctgggctgcacagaggatccaggagggggcccgcaacatctccaaccagctgagcattggcacggacatctcggcccaacacccggagctgcggactcatgcccaggccaagggctggtgggatgggcagggtgcctttgactttgctcagatcttctccctgacccagcagcctgtgcgcatggaggctgccaaggcccgcttccaggcagggcgggagctgctgcggcaacggcaagggggcatcacggcagaggtgatgatgggcatcctcagagacaaggagagtggtatctgtatggactcgggaggctttcgcaccacggccagcatggtgtctgtcctgccccaggatcccacgcagccctgcgtgcactttcttaccgccacgccagacccatccaggtctgtgttcaaacctttcatcttcgggatgggggtggcccaggccccccaggtgctgtcccccacttttggagcacaagaccctgttcggaccctgccccgattccagactcaggtagatcgtcggcataccctctaccgtggacaccaggcagccctggggctgatggagagagatcaggatcgggggcagcagctccagcagaaacagcaggatctggagcaggaaggcctcgaggccacacaggggctgctggccggcgagtgggccccacccctctgggagctgggcagcctcttccaggccttcgtgaagagggagagccaggcttatgcgtaagcttcatagcttctgctggcctggggtggacccaggacccctggggcctgggtgccctgagtggtggtaaagtggagcaatcccttcacgctccttggccatgttctgagcggccagcttggcctttgccttaataaatgtgctttattttc

SEQ ID NO: 4833 - protein, 425 aa, Homo sapiens
MASSSPDSPCSCDCFVSVPPASAIPAVIFAKNSDRPRDEVQEVVFVPAGTHTPGSRLQCTYIEVEQVSKTHAVILSRPSWLWGAEMGANEHGVCIGNEAVWTKEPVGEGEALLGMDLLRLALERSSSAQEALHVITGLLEHYGQGGNCLEDAAPFSYHSTFLLADRTEAWVLETAGRLWAAQRIQEGARNISNQLSIGTDISAQHPELRTHAQAKGWWDGQGAFDFAQIFSLTQQPVRMEAAKARFQAGRELLRQRQGGITAEVMMGILRDKESGICMDSGGFRTTASMVSVLPQDPTQPCVHFLTATPDPSRSVFKPFIFGMGVAQAPQVLSPTFGAQDPVRTLPRFQTQVDRRHTLYRGHQAALGLMERDQDRGQQLQQKQQDLEQEGLEATQGLLAGEWAPPLWELGSLFQAFVKRESQAYA

SEQ ID NO: 4834 - DNA, 3207 bp, Homo sapiens
tctccctccgcctcccgagcaccagcgcgctctgagctgcccccagggtccctcccccgccgccagcagcccatttggagggaggaagtaagggaagaggagaggaaggggagccggaccgactacccagacagagccggtgaatgggtttgtggtgacccccgccccccaccccaccctcccttcccacccgacccccaacccccatccccagttcgagccgccgcccgaaaggccgggccgtcgtcttaggaggagtcgccgccgccgccacctccgccatggagctgatcaccattctcgagaagaccgtgtctcccgatcggctggagctggaagcggcgcagaagttcctggagcgtgcggccgtggagaacctgcccactttccttgtggaactgtccagagtgctggcaaatccaggaaacagtcaggttgccagagttgcagctggtctacaaatcaagaactctttgacatctaaagatccagatatcaaggcacaatatcagcagaggtggcttgctattgatgctaatgctcgacgagaagtcaagaactatgttttgcagacattgggtacagaaacttaccggcctagttctgcctcacagtgtgtggctggtattgcttgtgcagagatcccagtaaaccagtggccagaactcattcctcagctggtggccaatgtcacaaaccccaacagcacagagcacatgaaggagtcgacattggaagccatcggttatatttgccaagatatagacccagagcagctacaagataaatccaatgagattctgactgccataatccaggggatgaggaaagaagagcctagtaataatgtgaagctagctgctacgaatgcactcctgaactcattggagttcaccaaagcaaactttgataaagagtctgaaaggcactttattatgcaggtggtctgtgaagccacacagtgtccagatacgagggtacgagtggctgctttacagaatctggtgaagataatgtccttatattatcagtacatggagacatatatgggtcctgctctttttgcaatcacaatcgaagcaatgaaaagtgacattgatgaggtggctttacaagggatagaattctggtccaatgtctgtgatgaggaaatggatttggccattgaagcttcagaggcagcagaacaaggacggccccctgagcacaccagcaagttttatgcgaagggagcactacagtatctggttccaatcctcacacagacactaactaaacaggacgaaaatgatgatgacgatgactggaacccctgcaaagcagcaggggtgtgcctcatgcttctggccacctgctgtgaagatgacattgtcccacatgtcctccccttcattaaagaacacatcaagaacccagattggcggtaccgggatgcagcagtgatggcttttggttgtatcttggaaggaccagagcccagtcagctcaaaccactagttatacaggctatgcccaccctaatagaattaatgaaagaccccagtgtagttgttcgagatacagctgcatggactgtaggcagaatttgtgagctgcttcctgaagctgccatcaatgatgtctacttggctcccctgctacagtgtctgattgagggtctcagtgctgaacccagagtggcttcaaatgtgtgctgggctttctccagtctggctgaagctgcttatgaagctgcagacgttgctgatgatcaggaagaaccagctacttactgcttatcttcttcatttgaactcatagttcagaagctcctagagactacagacagacctgatggacaccagaacaacctgaggagttctgcatatgaatctctgatggaaattgtgaaaaacagtgccaaggattgttatcctgctgtccagaaaacgactttggtcatcatggaacgactgcaacaggttcttcagatggagtcacatatccagagcacatccgatagaatccagttcaatgaccttcagtctttactctgtgcaactcttcagaatgttcttcggaaagtgcaacatcaagatgctttgcagatctctgatgtggttatggcctccctgttaaggatgttccaaagcacagctgggtctgggggagtacaagaggatgccctgatggcagttagcacactggtggaagtgttgggtggtgaattcctcaagtacatggaggcctttaaacccttcctgggcattggattaaaaaattatgctgaataccaggtttgtttggcagctgtgggcttagtgggagacttgtgccgtgccctgcaatccaacatcatacctttctgtgacgaggtgatgcagctgcttctggaaaatttggggaatgagaacgtccacaggtctgtgaagccgcagattctgtcagtgtttggtgatattgcccttgctattggaggagagtttaaaaaatacttagaggttgtattgaatactcttcagcaggcctcccaagcccaggtggacaagtcagactatgacatggtggattatctgaatgagctaagggaaagctgcttggaagcctatactggaatcgtccagggattaaagggggatcaggagaacgtacacccggatgtgatgctggtacaacccagagtagaatttattctgtctttcattgaccacattgctggagatgaggatcacacagatggagtagtagcttgtgctgctggactaataggggacttatgtacagcatttgggaaggatgtactgaaattagtagaagctaggccaatgatccatgaattgttaactgaagggcggagatcgaagactaacaaagcaaaaacccttgctacatgggcaacaaaagaactgaggaaactgaagaaccaagcttgatctgttaccattgggatgataacctgaggacccccactggaaatctcccatcttttgaaaaacctggaagtgaggagtgtgcacggatgctgaatgtttgggaatgagaggatgagtgagtgaggcttgaaaacacaccacattgaaaatcctgccacagcagcagccgcagccgccaacagcagcgctgttagtgagctaagtaagcactgacttcgtagaaaaccataacatcggccatcttggaaaagagaaaaacaatggagttacttatttaaaaaaaaaaaaaaaaaaa

SEQ ID NO: 4835 - protein, 876 aa, Homo sapiens
MELITILEKTVSPDRLELEAAQKFLERAAVENLPTFLVELSRVLANPGNSQVARVAAGLQIKNSLTSKDPDIKAQYQQRWLAIDANARREVKNYVLQTLGTETYRPSSASQCVAGIACAEIPVNQWPELIPQLVANVTNPNSTEHMKESTLEAIGYICQDIDPEQLQDKSNEILTAIIQGMRKEEPSNNVKLAATNALLNSLEFTKANFDKESERHFIMQVVCEATQCPDTRVRVAALQNLVKIMSLYYQYMETYMGPALFAITIEAMKSDIDEVALQGIEFWSNVCDEEMDLAIEASEAAEQGRPPEHTSKFYAKGALQYLVPILTQTLTKQDENDDDDDWNPCKAAGVCLMLLATCCEDDIVPHVLPFIKEHIKNPDWRYRDAAVMAFGCILEGPEPSQLKPLVIQAMPTLIELMKDPSVVVRDTAAWTVGRICELLPEAAINDVYLAPLLQCLIEGLSAEPRVASNVCWAFSSLAEAAYEAADVADDQEEPATYCLSSSFELIVQKLLETTDRPDGHQNNLRSSAYESLMEIVKNSAKDCYPAVQKTTLVIMERLQQVLQMESHIQSTSDRIQFNDLQSLLCATLQNVLRKVQHQDALQISDVVMASLLRMFQSTAGSGGVQEDALMAVSTLVEVLGGEFLKYMEAFKPFLGIGLKNYAEYQVCLAAVGLVGDLCRALQSNIIPFCDEVMQLLLENLGNENVHRSVKPQILSVFGDIALAIGGEFKKYLEVVLNTLQQASQAQVDKSDYDMVDYLNELRESCLEAYTGIVQGLKGDQENVHPDVMLVQPRVEFILSFIDHIAGDEDHTDGVVACAAGLIGDLCTAFGKDVLKLVEARPMIHELLTEGRRSKTNKAKTLATWATKELRKLKNQA

SEQ ID NO: 4836 - DNA, 1705 bp, Homo sapiens
ccctcccctccgcccccttccccgtaggcagcccgcccgccagtccgcccgcaccgcctccttcccagcccctagcgctccggctgggtctctcccccgccccccaggctcccccggtcgctctcctccggcggtcgcccgcgctcggtggatgtggctggcagctgccgccccctccctcgctcgccgcctgctcttcctcggccctccgcctcctcccctcctccttctcgtcttcagccgctcctctcgccgccgcctccacagcctgggcctcgccgcgatgccggagaagaggcccttcgagcggctgcctgccgatgtctcccccatcaactacagcctttgcctcaagcccgacttgctggacttcaccttcgagggcaagctggaggccgccgcccaggtgaggcaggcgactaatcagattgtgatgaattgtgctgatattgatattattacagcttcatatgcaccagaaggagatgaagaaatacatgctacaggatttaactatcagaatgaagatgaaaaagtcaccttgtctttccctagtactctgcaaacaggtacgggaaccttaaagatagattttgttggagagctgaatgacaaaatgaaaggtttctatagaagtaaatatactaccccttctggagaggtgcgctatgctgctgtaacacagtttgaggctactgatgcccgaagggcttttccttgctgggatgagcctgctatcaaagcaacttttgatatctcattggttgttcctaaagacagagtagctttatcaaacatgaatgtaattgaccggaaaccataccctgatgatgaaaatttagtggaagtgaagtttgcccgcacacctgttatgtctacatatctggtggcatttgttgtgggtgaatatgactttgtagaaacaaggtcaaaagatggtgtgtgtgtccgtgtttacactcctgttggcaaagcagagcaaggaaaatttgcgttagaggttgctgctaaaaccttgcctttttataaggactacttcaatgttccttatcctctacctaaaattgatctcattgctattgcagactttgcagctggtgccatggagaactggggccttgttacttatagggagactgcattgcttattgatccaaaaaattcctgttcttcatcccgccagtgggttgctctggttgtgggacatgaactcgcccatcaatggtttggaaatcttgttactatggaatggtggactcatctttggttaaatgaaggttttgcatcctggattgaatatctgtgtgtagaccactgcttcccagagtatgatatttggactcagtttgtttctgctgattacacccgtgcccaggagcttgacgccttagataacagccatcctattgaagtcagtgtgggccatccatctgaggttgatgagatatttgatgctatatcatatagcaaaggtgcatctgtcatccgaatgctgcatgactacattggggataaggactttaagaaaggaatgaacatgtatttaaccaagttccaacaaaagaatgctgccacaggtaatctctaatagcttgagatagaaatggagagaaagtattgtcactctatccaggctgggacattttatttttgttctgaatacttaaggtcaggatccatgtaataaataaattagccttatttg

SEQ ID NO: 4837 - protein, 478 aa, Homo sapiens
MWLAAAAPSLARRLLFLGPPPPPLLLLVFSRSSRRRLHSLGLAAMPEKRPFERLPADVSPINCSLCLKPDLLDFTFEGKLEAAAQVRQATNQIVMNCADIDIITASYAPEGDEEIHATGFNYQNEDEKVTLSFPSTLQTGTGTLKIDFVGELNDKMKGFYRSKYTTPSGEVRYAAVTQFEATDARRAFPCWDERAIKATFDISLVVPKDRVALSNMNVIDRKPYPDDENLVEVKFARTPVTSTYLVAFVVGEYDFVETRSKDGVCVCVYTPVGKAEQGKFALEVAAKTLPFYKDYFNVPYPLPKIDLIAIADFAAGAMENWDLVTYRETALLIDPKNSCSSSRQWVALVVGHELAHQWFGNLVTMEWWTHLRLNEGFASWIEYLCVDHCFPEYDIWTQFVSADYTRAQELDALDNSHPIEVSVGHPSEVDEIFDAISYSKGASVIRMLHDYIGDKDFKKGMNMYLTKFQQKNAAAGNL

SEQ ID NO: 4838 - DNA, 2081 bp, Homo sapiens
cgcccgggcaggtctcccggaagtggccggtccagagctgtggggtgcctccgcgcggtctctggcggatcggggaatcggatcaaggcgagaggatccggcagggaaggagcttcggggccgggggttgggccgcacatttacgtgcgcgaagcggagtggaccgggagctggtgacgatggcggggccgcagcccctggcgctgcaactggaacagttgttgaacccgcgaccaagcgaggcggaccctgaagcggaccccgaggaagccactgctgccagggtgattgacaggtttgatgaaggggaagatggggaaggtgatttcctagtagtgggtagcattagaaaactggcatcagcctccctcttggacacggacaaaaggtattgcggcaaaaccacctctagaaaagcatggaatgaagaccattgggagcagactctgccaggatcgtctgatgaggaaatatctgatgaggaagggtctggagatgaagattcagagggactgggtctggaggaatatgatgaggacgacctgggtgctgctgaggaacaggagtgtggtgatcacagggagagcaagaagagcagaagccactctgcaaaaacaccgggcttcagtgtccagagtatcagtgactttgagaaatttaccaagggaatggatgaccttgggagcagtgaggaggaggaagacgaagagagtggcatggaagaaggggatgacgcggaagactcccaaggcgagagtgaggaagacagggctggagatagaaacagtgaggatgatggtgtggtgatgaccttctctagtgtcaaagtttctgaggaagtggagaaaggaagagccgtgaagaaccagatagcactgtgggaccagctcttggaaggaaggatcaaactacaaaaagctctgttgaccaccaaccagcttcctcaaccagatgttttcccattgttcaaggacaaaggtggcccagaattttccagtgccctgaaaaatagtcacaaggcacttaaagcattgttgaggtcattggtaggtcttcaggaagagttgcttttccagtacccagacactagatatctagtagatgggacaaagcccaatgcgggaagtgaggagatttctagtgaagatgatgagctggtagaagagaagaagcagcaacgaagaagggtccctgcaaagaggaagctggagatggaggactatcccagcttcatggcaaagcgctttgccgactttacagtctacaggaaccgcacacttcagaaatggcacgataagaccaaactggcttctggaaaactggggaagggttttggtgcctttgaacgctcaatcttgactcagatcgaccatattctgatggacaaagagagattacttcgaaggacacagaccaagcgctctgtctatcgagttcttggcaaacctgagccagcagctcagcctgtcccagagagtttgccaggggaaccggagatccttcctcaagcccctgctaatgctcatctgaaggacttggatgaagaaatctttgatgatgatgacttttaccaccagctccttcgagaactcatagaacggaagaccagctccttggatcccaacgatcaggtggccatgggaaggcagtggcttgcaatccagaagttacgaagcaaaatccacaaaaaagtagataggaaagccagcaaaggcaggaaacttcggtttcatgtccttagcaagctactgagtttcatggcacctattgaccatactacaatgaatgatgatgccaggacagaactgtaccgctctctttttggccagctccaccctcccgacgaaggccacggggattgacatcgcccacctccgacacccagtgggcgccttggctggtgcggctgctggtccagatggaggaaaccagtgactttatggggctgagctagtagggaagcccctggaaagatgctgcgttccgaacctgtgcctaatacacgcaagggcgctgtcccgcccaaccccgcctttaaacgccacaaataaagagcattgttaccgccaaaaaaaaaaaaa

SEQ ID NO: 4839 - protein, 560 aa, Homo sapiens
MAGPQPLALQLEQLLNPRPSEADPEADPEEATAARVIDRFDEGEDGEGDFLVVGSIRKLASASLLDTDKRYCGKTTSRKAWNEDHWEQTLPGSSDEEISDEEGSGDEDSEGLGLEEYDEDDLGAAEEQECGDHRESKKSRSHSAKTPGFSVQSISDFEKFTKGMDDLGSSEEEEDEESGMEEGDDAEDSQGESEEDRAGDRNSEDDGVVMTFSSVKVSEEVEKGRAVKNQIALWDQLLEGRIKLQKALLTTNQLPQPDVFPLFKDKGGPEFSSALKNSHKALKALLRSLVGLQEELLFQYPDTRYLVDGTKPNAGSEEISSEDDELVEEKKQQRRRVPAKRKLEMEDYPSFMAKRFADFTVYRNRTLQKWHDKTKLASGKLGKGFGAFERSILTQIDHILMDKERLLRRTQTKRSVYRVLGKPEPAAQPVPESLPGEPEILPQAPANAHLKDLDEEIFDDDDFYHQLLRELIERKTSSLDPNDQVAMGRQWLAIQKLRSKIHKKVDRKASKGRKLRFHVLSKLLSFMAPIDHTTMNDDARTELYRSLFGQLHPPDEGHGD

SEQ ID NO: 4840 - DNA, 3185 bp, Homo sapiens
cttcccgccgcctgacctggcccgcccgcctttccagtctggccgggcggggcctgaagcacggcgctcgggcgtgggaccgtgttcacaccctttccagaaattcttggctggtaaccgcgaaaccgactggagcaggagctgggagaactggagaaaactgctctaatctcacttgactccagctaggagctgatgctgcatcgtaataacatttgcagagcgctttcacaggcgctggagtgacttgtctgagattcctccagaactgagccctttgttggaaccataccccagcccatggtcccatgactaggtggatagtactccttgtacctcctgcaacccagaaccctggctgaccactttgaaggaggatgctccagcaggtcaatggccacaatccggggtctgatggccaagccagggagtacctcagagaagacctgcaggagttcctgggtggggaggtcctgctgtacaaactggatgacctcaccagggtgaatcctgtgacactagagacagtcctgaggtgcctgcaggcccggtacatggcagacacattctacaccaatgctggctgcaccctggtagccttgaaccccttcaagcctgttcctcagctctactcgcccgagctaatgagagagtaccatgctgcgcctcagccccagaaactgaagccccatgtgttcactgtgggtgaacagacctacaggaatgtcaagagcctgattgaaccagtcaaccagtctattgttgtcagtggagagagtggtgctggaaagacatggacgtctcgctgcctaatgaagttctatgctgtggtggccacctcacctgcatcttgggagagccacaagattgcagagaggatagaacagaggatcctgaactccaaccctgtcatggaagcttttgggaatgcgtgtacactgaggaataacaacagcagtcgctttgggaagttcatccagctccagctgaacagggctcagcaaatgactggagccgcagtccagacctacctcctagagaaaactcgagtggcctgccaggcttccagtgagaggaacttccacatcttctatcagatttgcaaaggagccagtgaggacgagaggctccagtggcaccttcctgagggagctgccttctcctggctgcccaacccagagaggagcttagaagaggattgttttgaggtgaccagagaggccatgctccatttgggcattgacacccctacccagaacaacatctttaaggtcctagctggactgctgcaccttggcaatatccagtttgctgcctccgaggatgaagcccagccctgccagccgatggatgatgccaagtactctgtcaggacggcagcctcgctgctggggctcccagaggacgtgctgctggagatggtgcagattagaaccatcagggcaggcagacagcagcaggtgttccggaagccctgcgcccgagccgagtgtgacacccgtagagactgcctggccaaactgatctatgcgcggttgtttgactggctggtatcagtgatcaacagcagcatctgtgcagacaccgactcgtggaccactttcataggcctgctggatgtgtatggatttgaatcatttcctgacaacagtctggaacagttgtgcatcaactacgccaatgagaagctgcagctggaggcctgtggcctcgtggagaccatccatatcagtgctgctggcttccccatccgggtctctcaccgaaactttgtagaacgatacaagttactaagaaggcttcatccttgcacatcctctggccccgacagcccatatcctgccaaagggctccctgaatggtgtccacacagcgaggaagccacgcttgaacctctcatccaggacattctccacactctgccggtcctaactcaggcagcagccataactggtgactcggctgaggccatgccagcccccatgcactgtggcaggaccaaggtgttcatgactgactctatgctggagcttctggaatgtgggcgtgcccgggtgctggagcagtgtgcccgctgcatccagggtggctggaggcgacaccggcaccgagagcaggagcggcagtggcgggccgtcatgctcatccaggcagccattcgttcctggttaactcggaaacacatccagaggctgcatgcagctgccacagtcatcaagcgtgcatggcagaagtggagaatcagaatggcctgccttgctgctaaagagctggatggtgtggaagaaaaacacttctctcaagctccctgttccctgagcacctcgccgctgcagaccaggctcctggaggcaataatccgcctctggcccctgggactggtcctggccaatacggctatgggtgtaggcagctttcagaggaaattagtggtctgggcttgcctccagctccccaggggcagccccagtagctacactgtccagacagcacaagaccaggctggtgtcacgtccatccgagcgctgcctcagggatcgataaagtttcactgcagaaagtctccactgcggtatgctgacatctgccctgaaccttcaccctacagcattacaggctttaatcagattctgctggaaagacacaggctgatccacgtgacctcttctgccttcactgggctggggtgatccttggtgcctttgtttccacaaggccttttcctgccccctgccttgccaaagacatttaatcagcacacagctgccagactattcccacagtgctccaaatgcacatgaacaacagtgacggctccagccttcgacccagagccccgtgcccagtgcgtcagtgggcctggggttccaggctacatcaagcactgatggtgtcagggctggtagttaccaaatcagggttaagaaacatcagggccacatttcactaccttcacagatcaaactcagcagcagtcatgactgtctgtcactacactggggatcccaattccacataagcacttttggaagaaaacagccaaagttggcctaaaattggcgctggaatttgggctgggaaaaatcttgtggttatttcctttaaaaaggaacaaaactttagtatttaattagttgatttatttaatgtaatttcaaacaattaaattatgaataatgcaatgt

SEQ ID NO: 4841 - DNA, 1110 bp, Homo sapiens
atggacatggcggatgagccactcaatggaagccacacatggctatccattccatttgacctcaatggctctgtggtgtcaaccaacacctcaaaccagacagagccgtactatgacctgacaagcaatgcagtcctcacattcatctattttgtggtctgcatcattgggttgtgtggcaacacacttgtcatttatgtcatcctccgctatgccaagatgaagaccatcaccaacatttacatcctcaacctggccatcgcagatgagctcttcatgctgggtctgcctttcttggctatgcaggtggctctggtccactggccctttggcaaggccatttgccgggtggtcatgactgtggatggcatcaatcagttcaccagcatcttctgcctgacagtcatgagcatcgaccgatacctggctgtggtccaccccatcaagtcggccaagtggaggagaccccggacggccaagatgatcaccatggctgtgtggggagtctctctgctggtcatcttgcccatcatgatatatgctgggctccggagcaaccagtgggggagaagcagctgcaccatcaactggccaggtgaatctggggcttggtacacagggttcatcatctacactttcattctggggttcctggtacccctcaccatcatctgtctttgctacctgttcattatcatcaaggtgaagtcctctggaatccgagtgggctcctctaagaggaagaagtctgagaagaaggtcacccgaatggtgtccatcgtggtggctgtcttcatcttctgctggcttcccttctacatattcaacgtttcttccgtctccatggccatcagccccaccccagcccttaaaggcatgtttgactttgtggtggtcctcacctatgctaacagctgtgccaaccctatcctatatgccttcttgtctgacaacttcaagaagagcttccagaatgtcctctgcttggtcaaggtgagcggcacagatgatggggagcggagtgacagtaagcaggacaaatcccggctgaatgagaccacggagacccagaggaccctcctcaatggagacctccaaaccagtatctga

SEQ ID NO: 4842 - protein, 369 aa, Homo sapiens
MDMADEPLNGSHTWLSIPFDLNGSVVSTNTSNQTEPYYDLTSNAVLTFIYFVVCIIGLCGNTLVIYVILRYAKMKTITNIYILNLAIADELFMLGLPFLAMQVALVHWPFGKAICRVVMTVDGINQFTSIFCLTVMSIDRYLAVVHPIKSAKWRRPRTAKMITMAVWGVSLLVILPIMIYAGLRSNQWGRSSCTINWPGESGAWYTGFIIYTFILGFLVPLTIICLCYLFIIIKVKSSGIRVGSSKRKKSEKKVTRMVSIVVAVFIFCWLPFYIFNVSSVSMAISPTPALKGMFDFVVVLTYANSCANPILYAFLSDNFKKSFQNVLCLVKVSGTDDGERSDSKQDKSRLNETTETQRTLLNGDLQTSI

SEQ ID NO: 4843 - DNA, 1932 bp, Homo sapiens
cagcgagccgcagcgcaatcccggcgctcgcccaaggaccctggaagctaccgttaccccgccggcagcgtgggcgccatgagcagctcgggactgaattcggagaaggtagctgctctgatacagaaactgaattccgacccccagttcgtacttgcccagaatgtcgggaccacccacgacctgctggacatctgtctgaagcgggccacggtgcagcgcgcgcagcatgtgttccagcacgccgtgccccaggagggcaagccaatcaccaaccagaagagctcagggcgatgctggatcttttcttgtctgaatgttatgaggcttccattcatgaaaaagttaaatattgaagaatttgagtttagccaatcttacctgtttttttgggacaaggttgaacgctgttatttcttcttgagtgcttttgtggacacagcccagagaaaggagcctgaggatgggaggctggtgcagtttttgcttatgaaccctgcaaatgatggtggccaatgggatatgcttgttaatattgttgaaaaatatggtgttatccctaagaaatgcttccctgaatcttatacaacagaggcaaccagaaggatgaatgatattctgaatcacaagatgagagaattctgtatacgactgcggaacctggtacacagtggagcaaccaaaggagaaatctcggccacacaggacgtcatgatggaggagatattccgagtggtgtgcatctgtttgggtaatccaccagagacattcacctgggaatatcgagacaaagataaaaattatcagaaaattggccccataacacccttggagttttacagggaacatgtcaagccactcttcaatatggaagataagatttgtttagtgaatgaccctaggccccagcacaagtacaacaaactttacacagtggaatacttaagcaatatggttggtgggagaaaaactctatacaacaaccagcccattgacttcctgaaaaagatggttgctgcctccatcaaagatggagaggctgtgtggtttggctgtgatgttggaaaacacttcaatagcaagctgggcctcagtgacatgaatctctatgaccatgagttagtgtttggtgtctccttgaagaacatgaataaagcggagaggctgacttttggtgagtcacttatgacccacgccatgaccttcactgctgtctcagagaaggatgatcaggatggtgctttcacaaaatggagagtggagaattcatggggtgaagaccatggccacaaaggttacctgtgcatgacagatgagtggttctctgagtatgtctacgaagtggtggtggacaggaagcatgtccctgaagaggtgctagctgtgttagagcaggaacccattatcctgccagcatgggaccccatgggagctttggctgagtgatactgccctccagctctttcctccttccatggaacctgacgtagctgcaaaggacagatccagggactgaagccaaagttatgcaagggactgtgtgttgccacaggacacagtcagatttccagtctccaccaggaacctcttcagaaagtgtgctttatgctgaaacagaatactgttaaaggaaaaaaaagaggggggaagatcaggtcatactatctactctcctcatctctaacagctcaggatctcttagcattttaattagatgtaattgtttgtctttaactgtcaaaaagtttggttctgtgtctgtgttttaataagacgagaggacgagcgattgaggtgtatggagagaaaacagacctaatgctccttgttcctagagtagagtggagggagggtggcctaagagttgagctctcggaactgcatgctgctggacagtatcactgtctttcctagatggcagtcactgaattc

SEQ ID NO: 4844 - protein, 455 aa, Homo sapiens
MSSSGLNSEKVAALIQKLNSDPQFVLAQNVGTTHDLLDICLKRATVQRAQHVFQHAVPQEGKPITNQKSSGRCWIFSCLNVMRLPFMKKLNIEEFEFSQSYLFFWDKVERCYFFLSAFVDTAQRKEPEDGRLVQFLLMNPANDGGQWDMLVNIVEKYGVIPKKCFPESYTTEATRRMNDILNHKMREFCIRLRNLVHSGATKGEISATQDVMMEEIFRVVCICLGNPPETFTWEYRDKDKNYQKIGPITPLEFYREHVKPLFNMEDKICLVNDPRPQHKYNKLYTVEYLSNMVGGRKTLYNNQPIDFLKKMVAASIKDGEAVWFGCDVGKHFNSKLGLSDMNLYDHELVFGVSLKNMNKAERLTFGESLMTHAMTFTAVSEKDDQDGAFTKWRVENSWGEDHGHKGYLCMTDEWFSEYVYEVVVDRKHVPEEVLAVLEQEPIILPAWDPMGALAE

SEQ ID NO: 4845 - DNA, 2178 bp, Homo sapiens
gtagtctgagcgctacccggttgctgctgcccaaggaccgcggagtcggacgcaggcagaccatgtggaccctggtgagctgggtggccttaacagcagggctggtggctggaacgcggtgcccagatggtcagttctgccctgtggcctgctgcctggaccccggaggagccagctacagctgctgccgtccccttctggacaaatggcccacaacactgagcaggcatctgggtggcccctgccaggttgatgcccactgctctgccggccactcctgcatctttaccgtctcagggacttccagttgctgccccttcccagaggccgtggcatgcggggatggccatcactgctgcccacggggcttccactgcagtgcagacgggcgatcctgcttccaaagatcaggtaacaactccgtgggtgccatccagtgccctgatagtcagttcgaatgcccggacttctccacgtgctgtgttatggtcgatggctcctgggggtgctgccccatgccccaggcttcctgctgtgaagacagggtgcactgctgtccgcacggtgccttctgcgacctggttcacacccgctgcatcacacccacgggcacccaccccctggcaaagaagctccctgcccagaggactaacagggcagtggccttgtccagctcggtcatgtgtccggacgcacggtcccggtgccctgatggttctacctgctgtgagctgcccagtgggaagtatggctgctgcccaatgcccaacgccacctgctgctccgatcacctgcactgctgcccccaagacactgtgtgtgacctgatccagagtaagtgcctctccaaggagaacgctaccacggacctcctcactaagctgcctgcgcacacagtgggggatgtgaaatgtgacatggaggtgagctgcccagatggctatacctgctgccgtctacagtcgggggcctggggctgctgcccttttacccaggctgtgtgctgtgaggaccacatacactgctgtcccgcggggtttacgtgtgacacgcagaagggtacctgtgaacaggggccccaccaggtgccctggatggagaaggccccagctcacctcagcctgccagacccacaagccttgaagagagatgtcccctgtgataatgtcagcagctgtccctcctccgatacctgctgccaactcacgtctggggagtggggctgctgtccaatcccagaggctgtctgctgctcggaccaccagcactgctgcccccagggctacacgtgtgtagctgaggggcagtgtcagcgaggaagcgagatcgtggctggactggagaagatgcctgcccgccgggcttccttatcccaccccagagacatcggctgtgaccagcacaccagctgcccggtggggcagacctgctgcccgagcctgggtgggagctgggcctgctgccagttgccccatgctgtgtgctgcgaggatcgccagcactgctgcccggctggctacacctgcaacgtgaaggctcgatcctgcgagaaggaagtggtctctgcccagcctgccaccttcctggcccgtagccctcacgtgggtgtgaaggacgtggagtgtggggaaggacacttctgccatgataaccagacctgctgccgagacaaccgacagggctgggcctgctgtccctaccgccagggcgtctgttgtgctgatcggcgccactgctgtcctgctggcttccgctgcgcagccaggggtaccaagtgtttgcgcagggaggccccgcgctgggacgcccctttgagggacccagccttgagacagctgctgtgagggacagtactgaagactctgcagccctcgggaccccactcggagggtgccctctgctcaggcctccctagcacctccccctaaccaaattctccctggaccccattctgagctccccatcaccatgggaggtggggcctcaatctaaggccttccctgtcagaagggggttgtggcaaaagccacattacaagctgccatcccctccccgtttcagtggaccctgtggccaggtgcttttccctatccacaggggtgtttgtgtgtgtgcgcgtgtgcgtttcaataaagtttgtacactttcaaaaaaaaaaaaaaaaaaaaaaaaaaaaaa

SEQ ID NO: 4846 - protein, 593 aa, Homo sapiens
MWTLVSWVALTAGLVAGTRCPDGQFCPVACCLDPGGASYSCCRPLLDKWPTTLSRHLGGPCQVDAHCSAGHSCIFTVSGTSSCCPFPEAVACGDGHHCCPRGFHCSADGRSCFQRSGNNSVGAIQCPDSQFECPDFSTCCVMVDGSWGCCPMPQASCCEDRVHCCPHGAFCDLVHTRCITPTGTHPLAKKLPAQRTNRAVALSSSVMCPDARSRCPDGSTCCELPSGKYGCCPMPNATCCSDHLHCCPQDTVCDLIQSKCLSKENATTDLLTKLPAHTVGDVKCDMEVSCPDGYTCCRLQSGAWGCCPFTQAVCCEDHIHCCPAGFTCDTQKGTCEQGPHQVPWMEKAPAHLSLPDPQALKRDVPCDNVSSCPSSDTCCQLTSGEWGCCPIPEAVCCSDHQHCCPQGYTCVAEGQCQRGSEIVAGLEKMPARRASLSHPRDIGCDQHTSCPVGQTCCPSLGGSWACCQLPHAVCCEDRQHCCPAGYTCNVKARSCEKEVVSAQPATFLARSPHVGVKDVECGEGHFCHDNQTCCRDNRQGWACCPYRQGVCCADRRHCCPAGFRCAARGTKCLRREAPRWDAPLRDPALRQLL

SEQ ID NO: 4847 - DNA, 1556 bp, Homo sapiens
ggctaggtgcgctgcgagcgcgcggagccacgagggcggacggacgtaatgggcccgcctggccctgggcgccgcgccgcacgagcaccagcctagagccaggactgaagcttcaagatggctgaccaggaccctgcgggcatcagccccctccagcaaatggtggcctcaggcaccggggctgtggttacctctctcttcatgacacccctggacgtggtgaaggttcgcctgcagtctcagcggccctccatggccagcgagctgatgccttcctccagactgtggagcctctcctataccaaatggaagtgcctcctgtattgcaatggtgtcctggagcctctgtacctgtgcccaaatggtgcccgctgtgccacctggtttcaagaccctacccgcttcactggcaccatggatgccttcgtgaagatcgtgaggcacgagggcaccaggaccctctggagcggcctccccgccaccctggtgatgactgtgccagctaccgccatctacttcactgcctatgaccaactgaaggccttcctgtgtggtcgagccctgacctctgacctctacgcacccatggtggctggcgcgctggcccgcctgggcaccgtgactgtgatcagccccctggagcttatgcggacaaagctgcaggctcagcatgtgtcgtaccgggagctgggtgcctgtgttcgaactgcagtggctcagggtggctggcgctcactgtggctgggctggggccccactgcccttcgagatgtgcccttctcagccctgtactggttcaactatgagctggtgaagagctggctcaatgggttcaggccgaaggaccagacttctgtgggcatgagctttgtggctggtggcatctcagggacggtggctgcagtgctgactctaccctttgacgtggtaaagacccaacgccaggtcgctctgggagcgatggaggctgtgagagtgaaccccctgcatgtggactccacctggctgctgctgcggaggatccgggccgagtcgggcaccaagggactctttgcaggcttccttcctcggatcatcaaggctgccccctcctgtgccatcatgatcagcacctatgagttcggcaaaagcttcttccagaggctgaaccaggaccggcttctgggcggctgaaaggggcaaggaggcaaggaccccgtctctcccacggatggggagagggcaggaggagacccagccaagtgccttttcctcagcactgagggagggggcttgtttcccttccctcccggcgacaagctccagggcagggctgtccctctgggcggcccagcacttcctcagacacaacttcttcctgctgctccagtcgtggggatcatcacttacccaccccccaagttcaagaccaaatcttccagctgcccccttcgtgtttccctgtgtttgctgtagctgggcatgtctccaggaaccaagaagccctcagcctggtgtagtctccctgacccttgttaattccttaagtctaaagatgatgaacttcaaaaaaaaaa

SEQ ID NO: 4848 - protein, 351 aa, Homo sapiens
MADQDPAGISPLQQMVASGTGAVVTSLFMTPLDVVKVRLQSQRPSMASELMPSSRLWSLSYTKWKCLLYCNGVLEPLYLCPNGARCATWFQDPTRFTGTMDAFVKIVRHEGTRTLWSGLPATLVMTVPATAIYFTAYDQLKAFLCGRALTSDLYAPMVAGALARLGTVTVISPLELMRTKLQAQHVSYRELGACVRTAVAQGGWRSLWLGWGPTALRDVPFSALYWFNYELVKSWLNGFRPKDQTSVGMSFVAGGISGTVAAVLTLPFDVVKTQRQVALGAMEAVRVNPLHVDSTWLLLRRIRAESGTKGLFAGFLPRIIKAAPSCAIMISTYEFGKSFFQRLNQDRLLGG

SEQ ID NO: 4849 - DNA, 2538 bp, Homo sapiens
ggagccgtcaccccgggcggggacccagcgcaggcaactccgcgcggcggcccggccgagggagggagcgagcgggcgggcgggcaagccagacagctgggccggagcagccgcgggcgcccgaggggccgagcgagattgtaaaccatggctgtgtggatacaagctcagcagctccaaggagaagcccttcatcagatgcaagcgttatatggccagcattttcccattgaggtgcggcattatttatcccagtggattgaaagccaagcatgggactcagtagatcttgataatccacaggagaacattaaggccacccagctcctggagggcctggtgcaggagctgcagaagaaggcagagcaccaggtgggggaagatgggtttttactgaagatcaagctggggcactatgccacacagctccagaacacgtatgaccgctgccccatggagctggtccgctgcatccgccatatattgtacaatgaacagaggttggtccgagaagccaacaatggtagctctccagctggaagccttgctgatgccatgtcccagaaacacctccagatcaaccagacgtttgaggagctgcgactggtcacgcaggacacagagaatgagttaaaaaagctgcagcagactcaggagtacttcatcatccagtaccaggagagcctgaggatccaagctcagtttggcccgctggcccagctgagcccccaggagcgtctgagccgggagacggccctccagcagaagcaggtgtctctggaggcctggttgcagcgtgaggcacagacactgcagcagtaccgcgtggagctggccgagaagcaccagaagaccctgcagctgctgcggaagcagcagaccatcatcctggatgacgagctgatccagtggaagcggcggcagcagctggccgggaacggcgggccccccgagggcagcctggacgtgctacagtcctggtgtgagaagttggccgagatcatctggcagaaccggcagcagatccgcagggctgagcacctctgccagcagctgcccatccccggcccagtggaggagatgctggccgaggtcaacgccaccatcacggacattatctcagccctggtgaccagcacattcatcattgagaagcagcctcctcaggtcctgaagacccagaccaagtttgcagccaccgtacgcctgctggtgggcgggaagctgaacgtgcacatgaatcccccccaggtgaaggccaccatcatcagtgagcagcaggccaagtctctgcttaaaaatgagaacacccgcaatggtgagatcctgaacaactgctgcgtgatggagtaccaccaagccacgggcaccctcaggcagggtgccatttgccgtgcctgacaaagtgctgtggccgcagctgtgtgaggcgctcaacatgaaattcaaggccgaagtgcagagcaaccggggcctgaccaaggagaacctcgtgttcctggcgcagaaactgttcaacaacagcagcagccacctggaggactacagtggcctgtccgtgtcctggtcccagttcaacagggagaatttaccaggacggaattacactttctggcaatggtttgacggtgtgatggaagtgttaaaaaaacatctcaagcctcattggaatgatggggccattttggggtttgtaaacaagcaacaggcccatgacctactcattaacaagccagatgggaccttcctcctgagattcagtgactcagaaattggcggcatcaccattgcttggaagtttgattctcaggaaagaatgttttggaatctgatgccttttaccaccagagacttctccattcggtccctagccgaccgcttgggagacttgaattaccttatctacgtgtttcctgatcggccaaaagatgaagtatactccaaatactacacaccagttccctgcgagtctgctactgctaaagctgttgatggatacgtgaagccacagatcaagcaagtggtccctgagtttgtgaacgcatctgcagatgccgggggcggcagcgccacgtacatggaccaggccccctccccagctgtgtgtccccaggctcactataacatgtacccacagaaccctgactcagtccttgacaccgatggggacttcgatctggaggacacaatggacgtagcgcggcgtgtggaggagctcctgggccggccaatggacagtcagtggatcccgcacgcacaatcgtgaccccgcgacctctccatcttcagcttcttcatcttcaccagaggaatcactcttgtggatgttttaattccatgaatcgcttctcttttgaaacaatactcataatgtgaagtgttaatactagttgtgaccttagtgtttctgtgcatggtggcaccagcgaagggagtgcgagtatgtgtttgtgtgtgtgtgtgtgtgtgtgtgtgtgtgcgtgtttgcacgttatggtgtttctccctctcactgtctgagagtttagttgtagcaga

SEQ ID NO: 4850 - DNA, 3753 bp, Homo sapiens
gcggagccggaggagccgccgcaaagatggaggagccgtcgaggaggtgctgccgccgctgccgccgccgctgctgccgccgccgcccgcgaagccggagctcgagccgcagcggggatgccgttctgagtgcctgactgcctcgccccgaaggatggcctcggatgggcattagaggcacggcggccccgggctcccgtcccgtccgtctgtctgttatcgtctgtctctcttgacatcaccgcagctccaccccctcccgtcccagcccccaacgccagcttcctgcaggcccagagccggcatgaactctcccaacgagtcggatgggatgtcaggtcgggaaccatccttggaaatcctgccgcggacttctctgcacagcatccctgtgacagtggaggtgaagccggtgctgccaagagccatgcccagttccatggggggtgggggtggaggcagccccagccctgtggagctacggggggctctggtgggctctgtggaccccacactgcgggagcagcaactgcagcaggagctcctggcgctcaagcagcagcagcagctgcagaagcagctcctgttcgctgagttccagaaacagcatgaccacctgacaaggcagcatgaggtccagctgcagaagcacctcaagcagcagcaggagatgctggcagccaagcagcagcaggagatgctggcagccaagcggcagcaggagctggagcagcagcggcagcgggagcagcagcggcaggaagagctggagaagcagcggctggagcagcagctgctcatcctgcggaacaaggagaagagcaaagagagtgccattgccagcactgaggtaaagctgaggctccaggaattcctcttgtcgaagtcaaaggagcccacaccaggcggcctcaaccattccctcccacagcaccccaaatgctggggagcccaccatgcttctttggaccagagttcccctccccagagcggcccccctgggacgcctccctcctacaaactgcctttgcctgggccctacgacagtcgagacgacttccccctccgcaaaacagcctctgaacccaacttgaaagtgcgttcaaggctaaaacagaaggtggctgagcggagaagcagtcccctcctgcgtcgcaaggatgggactgttattagcacctttaagaagagagctgttgagatcacaggtgccgggcctggggcgtcgtccgtgtgtaacagcgcacccggctccggccccagctctcccaacagctcccacagcaccatcgctgagaatggctttactggctcagtccccaacatccccactgagatgctccctcagcaccgagccctccctctggacagctcccccaaccagttcagcctctacacgtctccttctctgcccaacatctccctagggctgcaggccacggtcactgtcaccaactcacacctcactgcctccccgaagctgtcgacacagcaggaggccgagaggcaggccctccagtccctgcggcagggtggcacgctgaccggcaagttcatgagcacatcctctattcctggctgcctgctgggcgtggcactggagggcgacgggagcccccacgggcatgcctccctgctgcagcatgtgctgttgctggagcaggcccggcagcagagcaccctcattgctgtgccactccacgggcagtccccactagtgacgggtgaacgtgtggccaccagcatgcggacggtaggcaagctcccgcggcatcggcccctgagccgcactcagtcctcaccgctgccgcagagtccccaggccctgcagcagctggtcatgcaacaacagcaccagcagttcctggagaagcagaagcagcagcagctacagctgggcaagatcctcaccaagacaggggagctgcccaggcagcccaccacccaccctgaggagacagaggaggagctgacggagcagcaggaggtcttgctgggggagggagccctgaccatgccccgggagggctccacagagagtgagagcacacaggaagacctggaggaggaggacgaggaagaggatggggaggaggaggaggattgcatccaggttaaggacgaggagggcgagagtggtgctgaggaggggcccgacttggaggagcctggtgctggatacaaaaaactgttctcagatgcccagccgctgcagcctttgcaggtgtaccaggcgcccctcagcctggccactgtgccccaccaggccctgggccgtacccagtcctcccctgctgcccctgggggcatgaagagccccccagaccagcccgtcaagcacctcttcaccacaggtgtggtctacgacacgttcatgctaaagcaccagtgcatgtgcgggaacacacacgtgcaccctgagcatgctggccggatccagagcatctggtcccggctgcaggagacaggcctgcttagcaagtgcgagcggatccgaggtcgcaaagccacgctagatgagatccagacagtgcactctgaataccacaccctgctctatgggaccagtcccctcaaccggcagaagctagacagcaagaagttgctcggccccatcagccagaagatgtatgctgtgctgccttgtgggggcatcggggtggacagtgacaccgtgtggaatgagatgcactcctccagtgctgtgcgcatggcagtgggctgcctgctggagctggccttcaaggtggctgcaggagagctcaagaatggatttgccatcatccggcccccaggacaccacgccgaggaatccacagccatgggattctgcttcttcaactctgtagccatcaccgcaaaactcctacagcagaagttgaacgtgggcaaggtcctcatcgtggactgggacattcaccatggcaatggcacccagcaggcgttctataatgacccctctgtgctctacatctctctgcatcgctatgacaacgggaacttctttccaggctctggggctcctgaagaggttggtggaggaccaggcgtggggtacaatgtgaacgtggcatggacaggaggtgtggacccccccattggagacgtggagtaccttacagccttcaggacagtggtgatgcccattgcccacgagttctcacctgatgtggtcctagtctccgccgggtttgatgctgttgaaggacatctgtctcctctgggtggctactctgtcaccgccagatgttttggccacttgaccaggcagctgatgaccctggcagggggccgggtggtgctggccctggagggaggccatgacttgaccgccatctgtgatgcctctgaggcttgtgtctcggctctgctcagtgtagagctgcagcccttggatgaggcagtcttgcagcaaaagcccaacatcaacgcagtggccacgctagagaaagtcatcgagatccagagcaaacactggagctgtgtgcagaagttcgccgctggtctgggccggtccctgcgagaggcccaagcaggtgagaccgaggaggccgagactgtgagcgccatggccttgctgtcggtgggggccgagcaggcccaggctgcggcagcccgggaacacagccccaggccggcagaggagcccatggagcaggagcctgccctgtgacgccccggcccccatccctctgggcttcaccattgtgattttgtttattttttctattaaaaacaaaaagtcacacattc

SEQ ID NO: 4851 - protein, 1122 aa, Homo sapiens
MNSPNESDGMSGREPSLEILPRTSLHSIPVTVEVKPVLPRAMPSSMGGGGGGSPSPVELRGALVGSVDPTLREQQLQQELLALKQQQQLQKQLLFAEFQKQHDHLTRQHEVQLQKHLKQQQEMLAAKQQQEMLAAKRQQELEQQRQREQQRQEELEKQRLEQQLLILRNKEKSKESAIASTEVKLRLQEFLLSKSKEPTPGGLNHSLPQHPKCWGAHHASLDQSSPPQSGPPGTPPSYKLPLPGPYDSRDDFPLRKTASEPNLKVRSRLKQKVAERRSSPLLRRKDGTVISTFKKRAVEITGAGPGASSVCNSAPGSGPSSPNSSHSTIAENGFTGSVPNIPTEMLPQHRALPLDSSPNQFSLYTSPSLPNISLGLQATVTVTNSHLTASPKLSTQQEAERQALQSLRQGGTLTGKFMSTSSIPGCLLGVALEGDGSPHGHASLLQHVLLLEQARQQSTLIAVPLHGQSPLVTGERVATSMRTVGKLPRHRPLSRTQSSPLPQSPQALQQLVMQQQHQQFLEKQKQQQLQLGKILTKTGELPRQPTTHPEETEEELTEQQEVLLGEGALTMPREGSTESESTQEDLEEEDEEEDGEEEEDCIQVKDEEGESGAEEGPDLEEPGAGYKKLFSDAQPLQPLQVYQAPLSLATVPHQALGRTQSSPAAPGGMKSPPDQPVKHLFTTGVVYDTFMLKHQCMCGNTHVHPEHAGRIQSIWSRLQETGLLSKCERIRGRKATLDEIQTVHSEYHTLLYGTSPLNRQKLDSKKLLGPISQKMYAVLPCGGIGVDSDTVWNEMHSSSAVRMAVGCLLELAFKVAAGELKNGFAIIRPPGHHAEESTAMGFCFFNSVAITAKLLQQKLNVGKVLIVDWDIHHGNGTQQAFYNDPSVLYISLHRYDNGNFFPGSGAPEEVGGGPGVGYNVNVAWTGGVDPPIGDVEYLTAFRTVVMPIAHEFSPDVVLVSAGFDAVEGHLSPLGGYSVTARCFGHLTRQLMTLAGGRVVLALEGGHDLTAICDASEACVSALLSVELQPLDEAVLQQKPNINAVATLEKVIEIQSKHWSCVQKFAAGLGRSLREAQAGETEEAETVSAMALLSVGAEQAQAAAAREHSPRPAEEPMEQEPAL

SEQ ID NO: 4852 - DNA, 1555 bp, Homo sapiens
cggaggagagcgcaggaggaaacagtaccggctggaggccggtcttgcaggagcgggggactgctgggggcggggcttggtggtgactgctggcggggcggggcctggggctcagaggggtgggctttggagatcagagggtcgacgctgcttcgttgcctggactctggtttccgccctggagcaagccggggcctggtcggcagctgggccgccatggagtccacgctgggcgcgggcatcgtgatagccgaggcgctacagaaccagctagcctggctggagaacgtgtggctctggatcacctttctgggcgatcccaagatcctctttctgttctacttccccgcggcctactacgcctcccgccgtgtgggcatcgcggtgctctggatcagcctcatcaccgagtggctcaacctcatcttcaagtggtttctttttggagacaggcccttttggtgggtccatgagtctggttactacagccaggctccagcccaggttcaccagttcccctcttcttgtgagactggtccaggcagcccttctggacactgcatgatcacaggagcagccctctggcccataatgacggccctgtcttcgcaggtggccactcgggcccgcagccgctgggtaagggtgatgcctagcctggcttattgcaccttccttttggcggttggcttgtcgcgaatcttcatcttagcacatttccctcaccaggtgctggctggcctaataactggcgctgtcctgggctggctgatgactccccgagtgcctatggagcgggagctaagcttctatgggttgactgcactggccctcatgctaggcaccagcctcatctattggaccctctttacactgggcctggatctttcttggtccatcagcctagccttcaagtggtgtgagcggcctgagtggatacacgtggatagccggccctttgcctccctgagccgtgactcaggggctgccctgggcctgggcattgccttgcactctccctgctatgcccaggtgcgtcgggcacagctgggaaatggccagaagatagcctgccttgtgctggccatggggctgctgggccccctggactggctgggccacccccctcagatcagcctcttctacattttcaatttcctcaagtacaccctctggccatgcctagtcctggccctcgtgccctgggcagtgcacatgttcagtgcccaggaagcaccgcccatccactcttcctgacttcttgtgtgcctccctttcctttccctcccacaaagccaacactctgtgaccaccacactccaggaggcagccccatccccttccagcccctaagtaggccctcccctccctaaatctgcttccgcaccacctggtcttagccccaaagatgggccttctctctcccagataagttggtcctccctctgcctttcctctcaagcccccaaagagcaaaggcaacagcaagaccagcgggttcttgcaacactgtgaggggcagccagggcggccccaataaagcccttgaatactt

SEQ ID NO: 4853 - protein, 346 aa, Homo sapiens
MESTLGAGIVIAEALQNQLAWLENVWLWITFLGDPKILFLFYFPAAYYASRRVGIAVLWISLITEWLNLIFKWFLFGDRPFWWVHESGYYSQAPAQVHQFPSSCETGPGSPSGHCMITGAALWPIMTALSSQVATRARSRWVRVMPSLAYCTFLLAVGLSRIFILAHFPHQVLAGLITGAVLGWLMTPRVPMERELSFYGLTALALMLGTSLIYWTLFTLGLDLSWSISLAFKWCERPEWIHVDSRPFASLSRDSGAALGLGIALHSPCYAQVRRAQLGNGQKIACLVLAMGLLGPLDWLGHPPQISLFYIFNFLKYTLWPCLVLALVPWAVHMFSAQEAPPIHSS

SEQ ID NO: 4854 - DNA, 1572 bp, Homo sapiens
ggcacgaggccgcagcggactgccctttcccaagatggcgtcgaagataggttcgagacggtggatgttgcagctgatcatgcagttgggttcggtgctgctcacacgctgccccttttggggctgcttcagccagctcatgctgtacgctgagagggctgaggcacgccggaagcccgacatcccagtgccttacctgtatttcgacatgggggcagccgtgctgtgcgctagtttcatgtcctttggcgtgaagcggcgctggttcgcgctgggggccgcactccaattggccattagcacctacgccgcctacatcgggggctacgtccactacggggactggctgaaggtccgtatgtactcgcgcacagttgccatcatcggcggctttcttgtgttggccagcggtgctggggagctgtaccgccggaaacctcgcagccgctccctgcagtccaccggccaggtgttcctgggtatctacctcatctgtgtggcctactcactgcagcacagcaaggaggaccggctggcgtatctgaaccatctcccaggaggggagctgatgatccagctgttcttcgtgctgtatggcatcctggccctggcctttctgtcaggctactacgtgaccctcgctgcccagatcctggctgtactgctgccccctgtcatgctgctcattgatggcaatgttgcttactggcacaacacgcggcgtgttgagttctggaaccagatgaagctccttggagagagtgtgggcatcttcggaactgctgtcatcctggccactgatggctgagttttatggcaagaggctgagatgggcacagggagccactgagggtcaccctgccttcctccttgctggcccagctgctgtttatttatgctttttggtctgtttgtttgatcttttgcttttttaaaattgttttttgcagttaagaggcagctcatttgtccaaatttctgggctcagcgcttgggagggcaggagccctggcactaatgctgtacaggtttttttcctgttaggagagctgaggccagctgcccactgagtctcctgtccctgagaagggagtatggcagggctgggatgcggctactgagagtgggagagtgggagacagaggaaggaagatggagattggaagtgagcaaatgtgaaaaattcctctttgaacctggcagatgcagctaggctctgcagtgctgtttggagactgtgagagggagtgtgtgtgttgacacatgtggatcaggcccaggaagggcacaggggctgagcactacagaagtcacatgggttctcagggtatgccaggggcagaaacagtaccggctctctgtcactcaccttgagagtagagcagaccctgttctgctctgggctgtgaaggggtggagcaggcagtggccagctttgcccttcctgctgtctctgtttctagctccatggttggcctggtgggggtggagttccctcccaaacaccagaccacacagtcctccaaaaataaacattttatatagacaaaaaaaaaaaaaaaaaaaaaaaaa

SEQ ID NO: 4855 - protein, 257 aa, Homo sapiens
MASKIGSRRWMLQLIMQLGSVLLTRCPFWGCFSQLMLYAERAEARRKPDIPVPYLYFDMGAAVLCASFMSFGVKRRWFALGAALQLAISTYAAYIGGYVHYGDWLKVRMYSRTVAIIGGFLVLASGAGELYRRKPRSRSLQSTGQVFLGIYLICVAYSLQHSKEDRLAYLNHLPGGELMIQLFFVLYGILALAFLSGYYVTLAAQILAVLLPPVMLLIDGNVAYWHNTRRVEFWNQMKLLGESVGIFGTAVILATDG

SEQ ID NO: 4856 - DNA, 2312 bp, Homo sapiens
aaaggaccgaggcgtgcagcggacagcagatggatcccgcggccagcagctgcatgaggagcctccagcccccagcccctgtctggggctgccttcgaaacccccactcggaaggcaatggggcctcagggctaccccactacccgcccaccccgttctccttccaccagaaaccagacttcctggcgacagcgacggcagcgtaccctgacttctcagcctcctgcctggcagccaccccacacagcctgccccaggaggagcacatcttcactgagcagcaccccgctttcccacagtcccccaactggcacttccctgtctcagacgcccggcgcaggcccaactcaggcccggcagggggttccaaggaaatggggaccagcagcctgggcctggtggacaccacaggaggcccaggcgatgactacggggtgcttgggagcactgccaatgagacagagaagaaatcatccaggcggagaaaggagagttcagacaaccaggagaacagagggaagccggagggcagcagcaaagcccgcaaggagaggacggccttcaccaaggagcagctgcgagagctggaggcagagtttgcccatcataactacctgactcggctccgcagatatgagattgcggtaaacctggacctctctgagcgccaggtcaaagtgtggttccagaaccgaaggatgaagtggaagcgtgtgaagggaggtcagcccatctcccccaatgggcaggaccctgaggatggggactccacagcctctccaagttcagagtgagattctgcatggaggaaaaatgactaaggactgagccccctacccaactacccccaccccaatcccaccttcaccctcttccttccccagccagggcagcctctccacatctttccctgactcttggatatgaaactgcccagcattcctgggagtcttaggattttctaggaagttctgtccagcctcttagcagcctcttccctagggcctttgctcccacactctcatggaatcagacagagatcctaccgggccggatgaatctggaaacagcttcagagatactgcttctcagcgtctcttggctgccacccatgcctcctcctaccgctgttctcctaggtcagccaggcctcctcctggtctggacaccacctggcctggtgggagaggagctttggaaccagctggcgactcggaaagtaaatgcttcaaaaggaaggaaatgacagagacacacgcccttgcccaccttcctctgtaggctgcacatctgaggctttggggccccttagttgtcccgaaaccccaagaaaaatcagaatgaggagagtcaaggacagcaactcagctgctgcaagccagaaacacatccctgtctccaaatttgttggctaagtggagacacttctgagaactgactagagaagacagaaaaatagcccgatgtaggtttcggtgtccccatataggcccgtccacacaggcttgactgggtggacaagaatgaacccatgacagcacctgctgcttcaaaatcaaaatcaatttagggatacagcaggggctgttgggctgtgctccagagaaaaggagcagctactccttttaaatccacgatttctggattgaaaacctgtccagatgctgagttgttgggctgaacaactaggagctgaaaacaacgtagaggctggaaagtgtcccctgcattctggaggggaggggagataataaggagggctgctgggtgagggcctggagatgtggaaccctggagtggaaggttctccagtgacagtgtcctgtgactgcaaaaggggacaagaaaatccctcttcctccatgggatggatttaagctcttgctgtgtgttctacaaatgctgttattgtgggaggaaatgctaggtttttgtgtgtggactgcccagacctcagccaggtcttctggagatgacatttgaggactgatggccaaagagcatgggggactgaagccctggctgcctcagcgctctgtctcccaacaccagctggtgttgcagagggaggtcaacgtgagtttggatctcttgtacgcagatgtaatcattcacatgtaaaaataaccccacctccccaccccaaaaagggcaagagctgtggaaaatgattgccaaatgagatggctggttagagcatgattttttctaaagcatacttcatatattttcttaagattacatcaagctaattgtgcgagctcaattcactttgtaagaaaactctcggagaaataaaatcaataaaaagc

SEQ ID NO: 4857 - DNA, 2834 bp, Homo sapiens
gagcggcccgaggaggacgcagcggcgctggagctttcgtcggacgaggcggtggaggttgaggaggttattgaggagtcccgcgcagagcgtatcaagcgcagacactgcggcgcgtggacgacttcaagaaggccttctccaaggagaagatggagaagaccaaggtgcgtacccgcgagaacctggagaagacgcgcctcaagaccaaggaaaacctggagaagacgcggcacaccctggagaagcgcatgaacaagctgggcacgcgcctggtgcccgccgagcggcgcgagaaactgaagacgtcgcgggacaagttgcgcaaatccttcacgcccgaccacgtggtgtacgcgcgctccaagaccgcggtctacaaggtgccacccttcaccttccacgtcaagaagatccgcgagggccaggtggaagtgctcaaggccaccgagatggtggaggtgggcgccgacgacgacgagggcggcggagcgcggggaggccggcgacctgcggcgcgggagcagccccgacgtgcacgcgctgctggagatcaccgaggagtcggacgccgtgctggtggacaagagcgacagcgactgagccgcccccgctgccacccaccccattcctcgctccttccgaacttcctctttcgcattctctctcggctcgagctggctgagatttttctaaattgaaaacacgcccccctccccacacctccaggaactccactcccagtcttagagctgttaggacccgatggggaggcagcccccgcagtggacagcccccgcttggacacagtccgagtggaatgggaagggaatggtcaatccctgtcctggttgtccaagtcgggatctcagaggaaattgcagtgattccacggttaggcccccctgggggggctgccttcccctcagcctctccccacaccacccacccagctgctgtcattccgctcactgagctcttcttcattctcaccctgatccctgggggactcaaagccaaaactgcccaaagaggaaagattgaatcctaaaggggatccttgcccccatgggaggccccctactagaaggacgtgaaagcagcttttgggggaaactgaggcagtggggaagacagagcagaatgagccctcaccctggctgggggtccagcacaggctgtatctgcagagggtcccagaggaacgctggagccaagagaagccctgggaaggaggggtggggaacgacatgcatgtgagggatggcacactgatgtgtttatgcacctgtacacaggagcgcatggccatggctttggaaaggagaatggaaaaatagaagaaggtcggccgggcttggtggcttatgcctgtaaccccagcactttgggaggccgaggtgggcggatcacctgaggtcaggagttcgggaccagcctggcaaacaccccatctctactaagcgaaaacccatctctactaaaattacaaaaattagctgggcatgattgcgcatgcctgtaatcccagctactttggaggctgaggtggggagaattgcttgaacctgggaggtggaggttgcagtgagccaaggtcgcgacactgcactccagcctgggtgacagagtgagactccatctcaacagaaggaaaaaaaaggaaaataggagaaggtggaaatgggtgaagagagaagtcccctcactagctgcatgagaaatctatcttactgtggttctccatgggcagcaggaccatttttcagaatcaagagggaggacagtgtgagaaggcgatgatccaaagaagacagagaggtcagccccacccgatccctcaaatgggctcttggaggcacccccaggggcagcccatttctcaaagtccagaaaattagggtcccagaagggggcagcagcaggctgggagttaggagggagagcagggtgccggccctgccaccaagttgagagctggaggggaggtggggagagaacatcacagagcagccagccctggttcactcctggcagtttcttctcaagctccttccctaggagcatggtggcacgtgcctgtggtctcagctacttgggaggctgaggcgggaggatcgccagagcccaggagtttgaggctgcagtgagctatgagggtgcctctgtgctccatcctaggcaacagagtgagacgctgtttaaaaaggaaaaaatccttccctagagctagtatcctaaagctgcagagctagcccagacctcattggtttccttgtccttggggtgcttttcctgaatctttgggggtgaagggagtgttgctcccagtccagaggcctgattctgttcggactgggttctcaagacacgaccaggttctcaagacacgagtccccttgttcctccccattaaagggggtttgtcagaagcaagaacagcccctctccccagtcacagcctgaagggaggccccgagagcttcctccttccccccacctgctccttaccttctctgccctgctttttagaactgcagttcattgttttaagggattgggggagggagcctggggacacaaaccttttatacaatacaaagctttgctttttttttttttttcttccttttccctttctcggttctcttctctcctctgaatggctgaagacccctctgccgagggaggttggggattgtgggacaaggtcccttggtgctgatggcctgaaggggcctgagctgtgggcagatgcagttttctgtgggcttggggaacctctcacgttgctgtgtcctggtgagcagcccgaccaataaacctgcttttct

SEQ ID NO: 4858 - protein, 182 aa, Homo sapiens
MEKTKVRTRENLEKTRLKTKENLEKTRHTLEKRMNKLGTRLVPAERREKLKTSRDKLRKSFTPDHVVYARSKTAVYKVPPFTFHVKKIREGQVEVLKATEMVEVGADDDEGGGARGGRRPAAREQPRRARAAGDHRGVGRRAGGQERQRLSRPRCHPPHSSLLPNFLFRILSRLELAEIFLN

SEQ ID NO: 4859 - DNA, 1695 bp, Homo sapiens
atggccgtattccggtcgggtctcctggtgctgacgacgccgctggcctccctagcccctcgcctggcctccatcctgacctcggcggcccggctggtgaatcacacactctatgttcacctgcagccgggcatgagcctggagggcccggctcagccccagtacagccccgtgcaggccacgtttgaggttcttgatttcatcacgcacctctatgctggcgccgacgtccacaggcacttggacgtcagaatcctactgaccaatatccgaaccaagagcacctttctccctcccctgcccacctcagtccagaatctcgcccacccgccagaagtcgtgttgacagatttccagaccctggatggaagccagtacaacccggtcaaacagcagctagtgcgttacgccaccagctgttacagctgttgtccgcgactggcctcggtgctgctatactccgattatgggataggagaagtgcccgtggagcccctggatgtccccttaccctccacgatcaggccagcttcccccgtggccgggtctccaaagcagccggtgcgtggctactaccgtggcgctgtcggtggcacgtttgaccgcctgcacaacgcccacaaggtgttgctcagtgtcgcgtgcatcctggcccaggagcagcttgtggtgggagtagcagacaaagatctgttgaagagcaagttgctccctgagctgctccaaccttatacagaacgtgtggaacatctgagtgaattcctggtggacatcaagccctccttgacttttgatgtcatccccctgctggacccctatgggcccgctggctctgacccctccctggagttcctggtggtcagcgaggagacctatcgtggggggatggccatcaaccgcttccgccttgagaatgacctggaggaacttgctttgtaccagatccagctgctgaaggacctcagacatacggagaatgaagaggacaaagtcagctcctccagcttccgccagcgaatgttggggaacctgcttcggcctccatatgaaaggccagagctccccacatgtctctatgtaattgggctgactggcatcagtggctctgggaagagctcaatagctcagcgactgaagggcctgggggcgtttgtcattgacagtgaccacctgggtcatcgggcctatgccccaggtggccctgcctaccagcctgtggtggaggcctttggaacagatattctccataaagatggcatcatcaacaggaaggtcctaggcagccgggtgtttgggaataagaagcagctgaagatactcacggacattatgtggccaattatcgcaaagctggcccgagaggagatggatcgggctgtggctgagggaaagcgtgtgtgtgtgattgatgccgctgtgttgcttgaagccggctggcagaacctggtccatgaggtgtggactgctgtcatcccagagactgaggctgtaagacgcattgtggagagggatggcctcagtgaagccgcggctcaaagccggctgcagagccagatgagcgggcagcagcttgtggaacagagccacgtggtgctcagcaccttgtgggagccgcatatcacccaacgccaggtggagaaagcctgggccctcttgcagaagcgcattcccaagactcatcaggccctcgactga

SEQ ID NO: 4860 - protein, 564 aa, Homo sapiens
MAVFRSGLLVLTTPLASLAPRLASILTSAARLVNHTLYVHLQPGMSLEGPAQPQSSPVQATFEVLDFITHLYAGADVHRHLDVRILLTNIRTKSTFLPPLPTSVQNLAHPPEVVLTDFQTLDGSQYNPVKQQLVRYATSCYSCCPRLASVLLYSDYGIGEVPVEPLDVPLPSTIRPASPVAGSPKQPVRGYYRGAVGGTFDRLHNAHKVLLSVACILAQEQLVVGVADKDLLKSKLLPELLQPYTERVEHLSEFLVDIKPSLTFDVIPLLDPYGPAGSDPSLEFLVVSEETYRGGMAINRFRLENDLEELALYQIQLLKDLRHTENEEDKVSSSSFRQRMLGNLLRPPYERPELPTCLYVIGLTGISGSGKSSIAQRLKGLGAFVIDSDHLGHRAYAPGGPAYQPVVEAFGTDILHKDGIINRKVLGSRVFGNKKQLKILTDIMWPIIAKLAREEMDRAVAEGKRVCVIDAAVLLEAGWQNLVHEVWTAVIPETEAVRRIVERDGLSEAAAQSRLQSQMSGQQLVEQSHVVLSTLWEPHITQRQVEKAWALLQKRIPKTHQALD

SEQ ID NO: 4861 - DNA, 2586 bp, Homo sapiens
cctcgccgcagggggcccgcccgctggcccgtttccggtccggtgggtacaagatgacggagccgggcgcctctcccgaggacccttgggtcaaggcaagccccgtgggcgcgcacgccggcgaggggagggcgggtcgggctcgtgcacgtaggggggccggaagacgaggggcttccctcctgtccccaaagtcccccacgctctccgtgccccggggctgcagagaagacagctctcaccccgcgtgtgccaaggtggagtatgcctacagcgacaacagcctggaccccgggctttttgtagaaagcacccgcaaggggagtgtagtgtccagagctaatagcatcggttccaccagtgcctcttctgtccccaacacagatgatgaggacagtgattaccaccaggaggcctacaaggagtcctacaaagaccggcggcggcgcgcacacactcaggctgagcagaagaggagggacgccatcaagagaggctatgatgaccttcagaccatcgtccccacttgccagcagcaggacttctccattggctcccaaaagctcagcaaagccatcgttctacaaaagaccattgactacattcagtttttgcacaaggagaagaaaaagcaggaggaggaggtgtccacgttacgcaaggatgtcaccgccctaaagatcatgaaagtgaactatgagcagattgtgaaggcacaccaggacaacccccatgaaggggaggaccaggtctctgaccaggtcaagttcaacgtgtttcaaggcatcatggattccctgttccagtccttcaatgcctccatctcagtggccagcttccaggagctgtcagcgtgtgtcttcagctggatcgaggagcactgtaagcctcagaccctgcgggagattgtgattggcgtcctgcaccaattgaaaaaccagctttactgaccggttcttggaaacctggagaacagccaacaagaggcccttgaatctctacgtggccactgaactgctgggcccgggagactggactacaacacctcacactggtcagctggtttctacttggtgtttggtttttcccagccccattttatcttcagcggagccgcggtgtttgttttgtgaaagcttctgattaatttattatattgacgataaaactcaaacctacccagccttccccccactccatggaagtccttgggatgggcgtctgctctggacaccccaaagagctcctgccctctcagccctttattcaagcctcagatttctgctcatgatctacatagatttggaaactgttttcctctgttttggtctcttgggcaacatttttggcccaagtttgggcaacatttggcccaagtttgggcattttggcagtagctgtatgggagaaaaagagtaagaggaaatattcccacagccatgaagggtgaaagggcaccttgtgcctagactagggctgcctggtcagtcccaggtgaggccaagggctttctggccatctcagggaggggccaccaggttcctcccctcaccccatattccatcaccttcctcctctgctctgggtggtaagggaagccctcccggttcccacaggctatgatgctgcatggcagaggcaggtataacacagcactacatattggaaattttttatttttctaaataccaatgcagttttgctacggttacaattttgaaatattaactgagcctcaaaatcaccctttctgtcaagcatatcttggcctctcccatgtctcagtgttgcctgcatttctcccaggacttgggggtggggtgaaaagcgtacaaaagatacttaaaagggctcctggggtacacaagcccagcaggtcctgagtgaagccgtgggccctccaaatgctcgttttatagcaacctctctctaccctagttctccaaattcacttctgccttcctcaggtttgatatctggcaggtttgactatccagaggaaattaaatatttttatataaaattaaattataataaatattgccaaatgctttcctttagcattgttccaagtctaaatgttaacctcaagctactgcaatttagacaatgaaatgggctgggtctacccccagccaccagccctcatcctctctacccagtgctctggtttatgcttgtctcctgactgctctgcttaaaggtgaaagtagcaggaacaacaacaaaagccaaccaaaaacaaggtagccagtgcaagacatctcactcttctgacatcctgcagtccccaccagtcctgaccgtgggcccctcaggggtctgggagtgtgacgttgtaatcttcatccgtctctatcccaacttcctcctgtgagacagggagacaagtgaatgagatgtcaccaggataagaccacagggaagcaaagaaggaagagagctccacttacaaagaactgcttcttgctcttggggtatccttcaagtattgcatcagacagctctgtagcctgacaagaaataaaaccacccgttttcagatgggcagcactgggcactgcctgtcagtttatgatattgtgt

SEQ ID NO: 4862 - protein, 298 aa, Homo sapiens
MTEPGASPEDPWVKASPVGAHAGEGRAGRARARRGAGRRGASLLSPKSPTLSVPRGCREDSSHPACAKVEYAYSDNSLDPGLFVESTRKGSVVSRANSIGSTSASSVPNTDDEDSDYHQEAYKESYKDRRRRAHTQAEQKRRDAIKRGYDDLQTIVPTCQQQDFSIGSQKLSKAIVLQKTIDYIQFLHKEKKKQEEEVSTLRKDVTALKIMKVNYEQIVKAHQDNPHEGEDQVSDQVKFNVFQGIMDSLFQSFNASISVASFQELSACVFSWIEEHCKPQTLREIVIGVLHQLKNQLY

SEQ ID NO: 4863 - DNA, 1346 bp, Homo sapiens
caactacaacgtccggctttctgagttgggtggcgggaaaggcgatgagtaaaggccgggcagaagctgcggtagccgccgggatcctcctgaggtacctgcaggagcagaaccggccctacagctcccaggatgtgttcgggaacctacagcgggaacacggactgggcaaggcggtggtggtgaagacgctggagcagctggcgcaacaaggcaagatcaaagagaagatgtacggcaagcagaagatctattttgcggatcaggaccagtttgacatggtgagtgatgctgaccttcaagtcctagatggcaaaatcgtggccctcactgctaaggtgcagagcttgcagcagagctgccgctacatggaggctgagctcaaggaattatctagtgccctgaccacaccagagatgcagaaagaaatccaggagttaaagaaggaatgcgctggctacagagagagattgaagaacattaaagcagctaccaatcatgtgactccagaagagaaagagcaggtgtacagagagaggcagaagtactgtaaggagtggaggaagaggaagaggatggctacagagctgtctgatgcaatacttgaaggataccccaagagcaagaagcagttctttgaggaagttgggatagagacggatgaagattacaacgtcacactcccagacccctgaggggcccacggtcaggactggtggggactgcaggatgtcagaagagtgagatgtcttgcactggctaccttgtttttggttggcttttgttgttgttcctgctactttcacctttaagcagagcagtcaggagacaagcataaaccagagcactgggtagagaggatgagggctggtggctgggggtagacccagcccatttcattgtctaaattgcagtagcttgaggttaacatttagacttggaacaatgctaaaggaaagcatttggcaatatttattataatttaattttatataaaaatatttaatttcctctggatagtcaaacctgccagatatcaaacctgaggaaggcagaagtgaatttggagaactagggtagagagaggttgctataaaacgagcatttggagggcccacggcttcactcaggacctgctgggcttgtgtaccccaggagcccttttaagtatcttttgtacgcttttcaccccacccccaagtcctgggagaaatgcaggcaacactgagacatgggagaggccaagatatgcttgacagaaagggtgattttgaggctcagttaatatttcaaaattgtaaccgtagcaaaactgcattggtatttagaaaaataaaaaatttcca

SEQ ID NO: 4864 - DNA, 2893 bp, Homo sapiens
gggcggacggcacagagggagggagcgagcgagcagtgagtaagccagcaagggcggtcgggtcccgaggtcagccgagatttctcaggtccctccggccccctccctggagtccacagcgcctccggtgtccagaggatcggacacggcccggcccggccatggcctcgttgctgaaggtggatcaggaagtgaagctcaaggttgattctttcagggagcggatcacaagtgaggcagaagacttggtggcaaattttttcccaaagaagttattagaacttgatagttttctgaaggaaccaatcttaaacatccatgacctaactcagatccactctgacatgaatctcccagtccctgaccccattcttctcaccaatagccatgatggactggatggtcccacttataagaagcgaaggttggatgagtgtgaagaagccttccaaggaaccaaggtgtttgtgatgcccaatgggatgctgaaaagcaaccagcagctggtggacattattgagaaagtgaaacctgagatccggctgttgattgagaaatgtaacacgccttcaggcaaaggtcctcatatatgttttgacctccaggtcaaaatgtgggtacagctcctgattcccaggatagaagatggaaacaactttggggtgtccattcaggaggaaacagttgcagagctaagaactgttgagagtgaagctgcatcttatctggaccagatttctagatattatattacaagagccaaattggtttctaaaatagctaaatatccccatgtggaggactatcgccgcaccgtgacagagattgatgagaaagaatatatcagccttcggctcatcatatcagagctgaggaatcaatatgtcactctacatgacatgatcctgaaaaatatcgagaagatcaaacggccccggagcagcaatgcagagactctgtactgaggccagggccagggccaggggactctgtgagtctggctcaagaccgacattgccttggtttgttacatgactatcgtgatggggaaactggctggaaatagtaatcacacctctctgtttttagttagagtctaatgaaactctcatctagttctgtgatgtgtttacctcttttttcaggcctcaggaactcttctatttccttccctaataccccacacccaacctgtcgtaatttctggagaactccaggtttgtgtgtgcaggatgttggcacaaaaatacctgtgttttcattctccccctctctccctcctgtgtcttgcgctttatgttttcttccgtttgataattagttggttaaaagctgagggaaccggaaggaaagtgctaggtgttttttaggaactagggtggcggggggacgaacttctcttcctcacatgaggttactgtttctttcctctgtggggcattggatcctcccacagttgccctggtgatgacttagggcttcccatctgtgtacatcccactttgaatcttgatcgtgacaagaaataccttaggccttcagtcaattccgaagctccttcagttgtttttataatgggcgttttcacatgcacatatgtgtatgcatgtatacgcccatacagacatgcacacacagactcctactccattagctaacataccctccctctccacaacccctgtcacatacctttcaggaggtgacagttgtcttagttgtcatctacccagacaaacgtcctgggcccgtcctccctcctgatactgtagcctcttggtacccagggtgagttggtggagaacagagagatgagaagcagagggcttggggaaagcctgttcctctctgactcagccctttttggcattattgcaagagcttgactcctggttgccttttcccagccagttttcagttggggtgaaggtttctgcaagtgtgaggtccagatgctgctgctcatgttgggctttccttttgggaactatttctctttatttatagtgtcgggcttccggggaaagcaatcattggtgtgtatgtgtatgtgcatgcacacacgtgcatatacacatttgtgtatgtggaaatgtgctgggcaagtcaaaactatagaagagttgcctcctgtctctcgaatcttccagagatatcacttaattgttaacagcttttgtgttaatccccttcagcccctagctcttttattctaccacggctggagagttgatacctgcagtcagcctgccagtgactcttagtgtctgtttctgacttatttttcctgtctctgtcttccaacccccaataatatttccaccggggatgcatcatttttactcccaatattctgtagagagggagtcaggatgctgtcttcccacgaatagtactcagtaacaaaccaattgcattttagttgggcagtgctcccacccaccctccagatcccttccagctaaaacccttcccccttccctccatgtgtttctcagtttcccgtttcgtttgttggactgttccactgcccctcctcctcaccctatcacccatggatcgtaatgtaaaattcttttaccatgtcaagaaattattaaaaatacaggtactttgacctctttctaaagccgcagaccctggtgcaatgctctggtggctagggatgtactcatgctcatatgtgtgcacgcttggacacccacctccatggacacctagccaccctgttgtgtgtccttatgccagttgagctgaatcttttccccagtatagtggaaagactgaggcttctgcctactgagcaaggttgggtgcttcatttgtgttcagtctgaattatgggaaagttagctcttcccagacctaagctgccttctctccctactttcag

SEQ ID NO: 4865 - DNA, 2144 bp, Homo sapiens
gctgaagacagagcgatggtagttctggaggcctcgctccggggccgacccgaggccacagtgcctccgcggtagaccggacttgggtgacgggctccgggctcccgaggtgaagagcatcgggggctgagggatggaagggtctaagacgtccaacaacagcaccatgcaggtgagcttcgtgtgccagcgctgcagccagcccctgaaactggacacgagtttcaagatcctggaccgtgtcaccatccaggaactcacagctccattacttaccacagcccaggcgaaaccaggagagacccaggaggaagagactaactcaggagaggagccatttattgaaactcctcgccaggatggtgtctctcgcagattcatccccccagccaggatgatgtccacagaaagtgccaacagcttcactctgattggggaggcatctgatggcggcaccatggagaacctcagccgaagactgaaggtcactggggacctttttgacatcatgtcgggccagacagatgtggatcacccactctgtgaggaatgcacagatactcttttagaccagctggacactcagctcaacgtcactgaaaatgagtgtcagaactacaaacgctgtttggagatcttagagcaaatgaatgaggatgacagtgaacagttacagatggagctaaaggagctggcactagaggaggagaggctgatccaggagctggaagacgtggaaaagaaccgcaagatagtggcagaaaatctcgagaaggtccaggctgaggctgagagactggatcaggaggaagctcagtatcagagagaatacagtgaatttaaacgacagcagctggagctggatgatgagctgaagagtgttgaaaaccagatgcgttatgcccagacgcagctggataagctgaagaaaaccaacgtctttaatgcaaccttccacatctggcacagtggacagtttggcacaatcaataacttcaggctgggtcgcctgcccagtgttcccgtggaatggaatgagattaatgctgcttggggccagactgtgttgctgctccatgctctggccaataagatgggtctgaaatttcagagataccgacttgttccttacggaaaccattcatatctggagtctctgacagacaaatctaaggagctgccgttatactgttctggggggttgcggtttttctgggacaacaagtttgaccatgcaatggtggctttcctggactgtgtgcagcagttcaaagaagaggttgagaaaggcgagacacgtttttgtcttccctacaggatggatgtggagaaaggcaagattgaagacacaggaggcagtggcggctcctattccatcaaaacccagtttaactctgaggagcagtggacaaaagctctcaagttcatgctgacgaatcttaagtggggtcttgcttgggtgtcctcacaattttataacaaatgacttttttccttagggggaggtttgccttaaaggcttttaattttgttttgtttgcaaacatgttttaaattaaattcgggtaatattaaacagtacatgtttacaataccaaaaaagaaaaaatccacaaaagccactttattttaaaatatcatgtgacagatactttccagagctacaacatgccatctatagttgccagccctggtcagttttgattcttaaccccatggactcctttccctttcttctctgaaaaaaactaatttaaatttgcttttcttttttttaactgagttgaattgagattgatgtgttttcactggatttttatctctctcaacttcctgcacttaacaatatgaaatagaaacttttgtctttactgagatgaggatatgtttgagatgcacagttggataatgtgggaaaatgacatctaagctttacctggtcaccatgtgatgtgatcagatgcttgaaatttaacacttttcacttggttcttatactgaatgccgactctgctctgtgttagagatatgaaatggtgtttgatactgtttgagacattatggagagatttaattatttgtaataaaagatttgctgcagtctgaaaactgaaaaaaaaaaaaaaaaaaaaaaaaaaaaaaaa

SEQ ID NO: 4866 - protein, 450 aa, Homo sapiens
MEGSKTSNNSTMQVSFVCQRCSQPLKLDTSFKILDRVTIQELTAPLLTTAQAKPGETQEEETNSGEEPFIETPRQDGVSRRFIPPARMMSTESANSFTLIGEASDGGTMENLSRRLKVTGDLFDIMSGQTDVDHPLCEECTDTLLDQLDTQLNVTENECQNYKRCLEILEQMNEDDSEQLQMELKELALEEERLIQELEDVEKNRKIVAENLEKVQAEAERLDQEEAQYQREYSEFKRQQLELDDELKSVENQMRYAQTQLDKLKKTNVFNATFHIWHSGQFGTINNFRLGRLPSVPVEWNEINAAWGQTVLLLHALANKMGLKFQRYRLVPYGNHSYLESLTDKSKELPLYCSGGLRFFWDNKFDHAMVAFLDCVQQFKEEVEKGETRFCLPYRMDVEKGKIEDTGGSGGSYSIKTQFNSEEQWTKALKFMLTNLKWGLAWVSSQFYNK

SEQ ID NO: 4867 - DNA, 1542 bp, Homo sapiens
ttggaggtccccctccccactaagtgcctctttgcatagcaccagtccccacccgcacgctctctggaccactacagctggacgggcaatggcgggtcggggaggcgcagcacgacccaatggaccagctgctgggaacaagatctgtcaatttaagctggttctgctgggggagtctgcggtaggcaaatccagcctcgtcctccgctttgtcaagggacagtttcacgagtaccaggagagcacaattggagcggccttcctcacacagactgtctgcctggatgacacaacagtcaagtttgagatctgggacacagctggacaggagcggtatcacagcctggcccccatgtactatcggggggcccaggctgccatcgtggtctatgacatcaccaacacagatacatttgcacgggccaagaactgggtgaaggagctacagaggcaggccagccccaacatcgtcattgcactcgcgggtaacaaggcagacctggccagcaagagagccgtggaattccaggaagcacaagcctatgcagacgacaacagtttgctgttcatggagacatcagcaaagactgcaatgaacgtgaacgaaatcttcatggcaatagctaagaagcttcccaagaacgagccccagaatgcaactggtgctccaggccgaaaccgaggtgtggacctccaggagaacaacccagccagccggagccagtgctgcagcaactgagccccccttgcctgcccgctgcccccgcctcctccgcctgaatgacccgactggaatccactctaaccaatcgcacttaacgactcgggccaccactgggggggcagggggaggggtccaccatgatttctccatataattttgatcataggccggagtgagtcattccacctgcacctttctgtacaaatactaattcaattttaagtcttaagtcacttttttaatatatatgatcttctgctcttcccacttcctcccctttctactgctctcccattttcccttgctgggagtagccacatgctcttgccccccaacccttgtatatggggacagtggggtcagtgcagctaccctttctttccctcctgcggaacagcggacccagcaagagcatccacatcctcactttgttcggagtggtctttggtttgggcggtggggcagaccttgggaaggggcttaggaagggagaggcagctcttccttcagctggctctcatcaggctgcagccccctccccgctcccacctccctgctgggaaaccacagcattatcacagcattattgtgacagccacgaacccattgcccacaacccctccaccctcggtcaccccaacctctggctctgagccctgttctgaccaaatcatgatgatgagtatttgggggtgggtgggtaagggggggagtgggaggggacggaaccaactttttctgtattttgtattgtatgttttcttcaacatgtaaccaatcagtatcttgtcaatatagtcagccgatcgatcgacctc

SEQ ID NO: 4868 - protein, 216 aa, Homo sapiens
MAGRGGAARPNGPAAGNKICQFKLVLLGESAVGKSSLVLRFVKGQFHEYQESTIGAAFLTQTVCLDDTTVKFEIWDTAGQERYHSLAPMYYRGAQAAIVVYDITNTDTFARAKNWVKELQRQASPNIVIALAGNKADLASKRAVEFQEAQAYADDNSLLFMETSAKTAMNVNEIFMAIAKKLPKNEPQNATGAPGRNRGVDLQENNPASRSQCCSN

SEQ ID NO: 4869 - DNA, 3074 bp, Homo sapiens
ccgctctccgctgcgggggaggccatggcggaaccttcccaggccccgaccccggccccggctgcgcagccccggccccttcagtccccagcccctgccccaactccgactcctgcacccagcccggcttcagccccgattccgactcccaccccggcaccagcccctgccccagctgcagccccagccggcagcacagggactggggggcccggggtaggaagtgggggggccgggagcgggggggatccggctcgacctggcctgagccagcagcagcgcgccagtcagaggaaggcgcaagtccgggggctgccgcgcgccaagaagcttgagaagctaggggtcttctcggcttgcaaggccaatgaaacctgtaagtgtaatggctggaaaaaccccaagccccccactgcaccccgcatggatctgcagcagccagctgccaacctgagtgagctgtgccgcagttgtgagcaccccttggctgaccacgtatcccacttggagaatgtgtcagaggatgagataaaccgactgctggggatggtggtggatgtggagaatctcttcatgtctgttcacaaggaagaggacacagacaccaagcaggtctatttctacctcttcaagctactgcggaaatgcatcctgcagatgacccggcctgtggtggaggggtccctgggcagccctccatttgagaaacctaatattgagcagggtgtgctgaactttgtgcagtacaagtttagtcacctggctccccgggagcggcagacgatgttcgagctctcaaagatgttcttgctctgccttaactactggaagcttgagacacctgcccagtttcggcagaggtctcaggctgaggacgtggctacctacaaggtcaattacaccagatggctctgttactgccacgtgccccagagctgtgatagcctcccccgctacgaaaccactcatgtctttgggcgaagccttctccggtccattttcaccgttacccgccggcagctgctggaaaagttccgagtggagaaggacaaattggtgcccgagaagaggaccctcatcctcactcacttccccaaattcctgtccatgctggaggaggagatctatggggcaaactctccaatctgggagtcaggcttcaccatgccaccctcagaggggacacagctggttccccggccagcttcagtcagtgcagcggttgttcccagcacccccatcttcagccccagcatgggtgggggcagcaacagctccctgagtctggattctgcaggggccgagcctatgccaggcgagaagaggacgctcccagagaacctgaccctggaggatgccaagcggctccgtgtgatgggtgacatccccatggagctggtcaatgaggtcatgctgaccatcactgaccctgctgccatgctggggcctgagacgagcctgctttcggccaatgcggcccgggatgagacagcccgcctggaggagcgccgcggcatcatcgagttccatgtcatcggcaactcactgacgcccaaggccaaccggcgggtgttgctgtggctcgtggggctgcagaatgtcttttcccaccagctgccgcgcatgcctaaggagtatatcgcccgcctcgtctttgacccgaagcacaagactctggccttgatcaaggatgggcgggtcatcggtggcatctgcttccgcatgtttcccacccagggcttcacggagattgtcttctgtgctgtcacctcgaatgagcaggtcaagggttatgggacccacctgatgaaccacctgaaggagtatcacatcaagcacaacattctctacttcctcacctacgccgacgagtacgccatcggctacttcaaaaagcagggtttctccaaggacatcaaggtgcccaagagccgctacctgggctacatcaaggactacgagggagcgacgctgatggagtgtgagctgaatccccgcatcccctacacggagctgtcccacatcatcaagaagcagaaagagatcatcaagaagctgattgagcgcaaacaggcccagatccgcaaggtctacccggggctcagctgcttcaaggagggcgtgaggcagatccctgtggagagcgttcctggcattcgagagacaggctggaagccattggggaaggagaaggggaaggagctgaaggaccccgaccagctctacacaaccctcaaaaacctgctggcccaaatcaagtctcaccccagtgcctggcccttcatggagcctgtgaagaagtcggaggcccctgactactacgaggtcatccgcttccccattgacctgaagaccatgactgagcggctgcgaagccgctactacgtgacccggaagctctttgtggccgacctgcagcgggtcatcgccaactgtcgcgagtacaaccccccggacagcgagtactgccgctgtgccagcgccctggagaagttcttctacttcaagctcaaggagggaggcctcattgacaagtaggcccatctttgggccgcagccctgacctggaatgtctccacctcggattctgatctgatccttagggggtgccctggccccacggacccgactcagcttgagacactccagccaagggtcctccggacccgatcctgcagctctttctggaccttcaggcacccccaagcgtgcagctctgtcccagccttcactgtgtgtgagaggtctcctgggttggggcccagcccctctagagtagctggtggccagggatgaaccttgcccagccgtggtggcccccaggcctggtccccaagagctttggaggcttggattcctgggcctggcccaggtggctgtttccctgaggaccagaactgctcattttagcttgagtgatggcttcaggggttggaagttcagcccaaactgaagggggccatgccttgtccagcactgttctgtcagtctcccccaggggtggggggtatggggaccattcattccctggcattaatcccttagagggaataataaagctttttatttctctg

SEQ ID NO: 4870 - protein, 837 aa, Homo sapiens
MAEPSQAPTPAPAAQPRPLQSPAPAPTPTPAPSPASAPIPTPTPAPAPAPAAAPAGSTGTGGPGVGSGGAGSGGDPARPGLSQQQRASQRKAQVRGLPRAKKLEKLGVFSACKANETCKCNGWKNPKPPTAPRMDLQQPAANLSELCRSCEHPLADHVSHLENVSEDEINRLLGMVVDVENLFMSVHKEEDTDTKQVYFYLFKLLRKCILQMTRPVVEGSLGSPPFEKPNIEQGVLNFVQYKFSHLAPRERQTMFELSKMFLLCLNYWKLETPAQFRQRSQAEDVATYKVNYTRWLCYCHVPQSCDSLPRYETTHVFGRSLLRSIFTVTRRQLLEKFRVEKDKLVPEKRTLILTHFPKFLSMLEEEIYGANSPIWESGFTMPPSEGTQLVPRPASVSAAVVPSTPIFSPSMGGGSNSSLSLDSAGAEPMPGEKRTLPENLTLEDAKRLRVMGDIPMELVNEVMLTITDPAAMLGPETSLLSANAARDETARLEERRGIIEFHVIGNSLTPKANRRVLLWLVGLQNVFSHQLPRMPKEYIARLVFDPKHKTLALIKDGRVIGGICFRMFPTQGFTEIVFCAVTSNEQVKGYGTHLMNHLKEYHIKHNILYFLTYADEYAIGYFKKQGFSKDIKVPKSRYLGYIKDYEGATLMECELNPRIPYTELSHIIKKQKEIIKKLIERKQAQIRKVYPGLSCFKEGVRQIPVESVPGIRETGWKPLGKEKGKELKDPDQLYTTLKNLLAQIKSHPSAWPFMEPVKKSEAPDYYEVIRFPIDLKTMTERLRSRYYVTRKLFVADLQRVIANCREYNPPDSEYCRCASALEKFFYFKLKEGGLIDK

SEQ ID NO: 4871 - DNA, 1542 bp, Homo sapiens
ggcacgaggcgcgagctcggagggcccggctggtgctgcgggggccccgggaggttgaaaactaagcatggggaagagctgcaaggtggtcgtgtgtggccaggcgtctgtgggcaaaacttcaatcctggagcagcttctgtatgggaaccatgtagtgggttcggagatgatcgagacgcaggaggacatctacgtgggctccattgagacagaccggggggtgcgagagcaggtgcgtttctatgacacccgggggctccgagatggggccgaactgccccgacactgcttctcttgcactgatggctacgtcctggtctatagcacagatagcagagagtcttttcagcgtgtggagctgctcaagaaggagattgacaaatccaaggacaagaaggaggtcaccatcgtggtccttggcaacaagtgtgacttacaggagcagcggcgtgtagacccagatgtggctcagcactgggccaagtcagagaaggtgaagctgtgggaggtgtcagtggcggaccggcgctccctcctggagccctttgtctacttggccagcaagatgacgcaaccccagagcaagtctgccttccccctcagccggaagaacaagggcagcggctccttggatggctgaagagctgccgttcctctttcacgatcccagccccatttcagtgtctggggctctggtagatgtgttgagggcaaagtagaggacaagctgtctttcccagtcagccagggagctccccgccaggccacgccccagccactttgctccctctcacctctgggaagtgcaaatactcttggttgacatccccttcctcagccctcccagcctactccccatcccagcttttagaggatctgctccactgtctcctggggcagttgtgggtcactgtcccttccagctgccccagacaggaagcagagtcaccacgcagcagtgtcccttcttgggtctgagttcctattataggtaggggccccaccctctgggcttcccatcagcgacacacacacacttatggcaccagcctggactccagaaaaagggtgtccaggtattgtgtgtatgcatttagttgtgcacacacaaatatgctcctatactggcattaggcgtctcctcatccctcaccctgacctttctcctgtccttttcttggctggaagaagttggcctcctgggagtgtagttttctgttttaaatcccccacccctggctgggctcagtggctcacccctgtaatcccagcactttgggaggccaaggcgggtcgattacttgaggtcaggagttcacgaccagcctggccaacattgtgaaaccccatctctgccaaaaatacaaaagttagccgggcgtagtggcacatgcctgtaatcccagctacccggggaggctgaggcaggagaattgcttgaactcagaaggcggaggctgcagtgagccgagatcgtgccactgcactccagcctggtcaacagagcaagactccatctcgaaaaaaaaaaaaaaaaaa

SEQ ID NO: 4872 - protein, 191 aa, Homo sapiens
MGKSCKVVVCGQASVGKTSILEQLLYGNHVVGSEMIETQEDIYVGSIETDRGVREQVRFYDTRGLRDGAELPRHCFSCTDGYVLVYSTDSRESFQRVELLKKEIDKSKDKKEVTIVVLGNKCDLQEQRRVDPDVAQHWAKSEKVKLWEVSVADRRSLLEPFVYLASKMTQPQSKSAFPLSRKNKGSGSLDG

SEQ ID NO: 4873 - DNA, 2346 bp, Homo sapiens
gggaagatggcggctgtcgaagcggctgcagagccggtaacggtggtggcggctgttgggccaaaggcgaaagacgaagaggaggaggaagaggagccgctgccaccgtgcgaggcggtgcgctgggccccagtgggggcggtggcggaggcccggcctggggcaaccgcgtttttagaagaggcgacggccgaggagcctggcgcggccccgggctccccgccggattcgccgggccggacgctgcggcggctgcgggcagagcggcggcggctggactcggcgctgctggcgctgtcctcgcacttcgcgcaggtgcagttccgcctgcgccaggtggtgcgcggggcgccggcggagcagcagcgccttctgcgggagctcgaagacttcgccttccgcggctgccctcacgtcctaggttacgaagggcccggcgaccccgccagcgatgagggcgatgggctgccaggggaccggccatggttgcggggcgaggaccagagtgagcaggaaaagcaagagcgtctggaaacccaaagggagaagcagaaagaactgatactgcagctcaagacccagctagatgacctggaaacgtttgcctatcaagagggcagttatgactcgctgccacagtccgtggtgttggaaagacagcgggtgatcatagatgagttaataaagaaactggacatgaatctgaatgaggacatcagttccctgtccactgaagagcttcgtcagcgtgtagatgcagcagtggctcagatcgtcaacccagcccgagtcaaagaacagttggttgagcaactgaaaactcagatccgagaccttgagatgtttatcaacttcatccaagatgaagtgggaagccccttgcagacaggtggtggacactgtgagtgcaaggccggtgggaagacaggaaatggctgcagcagaacaggcagcagcagaacgcctccaggaaacagcaaaacaaaggcagaggatgtgaagaaagtccgggagacggggctgcacctgatgcggcgagcgctggccgtgctccagatctttgctgttagccagtttggttgtgccacaggccagatccctccaaccctgtggcagagggtccaggctgacagagactactctcccttgctgaagaggctggaggtgtcagtggacagagtgaagcagctagccttgaggcagcagccacatgaccatgtcatcacctctgccaacctccaggacctctctctgggaggcaaggatgagctgactatggctgtgcggaaggagctaacggtggctgtgagggacctgctggcccatggactgtatgcctcctccccagggatgagccttgttatggctcctattgcttgtttgctgccagccttctcctcggccccagaggccatgcacccgtgggagctctttgtaaagtactaccatgctaagaacggccgtgcttatgtggaatccccagcccggaagctctcccagtccttcgcccttcctgttacgggaggcactgttgtcacccccaaacagagcctactgacagccatccacatggtgctgacagagcatgacccttttaagcgcagtgcagactcagaattgaaggccttggtgtgcatggcactgaatgagcagcgtctggtgtcctgggtgaacctcatctgcaagtccgggtcactcatcgagcctcactaccagccctggagctacatggcacacacaggctttgagagtgccctcaacctgctcagtcgcctcagcagcctcaagtttagcctccctgtagatctggctgtgcgccagctcaaaaacatcaaagatgccttttgatgagagtgccctaaccccagacaagctccttgttcagtagggatagatgtgctagtcttctagcataggagcaaggaatcagaggtggggttaaaggcatttttcccagaccctgctcaggcagtcggccaaatgagtgcaaagtctgttttccccaccaacttagctctcggaaagatgtgctggagggaccctcttgttaagaaggttctgccaggccgggcgcggtggctcacacctgtaatcccagcactttgggaggccgaggcgggcggatcacaaggtcaggagttcgagaccatcctgtctaacacggtgaaaccccatctctactaaaaatacaaaaaaattagtcggacatggtggcaggcacctgtagtcccagctactcgggaggctgaggcaggagaatggcgtgaacccaggaggcggagcttgcagtgagccaagatcgcgccactgcactccagcctgggcgacagagtgagactccgtctc

SEQ ID NO: 4874 - protein, 613 aa, Homo sapiens
MAAVEAAAEPVTVVAAVGPKAKDEEEEEEEPLPPCEAVRWAPVGAVAEARPGATAFLEEATAEEPGAAPGSPPDSPGRTLRRLRAERRRLDSALLALSSHFAQVQFRLRQVVRGAPAEQQRLLRELEDFAFRGCPHVLGYEGPGDPASDEGDGLPGDRPWLRGEDQSEQEKQERLETQREKQKELILQLKTQLDDLETFAYQEGSYDSLPQSVVLERQRVIIDELIKKLDMNLNEDISSLSTEELRQRVDAAVAQIVNPARVKEQLVEQLKTQIRDLEMFINFIQDEVGSPLQTGGGHCECKAGGKTGNGCSRTGSSRTPPGNSKTKAEDVKKVRETGLHLMRRALAVLQIFAVSQFGCATGQIPPTLWQRVQADRDYSPLLKRLEVSVDRVKQLALRQQPHDHVITSANLQDLSLGGKDELTMAVRKELTVAVRDLLAHGLYASSPGMSLVMAPIACLLPAFSSAPEAMHPWELFVKYYHAKNGRAYVESPARKLSQSFALPVTGGTVVTPKQSLLTAIHMVLTEHDPFKRSADSELKALVCMALNEQRLVSWVNLICKSGSLIEPHYQPWSYMAHTGFESALNLLSRLSSLKFSLPVDLAVRQLKNIKDAF

SEQ ID NO: 4875 - DNA, 2738 bp, Homo sapiens
cttccccagctgtgcactctccatccagctgtgcgctctcgtcgggagtcccagccatgtccgacgagagagaggtagccgaggcagcgaccggggaagacgcctcttcgccgcctccgaaaaccgaggcagcgagcgacccccagcatcccgcggcctccgaaggggccgccgccgccgccgcctcgccgccactgctgcgctgcctagtgctcaccggctttggaggctacgacaaggtgaagctgcagagccggccggcagcgcccccggcccctgggcccggccagctgacgctgcgtctgcgggcctgcgggctcaacttcgcagacctcatggctaggcaggggctgtacgaccgtctcccgcctctgcctgtcactccgggcatggagggcgcgggtgttgtgatcgcagtgggcgagggagtcagcgaccgcaaggcaggagaccgggtgatggtgttgaaccggtcagggatgtggcaggaagaggtgactgtgccctcggtccagaccttcctgattcctgaggccatgacctttgaggaagctgctgccttgctcgtcaattacattacagcctacatggtcctctttgacttcggcaacctacagcctggccacagcgtcttggtacacatggctgcagggggtgtgggtatggctgccgtgcagctgtgccgtacagtggagaatgtgacagtgttcggaacggcctcggccagcaagcacgaggcactgaaggagaatggggtcacacatcccatcgactatcacacgactgactacgtggatgagatcaagaagatttcccctaaaggagtggacattgtcatggaccctctgggtgggtcagatactgccaagggctacaacctcctgaaacccatgggcaaagtcgtcacctatggaatggccaacctgctgacgggccccaaacggaacctgatggccctggcccggacatggtggaatcagttcagcgtgacagctctgcagctgctgcaggccaaccgggctgtgtgtggcttccacctgggctacctggatggtgaggtggagctggtcagtggtgtggtggcccgcctcctggctctgtacaaccagggccacatcaagccccacattgactcagtctggcccttcgagaaggtggctgatgccatgaaacagatgcaggagaagaagaatgtgggcaaggtcctcctggttccagggccagagaaggagaactagggcaagtggctgtgagaccctagagaccagcgaagggagaagttgggaagctacgttctgttggccaccagacttgcatttcagcctctgtcataatgctctgccctccctcccccgaagttctctgtggtgatgaccgctctcccctgcccctccccgcttcctgacctctgaagaggttgggaagtgaccatttggatgtctgggccctgccaaggcgacagggagggtcagagggaggccggctgcttcctgcccccaccctttccccgggcctgctgtgctgcttttgtgccaaggttagccagtcccccctgttgtgttccatgtgctttcacctctgcctcatctttcctcccgtccctgccccgccacctccccaaagaattgaaacgtcagctcaggatatggggccaatctctgtgagtccagcatgtacctgtctctccctagtgtcccttcagcctgggctgaccagtgcccgcctctgggcttgaccagttcccaatctcgtcctctgtccccaacttcttaagcacaattgggcttcttccatctccaggttttctgccattcttaaccaaggctgcctcttccaacagggcgggaatcagacctactcccctaggtcacaactctgggaaggatacagagcccccacccttcactgagttctctggatttgttctcagtgccttagcaacgaaaacctgtgcttgtgtgtgtgtggcggcggggagggaggatcctgtttcccacctccttctcctcccctgtactccccagtgccttccttgttctggtggagctggggtttctctcctccccagtcccacaacactgccaaaaatctgtgtatgtgccattgggtggggcagccccaagcctcctggggaggcagggcaaaaacaggtgccctcatcgtggtctgtgccatgtcccgtctctatggtggttgaggagaaaggcggggaagcttcctcagccttgcagatatgtgtggcatttactagccagagctctgaaaggcagtgctgtctgtttcttgtactgggaccaaagtaaaaatccaagcacattccccttgcagttaggggaggccctactgccttctcaaagcagagaggcagcttatcaaactcagcccaaaactctgtttacatgggtggggagatggagcagggaagtacagagtgggatggtcaggacctgggccattgcaaccaaaatggggacttcctgggtagggaggtcactccctctactcactgagctaggattagggagggttattgccccaaccattgcaatgggaggtggagggacaggctcagcctcctcattgtctaaatgaggcctaaatgtgtgaagtgcgatttctgcttttgtgtaccccaccaccccattaccacagctgcctttgtgtgtttgtgtcaataaaaagccaaaccctgggaaaaaaaaaaaaaaaaaaaaaaaaaaaaaaaaaaaaaaaaaaaa

SEQ ID NO: 4876 - protein, 393 aa, Homo sapiens
MSDEREVAEAATGEDASSPPPKTEAASDPQHPAASEGAAAAAASPPLLRCLVLTGFGGYDKVKLQSRPAAPPAPGPGQLTLRLRACGLNFADLMARQGLYDRLPPLPVTPGMEGAGVVIAVGEGVSDRKAGDRVMVLNRSGMWQEEVTVPSVQTFLIPEAMTFEEAAALLVNYITAYMVLFDFGNLQPGHSVLVHMAAGGVGMAAVQLCRTVENVTVFGTASASKHEALKENGVTHPIDYHTTDYVDEIKKISPKGVDIVMDPLGGSDTAKGYNLLKPMGKVVTYGMANLLTGPKRNLMALARTWWNQFSVTALQLLQANRAVCGFHLGYLDGEVELVSGVVARLLALYNQGHIKPHIDSVWPFEKVADAMKQMQEKKNVGKVLLVPGPEKEN

SEQ ID NO: 4877 - DNA, 684 bp, Homo sapiens
atggaggggcagagcggccgctgcaagatcgtggtggtgggagacgcagagtgcggcaagacggcgctgctgcaggtgttcgccaaggacgcctatcccgggagttatgtccccaccgtgtttgagaactacactgcgagctttgagatcgacaagcgccgcattgagctcaacatgtgggacacttcaggttcctcttactatgataatgtccggcctctggcctatcctgattctgatgctgtgctcatctgcttcgacattagccgaccagaaacactggacagtgttctcaagaagtggcaaggagagactcaagagttctgccccaatgccaaggttgtgctggttggctgtaaactggacatgcggactgacctggccacactgagggagctgtccaagcagaggcttatccctgttacacatgagcagggcactgtgctggccaagcaggtgggggctgtgtcctatgttgagtgctcctcccggtcctctgagcgcagcgtcagggatgtcttccatgtggctacagtggcctcccttggccgtggccataggcagctgcgccgaactgactcacgccggggaatgcagcgatccgctcagctgtcaggacggccagaccgggggaatgagggcgagatacacaaggatcgagccaaaagctgcaacctcatgtga

SEQ ID NO: 4878 - protein, 227 aa, Homo sapiens
MEGQSGRCKIVVVGDAECGKTALLQVFAKDAYPGSYVPTVFENYTASFEIDKRRIELNMWDTSGSSYYDNVRPLAYPDSDAVLICFDISRPETLDSVLKKWQGETQEFCPNAKVVLVGCKLDMRTDLATLRELSKQRLIPVTHEQGTVLAKQVGAVSYVECSSRSSERSVRDVFHVATVASLGRGHRQLRRTDSRRGMQRSAQLSGRPDRGNEGEIHKDRAKSCNLM

SEQ ID NO: 4879 - DNA, 3784 bp, Homo sapiens
ggcggaagcacgatctccggcagcggcctgggaactcttagctgagcaggcgagagcatcatggataccgacttatatgatgagtttgggaattatattggaccagagcttgattctgatgaagatgatgatgaattgggtagagagaccaaagatcttgatgagatggatgatgatgacgacgacgatgacgtaggagatcatgacgatgaccaccctgggatggaggtggtgctgcatgaggacaagaagtactacccaacagccgaggaggtgtatggtcctgaggtggagaccatagttcaagaggaagacactcagcctctcacagaacccattattaagccagtgaaaaccaagaaattcactctgatggagcagacattacctgttacggtgtatgagatggatttcttggcggatctgatggataactcagagctcatcagaaatgtgaccctttgtggacatctccaccatggcaagacatgttttgtggattgtttaattgaacagactcacccggaaatcagaaagcgctatgaccaagatctgtgctatactgacatcctcttcacagagcaagagagaggtgtaggcatcaaaagcactcctgtgacagtggtcttgccagacaccaaaggaaaatcttatctcttcaatatcatggacactccaggacatgtgaatttctctgatgaggtcacagctggcttgcgcatctcagatggagtggtccttttcattgatgctgctgagggggtgatgctgaacacagagcggctgatcaagcatgcggtgcaggagaggctggcagtcactgtgtgcatcaacaagattgaccggctgatcctggagctgaagctgcctccaactgatgcttattacaagctgcgccacattgtggatgaggtcaatggattaataagcatgtattccactgatgagaacctgatcctttccccactcctgggtaacgtctgcttctccagctcccagtacagcatctgcttcacgctgggctcctttgccaagatctatgccgacacctttggtgacattaattaccaagaatttgctaaaagactctggggtgacatctacttcaaccctaagacgcgaaagttcaccaaaaaggccccaactagcagctcccagagaagtttcgtggagtttatcttggagcctctttataagatcctcgcccaggttgtaggtgacgtggacaccagcctcccacggaccctagacgagcttggcatccacctgacgaaggaggagctgaagctgaacatccgccccttgctcaggctggtctgcaaaaagttctttggcgagttcacaggctttgtggacatgtgtgtgcagcatatcccttctccaaaggtgggcgccaagcccaagattgagcacacctacaccggtggtgtggactccgacctcggcgaggctatgagtgactgtgaccctgatggccccctgatgtgccacactactaagatgtacagcacagatgatggagtccagtttcacgcctttggccgggtgctgagtggcaccattcatgctgggcagcctgtgaaggtactgggggagaactacaccctggaggatgaggaagactcccagatatgcaccgtgggccgcctttggatctctgtggccaggtaccacatcgaggtgaaccgtgttcctgctggcaactgggttctgattgaaggtgttgatcaaccaattgtgaagacagcaaccataaccgaaccccgaggcaatgaggaggctcagattttccgacccttgaagttcaataccacatctgttatcaagattgctgtggagccagtcaacccctcagagctgcccaagatgcttgatggcctgcgcaaggtcaacaagagctatccatccctcaccaccaaggtggaggagtctggcgagcatgtgatcctgggcactggggagctctacctggactgtgtgatgcatgatttgcggaagatgtactcagagatagacatcaaggtggctgacccagttgtcacgttttgtgagacggtggtggaaacatcctccctcaagtgctttgctgaaacgcctaataagaagaacaagatcaccatgattgctgagcctcttgagaagggcctggcagaggacatagagaatgaggtggtccagattacgtggaacaggaagaagctgggagagttcttccagaccaagtacgattgggatctgctggctgcccgttccatctgggcttttggccctgatgcgactggccccaacattctggtggatgatactctgccctctgaggtggacaaggctcttcttggttcagtgaaggacagcatcgttcaaggtttccagtggggaaccagggagggccccctctgtgatgaattgattcggaatgtcaagtttaagatcctggatgcggtggttgcccaggagcccctgcaccggggcgggggccagatcatccccacagccaggagagtcgtctactctgccttcctcatggctactcctcgtctgatggagccttactactttgtagaggtccaggcccctgcagattgcgtctctgcagtttataccgtcctggccaggcgcagggggcacgtgactcaggatgcacccatcccaggctcccctctgtacaccatcaaagcttttatcccggccatcgactcttttggctttgagactgatctccggactcacacccagggacaagccttttctctgtctgtcttccaccactggcagattgtgcctggtgatcccctggacaagagcattgtcatccgccccttggagccacagccagctcctcacctggcccgggaattcatgatcaaaacccgccgtaggaagggcctcagtgaagatgtgagcatcagcaaattcttcgatgatcctatgttgctggaacttgccaaacaggatgttgtgctcaattaccccatgtgagtgcgtggactcctgggagctcctgctccctacagtgggctgcaactcctgtacttgaagctgagacctcatatgacgtggccttcgtgttgtcagagagtgtctggaagctgctgttgccatcttgaacaactcaccaacctccaacccagagccccagtgagagaggagcatttggcctcctgcttccttctgtggcctctgccgggctccattcccaaggaaaagagaggagcttgggctcacagaaagagaaggggatgaaaccccaaggggccctatctttgggatttacatggaattttattttctacaagtttgaccttagccatggtttgcaagtgaacagaacattctgacctctgtcttgctctgctcctttcatcctcgtctcccctgccccatctggtgcttacattctgaatatatgtcatctcccaagaggcttcactgcctctgcttccagctgcagcctccttcctgcctgggtccccagggaagccgcctgccttttaattcagtgttcccatgagcgccaaggccccattattgcccccttgctcccactccatgctgcttctgggtgggacctaagatggcttgggagttgttgggttcctgcgatcagaagtctaccccaccacctcctcaggaaactgctgcctcccctaagaatcttccttgccctggagtagggggccagagcactttgatttccagccatttactccaagtcctctccccagctaccaccagtcccttactctgttctcccccagtgaaaaagagtctgttgattttcctc

SEQ ID NO: 4880 - DNA, 3030 bp, Homo sapiens
  unsure 149: unknown base
agagccagagcaggatggagaggagacgcatcacctccgctgctcgccgctcctacgtctcctcaggggagatgatggtggggggcctggctcctggccgccgtctgggtcctggcacccgcctctccctggctcgaatgccccctccnactcccgacccgggtggatttctccctggctggggcactcaatgctggcttcaaggagacccgggccagtgagcgggcagagatgatggagctcaatgaccgctttgccagctacatcgagaaggttcgcttcctggaacagcaaaacaaggcgctggctgctgagctgaaccagctgcgggccaaggagcccaccaagctggcagacgtctaccaggctgagctgcgagagctgcggctgcggctcgatcaactcaccgccaacagcgcccggctggaggttgagagggacaatctggcacaggacctggccactgtgaggcagaagctccaggatgaaaccaacctgaggctggaagccgagaacaacctggctgcctatagacaggaagcagatgaagccaccctggcccgtctggatctggagaggaagattgagtcgctggaggaggagatccggttcttgaggaagatccacgaggaggaggttcgggaactccaggagcagctggcccgacagcaggtccatgtggagcttgacgtggccaagccagacctcaccgcagccctgaaagagatccgcacgcagtatgaggcaatggcgtccagcaacatgcatgaagccgaagagtggtaccgctccaagtttgcagacctgacagacgctgctgcccgcaacgcggagctgctccgccaggccaagcacgaagccaacgactaccggcgccagttgcagtccttgacctgcgacctggagtctctgcgcggcacgaacgagtccctggagaggcagatgcgcgagcaggaggagcggcacgtgcgggaggcggccagttatcaggaggcgctggcgcggctggaggaagaggggcagagcctcaaggacgagatggcccgccacttgcaggagtaccaggacctgctcaatgtcaagctggccctggacatcgagatcgccacctacaggaagctgctagagggcgaggagaaccggatcaccattcccgtgcagaccttctccaacctgcagattcgagaaaccagcctggacaccaagtctgtgtcagaaggccacctcaagaggaacatcgtggtgaagaccgtggagatgcgggatggagaggtcattaaggagtccaagcaggagcacaaggatgtgatgtgaggcaggacccacctggtggcctctgccccgtctcatgaggggcccgagcagaagcaggatagttgctccgcctctgctggcacatttccccagacctgagctccccaccaccccagctgctcccctccctcctctgtccctaggtcagcttgctgccctaggctccgtcagtatcaggcctgccagacggcacccacccagcacccagcaactccaactaacaagaaactcacccccaaggggcagtctggaggggcatggccagcagcttgcgttagaatgaggaggaaggagagaaggggaggagggcggggggcacctactacatcgccctccacatccctgattcctgttgttatggaaactgttgccagagatggaggttctctcggagtatctgggaactgtgcctttgagtttcctcaggctgctggaggaaaactgagactcagacaggaaagggaaggccccacagacaaggtagccctggccagaggcttgttttgtcttttggtttttatgaggtgggatatccctatgctgcctaggctgaccttgaactcctgggctcaagcagtctacccacctcagcctcctgtgtagctgggattatagattggagccaccatgcccagctcagagggttgttctcctagactgaccctgatcagtctaagatgggtggggacgtcctgccacctggggcagtcacctgcccagatcccagaaggacctcctgagcgatgactcaagtgtctcagtccacctgagctgccatccagggatgccatctgtgggcacgctgtgggcaggtgggagcttgattctcagcacttgggggatctgttgtgtacgtggagagggatgaggtgctgggagggatagaggggggctgcctggcccccagctgtgggtacagagaggtcaagcccaggaggactgccccgtgcagactggaggggacgctggtagagatggaggaggaggcaattgggatggcgctaggcatacaagtaggggttgtgggtgaccagttgcacttggcctctggattgtgggaattaaggaagtgactcatcctcttgaagatgctgaaacaggagagaaaggggatgtatccatgggggcagggcatgactttgtcccatttctaaaggcctcttccttgctgtgtcataccaggccgccccagcctctgagcccctgggactgctgcttcttaaccccagtaagccactgccacacgtctgaccctctccaccccatagtgaccggctgcttttccctaagccaagggcctcttgcggtcccttcttactcacacacaaaatgtacccagtattctaggtagtgccctattttacaattgtaaaactgaggcacgagcaaagtgaagacactggctcatattcctgcagcctggaggccgggtgctcagggctgacacgtccaccccagtgcacccactctgctttgactgagcagactggtgagcagactggtgggatctgtgcccagagatgggactgggagggcccacttcagggttctcctctcccctctaaggccgaagaagggtccttccctctccccaagacttggtgtcctttccctccactccttcctgccacctgctgctgctgctgctgctaatcttcagggcactgctgctgcctttagtcgctgaggaaaaataaagacaaatgctgcgccctt

SEQ ID NO: 4881 - DNA, 440 bp, Homo sapiens
cctctctccgggccgtgcctccaagatgacaaagaaaagaaggaacaatgggcgtgccaaaaagggccgcggccacctgcaacctattcgctgcactaactgtgcccgatgcgtgcccaaggacaaggccattaagaaattcgtcattcgaaacatagtggaggccgcaacagtcagggacatttctgaagtgagcgtcttcgatgcctatgtgcttcccaaactgtatgtgaagctacattactgtgtgagttgtgcaattcacagcaaagtagtcaggaatcgatctcgtgaagcccgcaaggaccgaacacccccaccccgatttagacctgcgggtgctgccccaggtcccccaccaaagcccatgtaaggagctgagttcttaaagactgaagacaggctattctctggagaaaaataaaatggaaattgtactt

SEQ ID NO: 4882 - protein, 115 aa, Homo sapiens
MTKKRRNNGRAKKGRGHLQPIRWTNCARCVPKDKGIKKFVIRNIVEAATVRDISEVSVFDAYVLPKLYVKLHYCVSCAIHSKVVRNRSREARKDRTPPPRFRPAGAAPGPPPKPM

SEQ ID NO: 4883 - DNA, 4912 bp, Homo sapiens
ggcacgaggctgctctcgcaactcaagatggcggacgagagtgagacagcagtgaagccgccggcacctccgctgccgcagatgatggaagggaacgggaacggccatgagcactgcagcgattgcgagaatgaggaggacaacagctacaaccggggtggtttgagtccagccaatgacactggagccaaaaagaagaaaaagaaacaaaaaaagaagaaagaaaaaggcagtgagacagattcagcccaggatcagcctgtgaagatgaactctttgccagcagagaggatccaggaaatacagaaggccattgagctgttctcagtgggtcagggacctgccaaaaccatggaggaggctagcaagcgaagctaccagttctgggatacgcagcccgtccccaagctgggcgaagtggtgaacacccatggccccgtggagcctgacaaggacaatatccgccaggagccctacaccctgccccagggcttcacctgggatgctttggacttgggcgatcgtggtgtgctaaaagaactgtacaccctcctgaatgagaactatgtggaagatgatgacaacatgttccgatttgattattccccggagtttcttttgtgggctctccggccacccggctggctcccccagtggcactgtggggttcgagtggtctcaagtcggaaattggttgggttcattagcgccatcccagcaaacatccatatctatgacacagagaagaagatggtagagatcaacttcctgtgtgtccacaagaagctgcgttccaagagggttgctccagttctgatccgagagatcaccaggcgggttcacctggagggcatcttccaagcagtttacactgccggggtggtactaccaaagcccgttggcacctgcaggtattggcatcggtccctaaacccacggaagctgattgaagtgaagttctcccacctgagcagaaatatgaccatgcagcgcaccatgaagctctaccgactgccagagactcccaagacagctgggctgcgaccaatggaaacaaaggacattccagtagtgcaccagctcctcaccaggtacttgaagcaatttcaccttacgcccgtcatgagccaggaggaggtggagcactggttctacccccaggagaatatcatcgacactttcgtggtggagaacgcaaacggagaggtgacagatttcctgagcttttatacgctgccctccaccatcatgaaccatccaacccacaagagtctcaaagctgcttattctttctacaacgttcacacccagacccctcttctagacctcatgagcgacgcccttgtcctcgccaaaatgaaagggtttgatgtgttcaatgcactggatctcatggagaacaaaaccttcctggagaagctcaagtttggcataggggacggcaacctgcagtattacctttacaattggaaatgccccagcatgggggcagagaaggttggactggtgctacaataaccagtcaccagtgcgattctggataaagccactgaaaattcgaaccaggaaatggaaccccaccactgttggtccaattttcacacacgtgagaatccctggcaaagggagcagaactgaaccggctttaccaaaccgccagcgaacttgacaattgtattgcgatggcgtgggctgcgtgacgtcacctccggtcgtgtctctggtctccgtgttttccagttaattacatcctcatgcagccgtgatcaagggaatgtaactgctgaaaactagctcgtgattggcatataatggagttaacgggtgaataataaaagtatatatatatattatatatatataaatattttaaatatctttcatgttccaaatgtacaaggatgtttggtctttaatgaaaagctgaatctagatcattcctcagaatgaggacccgaggacagtggcagacagacgcgttggcacagttcatggtttcctccagaggagacattggcttatcatggggaaaaagaggatctggagaacctcatccagctccccttctgaatcagctgggatgactggctttgagaaggaagggaagatggaacaggctcagatctcatgggatagcacgtggagctcttggctggggctgaccctgggcagggactttcctgcagggccagacctgcctgcattctgagacaaagcaatggacggtccgcagaagcagacctcattgattgagtcctttcttccatccccttggcctgctccctgtaggaagtcatcctgccaactgatttaaaagggctctttagccagttgttgccaaccttatagggatgagtcccctgtgagattttgcttttccactgcctgggatgatgcagtttgaagaggcccttggacctccttgtaacatcagggacctttggagaccattatcagtgtaagccctgcttagctcatcttagagcaaagagccagcaccctgatgtccctggggtggctaggcaggagtggcgtggggccaatacccagaccccttcagccaccagcccctggcctgtgccttccaacccattagccatttcttgttgtgcccctttccaagatacagcctgcaagtggtagcaagaagtgattagaggcagatctggacttggcaacagaagtggtttcccatctccattgtctgagtctgattttcgctgatgctgttttgtggatttttgtggtagtgatggttgtcagtgctgccagtttcccaaaacgtaatcaagcctctggtcacatggctgtcgatgtaggcattctggagtggtgttcagccaagtgaccgggcaaaattgggctgtgaaattgtacttccaggcttggatgtaatttttgctctagagagaagcaagtggtgggaaggaggtagcatgacgtgtggtgtgcgggtttccttgctgccgtcacctctccgctcatacaggaatgaagccttagccaggaggccaggctcagccctgtgccactcaccgaagccactttctacaggccagcaggggcttgttgcaggctgtgggttttggtgtggtttgtcagaggctaattctgcagagtttccaaaaccagaagacatcgtatgcttgggatgggggccgtgccacccgtgggaatgctgcccgctctgcagactgctgctagagccagcaactccactaaggtggattttcatcaggggcctgcagggccctcccttttcccattgttcctgcgctgcaaattgcaggccccagcaatcgtgactgacgtttgctccttgactccaagaaactgagaccaaagaagctgctgttcttagcaagatgcgcactgcattccacaggtgggaggagtcggagaggcaggggcttgctttgcagccccacagacaacagttgcacagtgcctcaagccccagagtggctcaccctgtccagacctttgaggatatcaaaggacaaagtgcccaagtctttcctaccttgggggaacctggaacttggaaaggctccctgtcctagtcttgatctgttctgggccaggtcccagcttgagctgcctctgagatttgggctgtgcggatctctggagtgagctctgtttcggttgacccaggtcatggaatggaaacggtgaggccccagtggctgttctggaagaaacagatctcctggcaaaggccccagcatctccctcactgaaaccaggtggccggctcctcggactctgctttatgttgcggtgagaactctgcccaggtgtgcagggtttggcttgtgggctgcttgctgctcatctgatttttgtcccagtagtccctgcgttcttcattcaaccccttctgggacttcagctcagagagcaccatcccgggggtcagggcctccccacaggagccctgcagtgtggtagcgccatggctgtctcaaaccaagcaaaggaaggaccctgaggccttcacgctaaccatcctcgagcaactgctgttggaaggcctccctgggcctggcccccaccctctgccacccagtcctcccagctgccatgtttcaaagacgacctttacctcctgcctttggattgactctgcatttgaccacggactccagtctgtgtgtagggagagagctgagtaggaggcctccactccggatcgaggcctgtatagggctcgtttccccacacatgcctatttctgaagaggcttctgtcttatttgaaggccagcccacacccagctactttaacaccaggtttatggaaaatgtcaggccttccccacaactcctgtctaactgctgtcgcccccctacttgctggctctcagaagcctaggggagtccctgtggtcctgaattctttccccaaagacgaccagcatttaaccaacctaagggcccaaaggccttggacaactgcatggagctgcactctaggagaaggaggggaaccagatgttagatcaggggagggagcaggagtgtccctcccgtcagtgcctacccacctgtgaggcagccttctgatggcctggcccaccttccccagaaccaggggaggcctgaggcttcagttttactctgctgcaaaatgaaggcgggcctgcaagccgactacacctacggaggctgttgaggacaatttcattccattaaattaaaaaatactgactggctggcaggcaggtgccatgtctgggaacagggacgggggagcttcacctttttgtcttggcttttctttgggctgtgggggggcatccatttccagggtcggggaggaaataccaaatgcattgttgttctgctcaatacatctcacttgtttctaataaagaaagcagctgaacaaaaaaaaaaaaaaaaaaaaa

SEQ ID NO: 4884 - protein, 496 aa, Homo sapiens
MADESETAVKPPAPPLPQMMEGNGNGHEHCSDCENEEDNSYNRGGLSPANDTGAKKKKKKQKKKKEKGSETDSAQDQPVKMNSLPAERIQEIQKAIELFSVGQGPAKTMEEASKRSYQFWDTQPVPKLGEVVNTHGPVEPDKDNIRQEPYTLPQGFTWDALDLGDRGVLKELYTLLNENYVEDDDNMFRFDYSPEFLLWALRPPGWLPQWHCGVRVVSSRKLVGFISAIPANIHIYDTEKKMVEINFLCVHKKLRSKRVAPVLIREITRRVHLEGIFQAVYTAGVVLPKPVGTCRYWHRSLNPRKLIEVKFSHLSRNMTMQRTMKLYRLPETPKTAGLRPMETKDIPVVHQLLTRYLKQFHLTPVMSQEEVEHWFYPQENIIDTFVVENANGEVTDFLSFYTLPSTIMNHPTHKSLKAAYSFYNVHTQTPLLDLMSDALVLAKMKGFDVFNALDLMENKTFLEKLKFGIGDGNLQYYLYNWKCPSMGAEKVGLVLQ

SEQ ID NO: 4885 - DNA, 2773 bp, Homo sapiens
ttcgctcgccgcctcgctcagagccggggccgggccagagcggcgccccgctgccctgtccccgcgtgcagaccccgggcccggccccggccccccgccaagccatgctgtgcggccgctggaggcgttgccgccgcccgcccgaggagcccccggtggccgcccaggtcgcagcccaagtcgcggcgccggtcgctctcccgtccccgccgactccctccgatggcggcaccaagaggcccgggctgcgggcgctgaagaagatgggcctgacggaggacgaggacgtgcgcgccatgctgcggggctcccggctccgcaagatccgctcgcgcacgtggcacaaggagcggctgtaccggctgcaggaggacggcctgagcgtgtggttccagcggcgcatcccgcgtgcgccatcgcagcacatcttcttcgtgcagcacatcgaggcggtccgcgagggccaccagtccgagggcctgcggcgcttcgggggtgccttcgcgccagcgcgctgcctcaccatcgccttcaagggccgccgcaagaacctggacctggcggcgcccacggctgaggaagcgcagcgctgggtgcgcggtctgaccaagctccgcgcgcgcctggacgccatgagccagcgcgagcggctagaccactggatccactcctatctgcaccgggctgactccaaccaggacagcaagatgagcttcaaggagatcaagagcctgctgagaatggtcaacgtggacatgaacgacatgtacgcctacctcctcttcaaggagtgtgaccactccaacaacgaccgtctagagggggctgagatcgaggagttcctgcggcggctgctgaagcggccggagctggaggagatcttccatcagtactcgggcgaggaccgcgtgctgagtgcccctgagctgctggagttcctggaggaccagggcgaggagggcgccacactggcccgcgcccagcagctcattcagacctatgagctcaacgagacagccaagcagcatgagctgatgacactggatggcttcatgatgtacctgttgtcgccggagggggctgccttggacaacacccacacgtgtgtgttccaggacatgaaccagccccttgcccactacttcatctcttcctcccacaacacctatctgactgactcccagatcggggggcccagcagcaccgaggcctatgttagggcctttgcccagggatgccgctgcgtggagctggactgctgggaggggccaggaggggagcccgtcatctatcatggccataccctcacctccaagattctcttccgggacgtggtccaagccgtgcgcgaccatgccttcacgctgtccccttaccctgtcatcctatccctggagaaccactgcgggctggagcagcaggctgccatggcccgccacctctgcaccatcctgggggacatgctggtgacacaggcgctggactccccaaatcccgaggagctgccatccccagagcagctgaagggccgggtcctggtgaagggaaagaagttgcccgctgctcggagcgaggatggccgggctctgtcggatcgggaggaggaggaggaggatgacgaggaggaagaagaggaggtggaggctgcagcgcagaggcggctggccaagcagatctccccggagctgtcggccctggctgtgtactgccacgccacccgcctgcggaccctgcaccctgcccccaacgccccacaaccctgccaggtcagctccctcagcgagcgcaaagccaagaaactcattcgggaggcagggaacagctttgtcaggcacaatgcccgccagctgacccgcgtgtacccgctggggctgcggatgaactcagccaactacagtccccaggagatgtggaactcgggctgtcagctggtggccttgaacttccagacgccaggctacgagatggacctcaatgccgggcgcttcctagtcaatgggcagtgtggctacgtcctaaaacctgcctgcctgcggcaacctgactcgacctttgaccccgagtacccaggacctcccagaaccactctcagcatccaggtgctgactgcacagcagctgcccaagctgaatgccgagaagccacactccattgtggaccccctggtgcgcattgagatccatggggtgcccgcagactgtgcccggcaggagactgactacgtgctcaacaatggcttcaacccccgctgggggcagaccctgcagttccagctgcgggctccggagctggcactggtccggtttgtggtggaagattatgacgccacctcccccaatgactttgtgggccagtttacactgcctcttagcagcctaaagcaagggtaccgccacatacacctgctttccaaggacggggcctcactgtcaccagccacgctcttcatccaaatccgcatccagcgctcctgagtagctgggactacaggcacaggccaccacacctggctaatgtttaaattttatgtagagatggcggggggggcgggggtctccctatgctgcccaggctggtctcgagctcctgacctcaagtgatcctcctgccccagcattccaaagtgctgggattacaggtgtgagccactgcctggcctggccgtaggtttgtaactgtttcatagaagagccctggagaagacagtagaatgagcctatctagtttaaaaaataaagaagcacgttgatttcaaaaaaaaaaaaaaaaaaaa

SEQ ID NO: 4886 - protein, 789 aa, Homo sapiens
MLCGRWRRCRRPPEEPPVAAQVAAQVAAPVALPSPPTPSDGGTKRPGLRALKKMGLTEDEDVRAMLRGSRLRKIRSRTWHKERLYRLQEDGLSVWFQRRIPRAPSQHIFFVQHIEAVREGHQSEGLRRFGGAFAPARCLTIAFKGRRKNLDLAAPTAEEAQRWVRGLTKLRARLDAMSQRERLDHWIHSYLHRADSNQDSKMSFKEIKSLLRMVNVDMNDMYAYLLFKECDHSNNDRLEGAEIEEFLRRLLKRPELEEIFHQYSGEDRVLSAPELLEFLEDQGEEGATLARAQQLIQTYELNETAKQHELMTLDGFMMYLLSPEGAALDNTHTCVFQDMNQPLAHYFISSSHNTYLTDSQIGGPSSTEAYVRAFAQGCRCVELDCWEGPGGEPVIYHGHTLTSKILFRDVVQAVRDHAFTLSPYPVILSLENHCGLEQQAAMARHLCTILGDMLVTQALDSPNPEELPSPEQLKGRVLVKGKKLPAARSEDGRALSDREEEEEDDEEEEEEVEAAAQRRLAKQISPELSALAVYCHATRLRTLHPAPNAPQPCQVSSLSERKAKKLIREAGNSFVRHNARQLTRVYPLGLRMNSANYSPQEMWNSGCQLVALNFQTPGYEMDLNAGRFLVNGQCGYVLKPACLRQPDSTFDPEYPGPPRTTLSIQVLTAQQLPKLNAEKPHSIVDPLVRIEIHGVPADCARQETDYVLNNGFNPRWGQTLQFQLRAPELALVRFVVEDYDATSPNDFVGQFTLPLSSLKQGYRHIHLLSKDGASLSPATLFIQIRIQRS

SEQ ID NO: 4887 - DNA, 670 bp, Homo sapiens
cggccacgaggcggaatcccttctgctctcccagcgcagcgccgccgcccggcccctccagcttcccggaccatggccaacctggagcgcaccttcatcgccatcaagccggacggcgtgcagcgcggcctggtgggcgagatcatcaagcgcttcgagcagaagggattccgcctcgtggccatgaagttcctccgggcctctgaagaacacctgaagcagcactacattgacctgaaagaccgaccattcttccctgggctggtgaagtacatgaactcagggccggttgtggccatggtctgggaggggctgaacgtggtgaagacaggccgagtgatgcttggggagaccaatccagcagattcaaagccaggcaccattcgtggggacttctgcattcaggttggcaggaacatcattcatggcagtgattcagtaaaaagtgctgaaaaagaaatcagcctatggtttaagcctgaagaactggttgactacaagtcttgtgctcatgactgggtctatgaataagaggtggacacaacagcagtctccttcagcacggcgtggtgtgtccctggacacagctcttcattccattgacttagaggcaacaggattgatcattcttttatagagcatatttgccaataaagcttttggaagccgg

SEQ ID NO: 4888 - protein, 152 aa, Homo sapiens
MANLERTFIAIKPDGVQRGLVGEIIKRFEQKGFRLVAMKFLRASEEHLKQHYIDLKDRPFFPGLVKYMNSGPVVAMVWEGLNVVKTGRVMLGETNPADSKPGTIRGDFCIQVGRNIIHGSDSVKSAEKEISLWFKPEELVDYKSCAHDWVYE

SEQ ID NO: 4889 - DNA, 732 bp, Homo sapiens
tgctgcgaaccacgtgggtcccgggcgcgtttcgggtgctggcggctgcagccggagttcaaacctaagcagctggaaggaaccatggccaactgtgagcgtaccttcattgcgatcaaaccagatggggtccagcggggtcttgtgggagagattatcaagcgttttgagcagaaaggattccgccttgttggtctgaaattcatgcaagcttccgaagatcttctcaaggaacactacgttgacctgaaggaccgtccattctttgccggcctggtgaaatacatgcactcagggccggtagttgccatggtctgggaggggctgaatgtggtgaagacgggccgagtcatgctcggggagaccaaccctgcagactccaagcctgggaccatccgtggagacttctgcatacaagttggcaggaacattatacatggcagtgattctgtggagagtgcagagaaggagatcggcttgtggtttcaccctgaggaactggtagattacacgagctgtgctcagaactggatctatgaatgacaggagggcagaccacattgcttttcacatccatttcccctccttcccatgggcagaggaccaggctgtaggaaatctagttatttacaggaacttcatcataatttggagggaagctcttggagctgtgagttctccctgtacagtgttaccatccccgaccatctgattaaaatgcttcctcccagc

SEQ ID NO: 4890 - protein, 152 aa, Homo sapiens
MANCERTFIAIKPDGVQRGLVGEIIKRFEQKGFRLVGLKFMQASEDLLKEHYVDLKDRPFFAGLVKYMHSGPVVAMVWEGLNVVKTGRVMLGETNPADSKPGTIRGDFCIQVGRNIIHGSDSVESAEKEIGLWFHPEELVDYTSCAQNWIYE

SEQ ID NO: 4891 - DNA, 2523 bp, Homo sapiens
gacaacttgagctgaaagcgaaaaactatgctgaccagattagcagacttgaagaaagagaagcagaactgaagaaggaatataatgcattacatcaaagacacactgagatgatccataattatatggaacatttagaaagaacaaaacttcatcagctctcagggagtgatcaactagaatccacagctcatagtagaattagaaaagaacgccctatatcattaggaattttcccattacctgctggagatggattgcttacacctgatgctcagaaaggaggagagacccctggatctgagcaatggaaatttcaggaattaagtcaaccacgttctcataccagcctgaaggatgagctttctgatgttagccaaggcggatctaaagctaccactccagcatcaacagctaattcagatgtggcaacaattcctactgatactcccttaaaggaagaaaacgaaggatttgtgaaggttacagatgcgccaaataaatcagagataagcaaacacattgaagtacaggtagcccaggaaactagaaatgtatctactggctctgctgaaaatgaagaaaagtcagaagttcaagcaatcatcgaatctactcctgagctggatatggacaaagatctcagtggatataaaggttcaagcactcccaccaaaggcatagagaacaaagcttttgatcgcaatacagaatctctctttgaagaactgtcttcagctggctcaggcctaataggagatgtggatgaaggagcagatttactaggaatgggtcgggaagttgagaatcttatattagaaaatacacaactgttggaaaccaaaaatgctttgaacatagtgaagaatgatttgatagcaaaagtggatgaactgacctgtgagaaagatgtgctgcaaggggaattggaggctgtgaagcaagccaaactgaaactagaggaaaagaacagagaattggaggaagagcttaggaaagctcgggcagaagctgaagatgcaaggcaaaaagcaaaagatgacgatgatagtgatattcccacagcccagaggaaacggtttactagagtagaaatggcccgtgttctcatggagcgaaaccagtataaagagagattgatggagcttcaggaagctgttcgatggacagagatgattcgggcatcacgagaaaatccagccatgcaggaaaaaaaaaggtcaagcatttggcagtttttcagccgacttttcagctcctcaagtaacacgactaagaagcctgaaccacctgttaatctgaagtacaatgcacccacgtctcatgttactccgtccgtcaagaaaagaagcagcaccttatctcagctccctggggataagtccaaagcctttgatttccttagtgaagaaactgaagctagtttagcctcacgcagagaacaaaagagagagcagtatcgtcaggtaaaagcacatgttcagaaggaagacggtagagtgcaggcttttggctggagtctgcctcagaagtacaaacaggtaaccaatggtcaaggtgaaaataagatgaaaaatttacctgtgcctgtctatctcagacctctggataaaaaagatacatcaatgaagctgtggtgtgctgttggagtcaatttatctggtgggaagaccagagatggtggttctgttgttggagcaagtgtattttacaaggatgttgctggtttggatacagaaggcagtaaacagcgaagtgcctctcagagtagtttagataagttagatcaggaacttaaggaacagcagaaggagttaaaaaatcaagaagaattatccagtctagtttggatctgtaccagcactcattcggctacaaaagttcttattattgatgctgttcaacctggcaacatcctagacagtttcactgtttgcaactctcatgttctgtgcattgcaagtgtgccaggtgcacgagaaacagactaccctgcaggagaagatctttcagaatctggtcaggtagacaaagcatctttatgtggaagtatgacaagcaacagctcagcagagacagacagcctgttaggaggcatcacagtggttggttgttctgcagaaggtgtgacgggagctgccacttcccctagtacaaatggtgcttctccagtgatggataaaccaccagaaatggaagcagaaaatagtgaggttgatgaaaatgttccaacagcagaagaagcaactgaagctacagaagggaatgcggggtcagctgaagacacagtggacatctcccaaactggcgtctacacagagcatgtctttacagatcctttgggagttcagatcccagaagacctctccccagtgtatcagtcgaggtataataatgggtcatcaacttaggcaactgggtgaagtgcacaaataaaaggaaccaaaataatctcaaacagtcaaaagatttccactaattagtgtcactgtggtggattaaaagatacctattcttgtgata

SEQ ID NO: 4892 - protein, 766 aa, Homo sapiens
MIHNYMEHLERTKLHQLSGSDQLESTAHSRIRKERPISLGIFPLPAGDGLLTPDAQKGGETPGSEQWKFQELSQPRSHTSLKDELSDVSQGGSKATTPASTANSDVATIPTDTPLKEENEGFVKVTDAPNKSEISKHIEVQVAQETRNVSTGSAENEEKSEVQAIIESTPELDMDKDLSGYKGSSTPTKGIENKAFDRNTESLFEELSSAGSGLIGDVDEGADLLGMGREVENLILENTQLLETKNALNIVKNDLIAKVDELTCEKDVLQGELEAVKQAKLKLEEKNRELEEELRKARAEAEDARQKAKDDDDSDIPTAQRKRFTRVEMARVLMERNQYKERLMELQEAVRWTEMIRASRENPAMQEKKRSSIWQFFSRLFSSSSNTTKKPEPPVNLKYNAPTSHVTPSVKKRSSTLSQLPGDKSKAFDFLSEETEASLASRREQKREQYRQVKAHVQKEDGRVQAFGWSLPQKYKQVTNGQGENKMKNLPVPVYLRPLDKKDTSMKLWCAVGVNLSGGKTRDGGSVVGASVFYKDVAGLDTEGSKQRSASQSSLDKLDQELKEQQKELKNQEELSSLVWICTSTHSATKVLIIDAVQPGNILDSFTVCNSHVLCIASVPGARETDYPAGEDLSESGQVDKASLCGSMTSNSSAETDSLLGGITVVGCSAEGVTGAATSPSTNGASPVMDKPPEMEAENSEVDENVPTAEEATEATEGNAGSAEDTVDISQTGVYTEHVFTDPLGVQIPEDLSPVYQSRYNNGSST

SEQ ID NO: 4893 - DNA, 5380 bp, Homo sapiens
ctccggcgcccgctctgcccgccgctgggtccgaccgcgctcgccttccttgcagccgcgcctcggccccatggacgccctgtgcggttccggggagctcggctccaagttctgggactccaacctgtctgtgcacacagaaaacccggacctcactccctgcttccagaactccctgctggcctgggtgccctgcatctacctgtgggtcgccctgccctgctacttgctctacctgcggcaccattgtcgtggctacatcatcctctcccacctgtccaagctcaagatggtcctgggtgtcctgctgtggtgcgtctcctgggcggaccttttttactccttccatggcctggtccatggccgggcccctgcccctgttttctttgtcacccccttggtggtgggggtcaccatgctgctggccaccctgctgatacagtatgagcggctgcagggcgtacagtcttcgggggtcctcattatcttctggttcctgtgtgtggtctgcgccatcgtcccattccgctccaagatccttttagccaaggcagagggtgagatctcagaccccttccgcttcaccaccttctacatccactttgccctggtactctctgccctcatcttggcctgcttcagggagaaacctccatttttctccgcaaagaatgtcgaccctaacccctaccctgagaccagcgctggctttctctcccgcctgtttttctggtggttcacaaagctgctaaaccctgaccctctgcggggctgcctgccgggcttcacctccccccaggatggccatctatggctaccggcatcccctggaggagaaggacctctggtccctaaaggaagaggacagatcccagatggtggtgcagcagctgctggaggcatggaggaagcaggaaaagcagacggcacgacacaaggcttcagcagcacctgggaaaaatgcctccggcgaggacgaggtgctgctgggtgcccggcccaggccccggaagccctccttcctgaaggccctgctggccaccttcggctccagcttcctcatcagtgcctgcttcaagcttatccaggacctgctctccttcatcaatccacagctgctcagcatcctgatcaggtttatctccaaccccatggccccctcctggtggggcttcctggtggctgggctgatgttcctgtgctccatgatgcagtcgctgatcttacaacactattaccactacatctttgtgactggggtgaagtttcgtactgggatcatgggtgtcatctacaggaaggctctggttatcaccaactcagtcaaacgtgcgtccactgtgggggaaattgtcaacctcatgtcagtggatgcccagcgcttcatggaccttgcccccttcctcaatctgctgtggtcagcacccctgcagatcatcctggcgatctacttcctctggcagaacctaggtccctctgtcctggctggagtcgctttcatggtcttgctgattccactcaacggagctgtggccgtgaagatgcgcgccttccaggtaaagcaaatgaaattgaaggactcgcgcatcaagctgatgagtgagatcctggacggcatcaaggtgctgaagctgtacgcctgggagcccagcttcctgaagcaggtggagggcatcaggcagggtgagccccagctgctgcgcacggcggcctacctccacaccacaaccaccttcacctggatgtgcagccccttcctggtgaccctgatcaccctctgggtgtacgtgtacgtggacccaaacaatgtgctggacgccgagaaggcctttgtgtctgtgtccttgtttaatatcttaagacttcccctcaacatgctgccccagttaatcagcaacctgactcaggccagtgtgtctctgaaacggatccagcaattcctgagccaagaggaacttgacccccagagtgtggaaagaaagaccatctccccaggctatgccatcaccatacacagtggcaccttcacctgggcccaggacctgccccccactctgcacagcctagacatccaggtcccgaaaggggcactggtggccgtggtggggcctgtgggctgtgggaagtcctccctggtgtctgccctgctgggagagatggagaagctagaaggcaaagtgcacatgaagggctccgtggcctatgtgccccagcaggcatggatccagaactgcactcttcaggaaaacgtgcttttcggcaaagccctgaaccccaagcgctaccagcagactctggaggcctgtgccttgctagctgacctggagatgctgcctggtggggatcagacagagattggagagaagggcattaacctgtctgggggccagcggcagcgggtcagtctggctcgagctgtttacagtgatgccgatattttcttgctggatgacccactgtccgcggtggactctcatgtggccaagcacatctttgaccacgtcatcgggccagaaggcgtgctggcaggcaagacgcgagtgctggtgacgcacggcattagcttcctgccccagacagacttcatcattgtgctagctgatggacaggtgtctgagatgggcccgtacccagccctgctgcagcgcaacggctcctttgccaactttctctgcaactatgcccccgatgaggaccaagggcacctggaggacagctggaccgcgttggaaggtgcagaggataaggaggcactgctgattgaagacacactcagcaaccacacggatctgacagacaatgatccagtcacctatgtggtccagaagcagtttatgagacagctgagtgccctgtcctcagatggggagggacagggtcggcctgtaccccggaggcacctgggtccatcagagaaggtgcaggtgacagaggcgaaggcagatggggcactgacccaggaggagaaagcagccattggcactgtggagctcagtgtgttctgggattatgccaaggccgtggggctctgtaccacgctggccatctgtctcctgtatgtgggtcaaagtgcggctgccattggagccaatgtgtggctcagtgcctggacaaatgatgccatggcagacagtagacagaacaacacttccctgaggctgggcgtctatgctgctttaggaattctgcaagggttcttggtgatgctggcagccatggccatggcagcgggtggcatccaggctgcccgtgtgttgcaccaggcactgctgcacaacaagatacgctcgccacagtccttctttgacaccacaccatcaggccgcatcctgaactgcttctccaaggacatctatgtcgttgatgaggttctggcccctgtcatcctcatgctgctcaattccttcttcaacgccatctccactcttgtggtcatcatggccagcacgccgctcttcactgtggtcatcctgcccctggctgtgctctacaccttagtgcagcgcttctatgcagccacatcacggcaactgaagcggctggaatcagtcagccgctcacctatctactcccacttttcggagacagtgactggtgccagtgtcatccgggcctacaaccgcagccgggattttgagatcatcagtgatactaaggtggatgccaaccagagaagctgctacccctacatcatctccaaccggtcagaagccgcctccctcgctccctgctcctccaggaattcccagcaggctctctggtgttcagggtccttgtccctcctttcccctaagcagaaaactggccctgccctgcccctgccccatttcctcctcatctgatcccccataggtggctgagcatcggagtggagttcgtggggaactgcgtggtgctctttgctgcactatttgccgtcatcgggaggagcagcctgaacccggggctggtgggcctttctgtgtcctactccttgcaggtgacatttgctctgaactggatgatacgaatgatgtcagatttggaatctaacatcgtggctgtggagagggtcaaggagtactccaagacagagacagaggcgccctgggtggtggaaggcagccgccctcccgaaggttggcccccacgtggggaggtggagttccggaattattctgtgcgctaccggccgggcctagacctggtgctgagagacctgagtctgcatgtgcacggtggcgagaaggtggggatcgtgggccgcactggggctggcaagtcttccatgaccctttgcctgttccgcatcctggaggcggcaaagggtgaaatccgcattgatggcctcaatgtggcagacatcggcctccatgacctgcgctctcagctgaccatcatcccgcaggaccccatcctgttctcggggaccctgcgcatgaacctggaccccttcggcagctactcagaggaggacatttggtgggctttggagctgtcccacctgcacacgtttgtgagctcccagccggcaggcctggacttccagtgctcagagggcggggagaatctcagcgtgggccagaggcagctcgtgtgcctggcccgagccctgctccgcaagagccgcatcctggttttagacgaggccacagctgccatcgacctggagactgacaacctcatccaggctaccatccgcacccagtttgatacctgcactgtcctgaccatcgcacaccggcttaacactatcatggactacaccagggtcctggtcctggacaaaggagtagtagctgaatttgattctccagccaacctcattgcagctagaggcatcttctacgggatggccagagatgctggacttgcctaaaatatattcctgagatttcctcctggcctttcctggttttcatcaggaaggaaatgacaccaaatatgtccgcagaatggacttgatagcaaacactgggggcaccttaagattttgcacctgtaaagtgccttacagggtaactgtgctgaatgctttagatgaggaaatgatccccaagtggtgaatgacacgcctaaggtcacagctagtttgagccagttagactagtcccccggtctcccgattcccaactgagtgttatttgcacactgcactgttttcaaataacgattttatgaaatgacctctgtcctccctctgatttttcatattttcctaaagtttcgtttctgttttttaataaaaagctttttcctcctggaacagaagacagctgctgggtcaggccacccctaggaactcagtcctgtactctggggtgctgcctgaatccattaaaaatgggagtactgatgaaataaaactacatggtcaacagtaaaaaaaaaaaaaaaaaaa

SEQ ID NO: 4894 - protein, 510 aa, Homo sapiens
MDALCGSGELGSKFWDSNLSVHTENPDLTPCFQNSLLAWVPCIYLWVALPCYLLYLRHHCRGYIILSHLSKLKMVLGVLLWCVSWADLFYSFHGLVHGRAPAPVFFVTPLVVGVTMLLATLLIQYERLQGVQSSGVLIIFWFLCVVCAIVPFRSKILLAKAEGEISDPFRFTTFYIHFALVLSALILACFREKPPFFSAKNVDPNPYPETSAGFLSRLFFWWFTKLLNPDPLRGCLPGFTSPQDGHLWLPASPGGEGPLVPKGRGQIPDGGAAAAGGMEEAGKADGTTQGFSSTWEKCLRRGRGAAGCPAQAPEALLPEGPAGHLRLQLPHQCLLQAYPGPALLHQSTAAQHPDQVYLQPHGPLLVGLPGGWADVPVLHDAVADLTTLLPLHLCDWGEVSYWDHGCHLQEGSGYHQLSQTCVHCGGNCQPHVSGCPALHGPCPLPQSAVVSTPADHPGDLLPLAEPRSLCPGWSRFHGLADSTQRSCGREDARLPGKANEIEGLAHQADE

SEQ ID NO: 4895 - DNA, 5325 bp, Homo sapiens
ctccggcgcccgctctgcccgccgctgggtccgaccgcgctcgccttccttgcagccgcgcctcggccccatggacgccctgtgcggttccggggagctcggctccaagttctgggactccaacctgtctgtgcacacagaaaacccggacctcactccctgcttccagaactccctgctggcctgggtgccctgcatctacctgtgggtcgccctgccctgctacttgctctacctgcggcaccattgtcgtggctacatcatcctctcccacctgtccaagctcaagatggtcctgggtgtcctgctgtggtgcgtctcctgggcggaccttttttactccttccatggcctggtccatggccgggcccctgcccctgttttctttgtcacccccttggtggtgggggtcaccatgctgctggccaccctgctgatacagtatgagcggctgcagggcgtacagtcttcgggggtcctcattatcttctggttcctgtgtgtggtctgcgccatcgtcccattccgctccaagatccttttagccaaggcagagggtgagatctcagaccccttccgcttcaccaccttctacatccactttgccctggtactctctaccctcatcttggcctgcttcagggagaaacctccatttttctccgcaaagaatgtcgaccctaacccctaccctgagaccagcgctggctttctctcccgcctgtttttctggtggttcacaaagatggccatctatggctaccggcatcccctggaggagaaggacctctggtccctaaaggaagaggacagatcccagatggtggtgcagcagctgctggaggcatggaggaagcaggaaaagcagacggcacgacacaaggcttcagcagcacctgggaaaaatgcctccggcgaggacgaggtgctgctgggtgcccggcccaggccccggaagccctccttcctgaaggccctgctggccaccttcggctccagcttcctcatcagtgcctgcttcaagcttatccaggacctgctctccttcatcaatccacagctgctcagcatcctgatcaggtttatctccaaccccatggccccctcctggtggggcttcctggtggctgggctgatgttcctgtgctccatgatgcagtcgctgatcttacaacactattaccactacatctttgtgactggggtgaagtttcgtactgggatcatgggtgtcatctacaggaaggctctggttatcaccaactcagtcaaacgtgcgtccactgtgggggaaattgtcaacctcatgtcagtggatgcccagcgcttcatggaccttgcccccttcctcaatctgctgtggtcagcacccctgcagatcatcctggcgatctacttcctctggcagaacctaggtccctctgtcctggctggagtcgctttcatggtcttgctgattccactcaacggagctgtggccgtgaagatgcgcgccttccaggtaaagcaaatgaaattgaaggactcgcgcatcaagctgatgagtgagatcctgaacggcatcaaggtgctgaagctgtacgcctgggagcccagcttcctgaagcaggtggagggcatcaggcagggtgagctccagctgctgcgcacggcggcctacctccacaccacaaccaccttcacctggatgtgcagccccttcctggtgaccctgatcaccctctgggtgtacgtgtacgtggacccaaacaatgtgctggacgccgagaaggcctttgtgtctgtgtccttgtttaatatcttaagacttcccctcaacatgctgccccagttaatcagcaacctgactcaggccagtgtgtctctgaaacggatccagcaattcctgagccaagaggaacttgacccccagagtgtggaaagaaagaccatctccccaggctatgccatcaccatacacagtggcaccttcacctgggcccaggacctgccccccactctgcacagcctagacatccaggtcccgaaaggggcactggtggccgtggtggggcctgtgggctgtgggaagtcctccctggtgtctgccctgctgggagagatggagaagctagaaggcaaagtgcacatgaagggctccgtggcctatgtgccccagcaggcatggatccagaactgcactcttcaggaaaacgtgcttttcggcaaagccctgaaccccaagcgctaccagcagactctggaggcctgtgccttgctagctgacctggagatgctgcctggtggggatcagacagagattggagagaagggcattaacctgtctgggggccagcggcagcgggtcagtctggctcgagctgtttacagtgatgccgatattttcttgctggatgacccactgtccgcggtggactctcatgtggccaagcacatctttgaccacgtcatcgggccagaaggcgtgctggcaggcaagacgcgagtgctggtgacgcacggcattagcttcctgccccagacagacttcatcattgtgctagctgatggacaggtgtctgagatgggcccgtacccagccctgctgcagcgcaacggctcctttgccaactttctctgcaactatgcccccgatgaggaccaagggcacctggaggacagctggaccgcgttggaaggtgcagaggataaggaggcactgctgattgaagacacactcagcaaccacacggatctgacagacaatgatccagtcacctatgtggtccagaagcagtttatgagacagctgagtgccctgtcctcagatggggagggacagggtcggcctgtaccccggaggcacctgggtccatcagagaaggtgcaggtgacagaggcgaaggcagatggggcactgacccaggaggagaaagcagccattggcactgtggagctcagtgtgttctgggattatgccaaggccgtggggctctgtaccacgctggccatctgtctcctgtatgtgggtcaaagtgcggctgccattggagccaatgtgtggctcagtgcctggacaaatgatgccatggcagacagtagacagaacaacacttccctgaggctgggcgtctatgctgctttaggaattctgcaagggttcttggtgatgctggcagccatggccatggcagcgggtggcatccaggctgcccgtgtgttgcaccaggcactgctgcacaacaagatacgctcgccacagtccttctttgacaccacaccatcaggccgcatcctgaactgcttctccaaggacatctatgtcgttgatgaggttctggcccctgtcatcctcatgctgctcaattccttcttcaacgccatctccactcttgtggtcatcatggccagcacgccgctcttcactgtggtcatcctgcccctggctgtgctctacaccttagtgcagcgcttctatgcagccacatcacggcaactgaagcggctggaatcagtcagccgctcacctatctactcccacttttcggagacagtgactggtgccagtgtcatccgggcctacaaccgcagccgggattttgagatcatcagtgatactaaggtggatgccaaccagagaagctgctacccctacatcatctccaaccggtcagaagccgcctccctcgctccctgctcctccaggaattcccagcaggctctctggtgttcagggtccttgtccctcctttcccctaagcagaaaactggccctgccctgcccctgccccatttcctcctcatctgatcccccataggcggctgagcatcggagtggagttcgtggggaactgcgtggtgctctttgctgcactatttgccgtcatcgggaggagcagcctgaacccggggctggtgggcctttctgtgtcctactccttgcaggtgacatttgctctgaactggatgatacgaatgatgtcagatttggaatctaacatcgtggctgtggagagggtcaaggagtactccaagacagagacagaggcgccctgggtggtggaaggcagccgccctcccgaaggttggcccccacgtggggaggtggagttccggaattattctgtgcgctaccggccgggcctagacctggtgctgagagacctgagtctgcatgtgcacggtggcgagaaggtggggatcgtgggccgcactggggctggcaagtcttccatgaccctttgcctgttccgcatcctggaggcggcaaagggtgaaatccgcattgatggcctcaatgtggcagacatcggcctccatgacctgcgctctcagctgaccatcatcccgcaggaccccatcctgttctcggggaccctgcgcatgaacctggaccccttcggcagctactcagaggaggacatttggtgggctttggagctgtcccacctgcacacgtttgtgagctcccagccggcaggcctggacttccagtgctcagagggcggggagaatctcagcgtgggccagaggcagctcgtgtgcctggcccgagccctgctccgcaagagccgcatcctggttttagacgaggccacagctgccatcgacctggagactgacaacctcatccaggctaccatccgcacccagtttgatacctgcactgtcctgaccatcgcacaccggcttaacactatcatggactacaccagggtcctggtcctggacaaaggagtagtagctgaatttgattctccagccaacctcattgcagctagaggcatcttctacgggatggccagagatgctggacttgcctaaaatatattcctgagatttcctcctggcctttcctggttttcatcaggaaggaaatgacaccaaatatgtccgcagaatggacttgatagcaaacactgggggcaccttaagattttgcacctgtaaagtgccttacagggtaactgtgctgaatgctttagatgaggaaatgatccccaagtggtgaatgacacgcctaaggtcacagctagtttgagccagttagactagtcccccggtctcccgattcccaactgagtgttatttgcacactgcactgttttcaaataacgattttatgaaatgacctctgtcctccctctgatttttcatattttcctaaagtttcgtttctgttttttaataaaaagctttttcctcctggaacagaagacagctgctgggtcaggccacccctaggaactcagtcctgtactctggggtgctgcctgaatccattaaaaatgggagtactgatgaaataaaactacatggtcaacagtaaaaaaaaaaaaaaaaaaa

SEQ ID NO: 4896 - protein, 1238 aa, Homo sapiens
MDALCGSGELGSKFWDSNLSVHTENPDLTPCFQNSLLAWVPCIYLWVALPCYLLYLRHHCRGYIILSHLSKLKMVLGVLLWCVSWADLFYSFHGLVHGRAPAPVFFVTPLVVGVTMLLATLLIQYERLQGVQSSGVLIIFWFLCVVCAIVPFRSKILLAKAEGEISDPFRFTTFYIHFALVLSTLILACFREKPPFFSAKNVDPNPYPETSAGFLSRLFFWWFTKMAIYGYRHPLEEKDLWSLKEEDRSQMVVQQLLEAWRKQEKQTARHKASAAPGKNASGEDEVLLGARPRPRKPSFLKALLATFGSSFLISACFKLIQDLLSFINPQLLSILIRFISNPMAPSWWGFLVAGLMFLCSMMQSLILQHYYHYIFVTGVKFRTGIMGVIYRKALVITNSVKRASTVGEIVNLMSVDAQRFMDLAPFLNLLWSAPLQIILAIYFLWQNLGPSVLAGVAFMVLLIPLNGAVAVKMRAFQVKQMKLKDSRIKLMSEILNGIKVLKLYAWEPSFLKQVEGIRQGELQLLRTAAYLHTTTTFTWMCSPFLVTLITLWVYVYVDPNNVLDAEKAFVSVSLFNILRLPLNMLPQLISNLTQASVSLKRIQQFLSQEELDPQSVERKTISPGYAITIHSGTFTWAQDLPPTLHSLDIQVPKGALVAVVGPVGCGKSSLVSALLGEMEKLEGKVHMKGSVAYVPQQAWIQNCTLQENVLFGKALNPKRYQQTLEACALLADLEMLPGGDQTEIGEKGINLSGGQRQRVSLARAVYSDADIFLLDDPLSAVDSHVAKHIFDHVIGPEGVLAGKTRVLVTHGISFLPQTDFIIVLADGQVSEMGPYPALLQRNGSFANFLCNYAPDEDQGHLEDSWTALEGAEDKEALLIEDTLSNHTDLTDNDPVTYVVQKQFMRQLSALSSDGEGQGRPVPRRHLGPSEKVQVTEAKADGALTQEEKAAIGTVELSVFWDYAKAVGLCTTLAICLLYVGQSAAAIGANVWLSAWTNDAMADSRQNNTSLRLGVYAALGILQGFLVMLAAMAMAAGGIQAARVLHQALLHNKIRSPQSFFDTTPSGRILNCFSKDIYVVDEVLAPVILMLLNSFFNAISTLVVIMASTPLFTVVILPLAVLYTLVQRFYAATSRQLKRLESVSRSPIYSHFSETVTGASVIRAYNRSRDFEIISDTKVDANQRSCYPYIISNRSEAASLAPCSSRNSQQALWCSGSLSLLSPKQKTGPALPLPHFLLI

SEQ ID NO: 4897 - DNA, 2926 bp, Homo sapiens
gtgctgcctggcgctggctaggaggcaaacgcacgcgggaagagctgctacccattccagggaccctgccgctgcccctctgaggggtctgcacctcctgggagcaggtgggtctctgggacgagggtccatggtggatggctctggagacgctcccgaggctgtgccgtcccgctgctgcacaggtcggagggtcaccgcagaggctactcgggctggggctggggccgagggagcccgcactggagccccatgtggaacccaaggatgcagctgctctgctaacacggcagcccatccttcaagactgtgacctcgccacagtggccctcagccctccacctccggcgggggcgagggccacccacctccaagtctccagccatgacgacctccgcactccggcgccaggtgaagaacatcgtgcacaactactccgaggcagaaatcaaggtgcgcgaggccaccagcaatgacccctggggcccccctagttcgctcatgtccgagatcgctgacctgaccttcaacacagtggccttcaccgaagtcatgggcatgctgtggcggcggctcaatgacagcggcaagaactggcggcacgtgtacaaggctctaacattgctggactacctgctcaagacgggctccgagcgggtggcccaccagtgccgcgagaacctctacaccatccagacactcaaggacttccagtacatcgaccgcgacggcaaggaccagggcgtcaacgtgcgcgagaaggtcaagcaggtgatggccctgctcaaggatgaggagcggctgcggcaggagcgaacccacgccctcaagaccaaggagcgcatggcactggagggcatcggcattggcagtgggcagctgggcttcagccgccgctacggcgaggactacagccgctcccggggctccccgtcctcctacaactcctcctcttcgtcaccccgctatacctccgacctggagcaggcccggcctcagacgtcaggggaagaggaactgcagctgcagctggccctcgccatgagccgtgaggaggcagagaagcctgtccccccagcctcccacagggacgaggacctgcagctgcagctggctctgcgcctgagccggcaggagcacgagaaggaggtgaggtcctggcagggtgatggctcccccatggccaatggtgcaggggccgtggtccaccatcagcgggacagagagcctgagagagaagagagaaaggaggaggagaagctaaaaaccagccagtcctccatcctggacttggctgacatcttcgtacctgccctggccccgccctccacacactgctctgctgacccatgggacatcccaggttttaggccgaacacagaggccagtggatcctcctgggggccttctgcagacccctggtctccgatcccctcaggaaccgtcctgtcccgaagccagccctgggatctgactcccatgctctcctcctctgagccctggggcaggaccccagtgctgcctgctgggccccccaccacagacccctgggccctgaactctccccaccacaaactccccagcactggggctgacccttggggagcctccctggagacctccgacacacctggtggtgcctcgacctttgacccatttgccaaacctccagaatccacagagaccaaggaggggctggagcaggccctgccctctgggaagcccagcagccctgtggagctggacctgtttggagaccccagccccagttccaagcaaaatggcacgaaggagccagatgccctggacctgggcatactaggggaagcactaacccagccaagcaaagaggcccgagcttgccggactcccgagtccttcctgggtccctcagcttcctccttggtcaaccttgactcgttggtcaaggcaccccaggttgcaaagacccggaaccccttcctgacaggtctcagcgctccgtcccccaccaacccgttcggcgcgggcgagccgggcaggccgacgctaaaccagatgcgcaccggctcgccggcgctgggcctggcaggcgggcctgtgggggcgcccctgggctccatgacctacagcgcctctctgcccctcccgctcagcagcgtgccagctggcttgaccctccccgcctcggttagcgtcttcccgcaggccggagccttcgcaccgcagccgctgctgcccacgccgagctcagccgggccgcggcccccgcccccgcagaccggcaccaaccccttcctctgagccccgccccgtcccataccggcctgcgcctgcgccggacgctccgcggccccgcctccggacccggggctgggcggggcgccggtgctagtggaacgccgagccagtggcggctggtatcccgcggcggctctggaagctggacgcggaccacggcccgggagctagaaactgaacgcccgcataataaagactggaaccctcgttctcagctctcaccaagtggactttttgcggggtgtggcggccgggtctcgaccacagcgtggatcaccggctgtttaggaaactgcagctgcacaacgtggggtgcaaaactgccccgcttcctttacagctcttctcaaccctcacctccatcccccgtcacccaggcaccttcgcttccagatgctgccaggctgtcactcaattcggtcatttcattcatttatcacacatgggcactggggttgggctaacagcaagagacaataggcctttgttcctatttattgggtactgcttacgtgctaagcagatcagtttatttaatgcttgcaacgactctctgaggtagaaaatattgttaattccgttcaggatcccggctacataatctgtggggctcaatacaaaataaaaatgtaggggctccttgttc

SEQ ID NO: 4898 - DNA, 2499 bp, Homo sapiens
gtgatccctgcgcgcgtctcctgctcgggtcagtgcgccgcgctgcgctgggcgccatggcgctccccggagcccgggctcgcggctgggcggcagcagccagagcggcccagaggcgccgccgcgtggagaacgcaggagggtccccgagtcctgagcctgcgggccggcgcgcggcgctttacgtacactggccttactgcgagaagcgctgcagttactgcaacttcaacaagtacatccctcgccgcctggaggaggctgccatgcagaagtgtctggtgaccgaagctcagacgctgctgcggctcagcggggtgcaacgggtggagtctgtgttctttggtggggggacccccagtctagccagtccccacacggtggctgctgtcctggaggctgtggcacaggcagcccacctgcctgcagacttggaagtcacattggaggctaatcctacttcagctccgggctccagactggcagagttcggggcagcaggggttaacaggttgtctataggcctccagtccctagatgacactgagctccggctgttgggacggacgcactcggcctgcgatgctctgcggacgctggcagaggcccggcgcctctttcccgggcgcgtgtctgtagacttgatgctggggctgccggcacagcaggtggggccgtggcttgggcagctgcaggaactgctgcaccactgtgatgaccacctctccctctaccagctgtccctggagcggggcaccgcactcttcgcccaggtgcagcggggtgcccttccagcccctgacccggagctcgcagctgagatgtaccagaggggccgggctgtccttcgggaggctggcttccaccagtatgaggtctccaactttgcccggaatggggcgctcagtacccacaattggacttactggcagtgtggtcagtaccttggcgttgggcctggggcccatggacgatttatgccccagggggctggaggccacacccgggaggctcggatccagacactggagcctgacaactggatgaaggaggtgatgctgtttggccatggcacccggaagcgtgtccccctgggcaggctggagctgctggaggaagttttggccctggggctacgcaccgatgtggggatcactcaccagcactggcagcagtttgagccccagctgaccctgtgggatgtgtttggagcgaacaaggaggtgcaggagctgctggagcggggcctactgcagctggatcacaggggtcttcggtgttcctgggagggtctggctgtgctggactctctcttgctgaccctcctgcctcagctccaagaagcctggcagcagagaaccccctcccctgtgccaggaggatgacaaaaatgttcctgtgttccagggtaatgccaggtgggttttgagagctgggtcggtactgcagacatctcttctccgttgtcgggtgccgtctctgctccttgtggttattgctcagccctggcatccccaggggaatggcagcagtgaggtagatgggaggacatttctggtcagggaactggcatcccattcagcatctcaggactcacaggccaacatgtgttccatggctgggaattgcctaccacccacatcagcttctgtttacctttttggcatcaaataatgaacagtgtttggaaatctttctacaggcaattacctccccaagagaagccttccttattttggagtaaggtcctaagatagctggatgaatcaggaaaaccatgtcccctctaggtattattaatattagcaggaagggatctactataggaatgaagtatttataaaccactgaaagggatagagaagtgaacattggagaaagccagtagcaactgtgagaaatcagcaacttgcaggaggcacagaaaactcctgctgatggtctcagcttccagcagcacaaaagcagatgatgtactggaaaatgctcagaagatgctacaaaacctcatgcctactgtctgccactgctggagaaggaatcatggtttctagaagtgcctctcattagtggactttaaagcaaatcctggctggcaggaaattctgaggaatatagctcttaggcttccagcctctaccatgcaggagagaacacagaaggactgatgtatgttggtggatccatgtatgtgtccagcacagcggcctgctggactctgagaactgggaaagatcagagcaagccttgcctcttatcttcgggaaaccagaatatgtttggggtggtaggagccacacagactcttctgagccccctcactcacttccttccccctgtgcctttcctttgagagtgaaggtgggtggagttgaccagagaaaggggagagaattcgggaaagacccaaagtgtttgtaattcttctttgtccttttacctacagaaatggtcacatggttctatttaaatagcctaataaacacatctggagcctgt

SEQ ID NO: 4899 - protein, 442 aa, Homo sapiens
MALPGARARGWAAAARAAQRRRRVENAGGSPSPEPAGRRAALYVHWPYCEKRCSYCNFNKYIPRRLEEAAMQKCLVTEAQTLLRLSGVQRVESVFFGGGTPSLASPHTVAAVLEAVAQAAHLPADLEVTLEANPTSAPGSRLAEFGAAGVNRLSIGLQSLDDTELRLLGRTHSACDALRTLAEARRLFPGRVSVDLMLGLPAQQVGPWLGQLQELLHHCDDHLSLYQLSLERGTALFAQVQRGALPAPDPELAAEMYQRGRAVLREAGFHQYEVSNFARNGALSTHNWTYWQCGQYLGVGPGAHGRFMPQGAGGHTREARIQTLEPDNWMKEVMLFGHGTRKRVPLGRLELLEEVLALGLRTDVGITHQHWQQFEPQLTLWDVFGANKEVQELLERGLLQLDHRGLRCSWEGLAVLDSLLLTLLPQLQEAWQQRTPSPVPGG

SEQ ID NO: 4900 - DNA, 2341 bp, Homo sapiens
agtgtaagcagtgtgcaaacaaggtgttacagcacatgaaggccgtgcaggcagatcaggagcgggagaggcagcggcggctggaagtagaacgtgaggcagagaagaagcgtgaggctaagcagcgagctaaggaagctcaggagcgggaactgcggaagcgggagaaggcggaagagaaggagcgccggagaaaggagtatgatgccctcaaagcagccaagcgggagcaggagaagaaacctaagaaggaagcaaatcaggccccgaaatctaagtctggctcccgtccccgcaagccaccaccccggaagcacactcgttcctgggctgtgctgaagctgctgctgctgctgctgctatttggtgtggcgggagggctggttgcttgtcgggtgacagagctgcagcagcagcccctctgcaccagcgtgaacaccatctatgacaatgcggtccagggtctacgccgccatgagatcctccagtgggtccttcagaccgactctcagcagtgagcttgttcccagcacctgctgcctcccagccttggagtttggattcctatggaattgggttctgctggacacaacctctttttagcatcagacctacctgccatcatcaaatggctgcagattggtacatgagacctcctctttgtaggacttcttcattccttagtcagggttccctgaaggaatgaggagaaatgggaggtggcgggggggcgtggggggcagttacctgcatgcctaaaggagtaggcttgggggtggggagagagaaaacatagccttttctagttgttatataaagctgtgtaaaggcaaggctcgtttctactaaatggtcagctgtcactacatttatacttttgtatgccacaaaccctttcattcctccctgggaatcagggtagatcaggaggaactgggggggactagaacaccacgctcagtaaatccagtctaaactgggaggtaggggtattcctgttttctttaggacctcagagatgtaagcattttagcagccacacaaaatctctggctatgaaagggacttcatgaccatccagtccaatataacacttgcagacagagaaactgaggtcttccatgacttgcctagtctcccagctagtttgaggcaaaactggattcccactctggtattctttcttccctttacatcattttccctcctttataatgtcctgagagaccagaactcacaccagaatcgattattcctcaggtgaagcatagactctttcatggtagacagatttcacgactcagagatagaaatctcttgctatcatcaggtcacgggcagctcctgtggagtcctgcccaacttatgtggcttccataaaatggcaacagtccaggctccttgcctaattttagagcattaactccctaattgccagtaagcaaggaggtggatctctgcaaacctacactgtctatgacagctctagttgtacttggtgtgactaaatacctcaaaggcaacctgcttctgcaggttttgaagtgtcagcttcataagacactgaggtttagaattgtttgattctagaccataactgaagggcataaatggaaacaggatatgaagggaaacaagtagcatcatggagctgaaaagtggtgcatcacccaatggctagcacaaacaaggatcacactgtccattctcttgtctgctaaattaagcattttcttgcctcctttgcttcatcttttcacaacagctggatagagggatcagaaatgactgtgtcatggtgctcattcactgcaaactcccagttgcaagctccttggctcccccggagggagcaagaatctcatagttcagagacacagagggccttttagccctaatgaccttttggatgggactgcaactcatgactatcctgatattggaagaaaggactttgttaatcttctcccccatagctctgctgcgtaggtctacatcttactcagaatcactacacattcctttagtcttcctccaagctccagagccattggtacaaatgctttattgaaactaaatacataatacacacaatgagatgaagacaatatagaagtccgcatagtcatcataatcccgttccttggccggttgaggcagctcagtggctgagcccagtcaagccaacccgcagcttcactcacgacttcaagatttgatgctaattcttttggatttctacagttattaaataagtgtctgagtggacaaaaaaaaaaaaaaaaaaaaaaaaaaaaaaaaaaaaaaaaaaaaaaaaaaaaaaaaaaaaaaaaaaaaaaaa

SEQ ID NO: 4901 - protein, 160 aa, Homo sapiens
MKAVQADQERERQRRLEVEREAEKKREAKQRAKEAQERELRKREKAEEKERRRKEYDALKAAKREQEKKPKKEANQAPKSKSGSRPRKPPPRKHTRSWAVLKLLLLLLLFGVAGGLVACRVTELQQQPLCTSVNTIYDNAVQGLRRHEILQWVLQTDSQQ

SEQ ID NO: 4902 - DNA, 4490 bp, Homo sapiens
aggtgaacaggtcctcacgcccagctccgcgccctcacgcgctctcgccgggaccccgcttccgctggcagccatgggccccggccccagccgcgcgccccgcgccccacgcctgatgctctgtgcgctcgccttgatggtggcggccggcggctgcgtcgtctccgccttcaacctggatacccgattcctggtagtgaaggaggccgggaacccgggcagcctcttcggctactcggtcgccctccatcggcagacagagcggcagcagcgctacctgctcctggctggtgccccccgggagctcgctgtgcccgatggctacaccaaccggactggtgctgtgtacctgtgcccactcactgcccacaaggatgactgtgagcggatgaacatcacagtgaaaaatgaccctggccatcacattattgaggacatgtggcttggagtgactgtggccagccagggccctgcaggcagagttctggtctgtgcccaccgctacacccaggtgctgtggtcagggtcagaagaccagcggcgcatggtgggcaagtgctacgtgcgaggcaatgacctagagctggactccagtgatgactggcagacctaccacaacgagatgtgcaatagcaacacagactacctggagacgggcatgtgccagctgggcaccagcggtggcttcacccagaacactgtgtacttcggcgcccccggtgcctacaactggaaaggaaacagctacatgattcagcgcaaggagtgggacttatctgagtatagttacaaggacccagaggaccaaggaaacctctatattgggtacacgatgcaggtaggcagcttcatcctgcaccccaaaaacatcaccattgtgacaggtgccccacggcaccgacatatgggcgcggtgttcttgctgagccaggaggcaggcggagacctgcggaggaggcaggtgctggagggctcgcaggtgggcgcctattttggcagcgccattgccctggcagacctgaacaatgatgggtggcaggacctcctggtgggcgccccctactacttcgagaggaaagaggaagtagggggtgccatctatgtcttcatgaaccaggcgggaacctccttccctgctcacccctcactccttcttcatggccccagtggctctgcctttggtttatctgtggccagcattggtgacatcaaccaggatggatttcaggatattgctgtgggagctccgtttgaaggcttgggcaaagtgtacatctatcacagtagctctaaggggctccttagacagccccagcaggtaatccatggagagaagctgggactgcctgggttggccaccttcggctattccctcagtgggcagatggatgtggatgagaacttctacccagaccttctagtgggaagcctgtcagaccacattgtgctgctgcagggcccggcccgtcatcaacatcgtccacaagaccttggtgcccaggccagctgtgctggaccctgcactttgcacggccacctcttgtgtgcaagtggagctgtgctttgcttacaaccagagtgccgggaaccccaactacaggcgaaacatcaccctggcctacactctggaggctgacagggaccgccggccgccccggctccgctttgccggcagtgagtccgctgtcttccacggcttcttctccatgcccgagatgcgctgccagaagctggagctgctcctgatggacaacctccgtgacaaactccgccccatcatcatctccatgaactactctttacctttgcggatgcccgatcgcccccggctggggctgcggtccctggacgcctacccgatcctcaaccaggcacaggctctggagaaccacactgaggtccagttccagaaggagtgcgggcctgacaacaagtgtgagagcaacttgcagatgcgggcagccttcgtgtcagagcagcagcagaagctgagcaggctccagtacagcagagacgtccggaaattgctcctgagcatcaacgtgacgaacacccggacctcggagcgctccggggaggacgcccacgaggcgctgctcaccctggtggtgcctcccgccctgctgctgtcctcagtgcgcccccccggggcctgccaagctaatgagaccatcttttgcgagctggggaaccccttcaaacggaaccagaggatggagctgctcatcgcctttgaggtcatcggggtgaccctgcacacaagggaccttcaggtgcagctgcagctctccacgtcgagtcaccaggacaacctgtggcccatgatcctcactctgctggtggactatacactccagacctcgcttagcatggtaaatcaccggctacaaagcttctttggggggacagtgatgggtgagtctggcatgaaaactgtggaggatgtaggaagccccctcaagtatgaattccaggtgggcccaatgggggaggggctggtgggcctggggaccctggtcctaggtctggagtggccctacgaagtcagcaatggcaagtggctgctgtatcccacggagatcaccgtccatggcaatgggtcctggccctgccgaccacctggagaccttatcaaccctctcaacctcactctttctgaccctggggacaggccatcatccccacagcgcaggcggcgacagctggatccagggggaggccagggccccccacctgtcactctggctgctgccaaaaaagccaagtctgagactgtgctgacctgtgccacagggcgtgcccactgtgtgtggctagagtgccccatccctgatgcccccgttgtcaccaacgtgactgtgaaggcacgagtgtggaacagcaccttcatcgaggattacagagactttgaccgagtccgggtaaatggctgggctaccctattcctccgaaccagcatccccaccatcaacatggagaacaagaccacgtggttctctgtggacattgactcggagctggtggaggagctgccggccgaaatcgagctgtggctggtgctggtggccgtgggtgcagggctgctgctgctggggctgatcatcctcctgctgtggaagtgtgacttctttaagcggacccgctattatcagatcatgcccaagtaccacgcagtgcggatccgggaggaggagcgctacccacctccagggagcaccctgcccaccaagaagcactgggtgaccagctggcagactcgggaccaatactactgacgtcctccctgatcccaccccctcctcccccagtgtcccctttcttcctatttatcataagttatgcctctgacagtccacaggggccaccacctttggctggtagcagcaggctcaggcacatacacctcgtcaagagcatgcacatgctgtctggccctggggatcttcccacaggagggccagcgctgtggaccttacaacgccgagtgcactgcattcctgtgccctagatgcacgtggggcccactgctcgtggactgtgctggtgcatcacggatggtgcatgggctcgccgtgtctcagcctctgccagcgccaaaacaagccaaagagcctcccaccagagccgggaggaaaaggcccctgcaatgtggtgacacctccccctttcacactggatccatcttgagccacagtcactggattgactttgctgtcaaaactactgacagggagcagcccccgggccgctggctggtgggcccccaatgacacccatgccagagaggtggggatcctgcctaaggttgtctacgggggcacttggaggacctggcgtgctcagacccaacagcaaaggaactagaaagaaggacccagaacggcttgctttcctgcatctctgtgaagcctctctccttggccacagactgaactcgcagggaatgcagcaggaaggaacaaagacaggcaaacggcaacgtagcctgggctcactgtgctggggcacggcgggatcctccacagagaggaggggaccaattctggacagacagatgttgggaggatacagaggagatgccacttctcactcaccactaccagccagcctcagaaggccccagagagaccctgcaagaccacggagggagcgacacttgaatgtagaataggcagggggccctgccccaccccatccagccagaccccacgctgaccatgcgtcaggggcctagaggtggagttcttagctatccttggctttcagagccagcctggctctgccccctcccccatgggctgtgtcctaaggcccatttgagaagctgaggctagttccagaaaacctctcctgacccctgcctgttggcaggcccactccccagccccagccccttccatggtactgtagcaggggaattccctccccctccttgtgccttctttgtatataggcttctcacggcgaccaataaacagctcccagtttgt

SEQ ID NO: 4903 - DNA, 3215 bp, Homo sapiens
gacaatatcaggtgagctgtggaggtggggtccttggaagctggatgacagcagctggcaaggggataagagagcagtgagcccctccctcaaggaggtctggctttatccatagacagggccctctgaggtggggctgaggtacaaagggggattgagcagcccaggagaagagagatgggggttcccttcttctcttctctcagatgcatggtggacttaggaccttgctgggctgggggtctcactgcagagatgaagctgcttctggccctagcagggctcctggccattctggccacgccccagccctctgaaggtgctgctccagctgtcctgggggaggtggacacctcgttggtgctgagctccatggaggaggccaagcagctggtggacaaggcctacaaggagcggcgggaaagcatcaagcagcggcttcgcagcggctcagccagccccatggaactcctatcctacttcaagcagccggtggcagccaccaggacggcggtgagggccgctgactacctgcacgtggctctagacctgctggagaggaagctgcggtccctgtggcgaaggccattcaatgtcactgatgtgctgacgcccgcccagctgaatgtgttgtccaagtcaagcggctgcgcctaccaggacgtgggggtgacttgcccggagcaggacaaataccgcaccatcaccgggatgtgcaacaacagacgcagccccacgctgggggcctccaaccgtgcctttgtgcgctggctgccggcggagtatgaggacggcttctctcttccctacggctggacgcccggggtcaagcgcaacggcttcccggtggctctggctcgcgcggtctccaacgagatcgtgcgcttccccactgatcagctgactccggaccaggagcgctcactcatgttcatgcaatggggccagctgttggaccacgacctcgacttcacccctgagccggccgcccgggcctccttcgtcactggcgtcaactgcgagaccagctgcgttcagcagccgccctgcttcccgctcaagatcccgcccaatgacccccgcatcaagaaccaagccgactgcatcccgttcttccgctcctgcccggcttgccccgggagcaacatcaccatccgcaaccagatcaacgcgctcacttccttcgtggacgccagcatggtgtacggcagcgaggagcccctggccaggaacctgcgcaacatgtccaaccagctggggctgctggccgtcaaccagcgcttccaagacaacggccgggccctgctgccctttgacaacctgcacgatgacccctgtctcctcaccaaccgctcagcgcgcatcccctgcttcctggcaggggacacccgttccagtgagatgcccgagctcacctccatgcacaccctcttacttcgggagcacaaccggctggccacagagctcaagagcctgaaccctaggtgggatggggagaggctctaccaggaagcccggaagatcgtgggggccatggtccagatcatcacttaccgggactacctgcccctggtgctggggccaacggccatgaggaagtacctgcccacgtaccgttcctacaatgactcagtggacccacgcatcgccaacgtcttcaccaatgccttccgctacggccacaccctcatccaacccttcatgttccgcctggacaatcggtaccagcccatggaacccaacccccgtgtccccctcagcagggtcttttttgcctcctggagggtcgtgctggaaggtggcattgaccccatcctccggggcctcatggccacccctgccaagctgaatcgtcagaaccaaattgcagtggatgagatccgggagcgattgtttgagcaggtcatgaggattgggctggacctgcctgctctgaacatgcagcgcagcagggaccacggcctcccaggatacaatgcctggaggcgcttctgtgggctcccgcagcctgaaactgtgggccagctgggcacggtgctgaggaacctgaaattggcgaggaaactgatggagcagtatggcacgcccaacaacatcgacatctggatgggcggcgtgtccgagcctctgaagcgcaaaggccgcgtgggcccactcctcgcctgcatcatcggtacccagttcaggaagctccgggatggtgatcggttttggtgggagaacgagggtgtgttcagcatgcagcagcgacaggccctggcccagatctcattgccccggatcatctgcgacaacacaggcatcaccaccgtgtctaagaacaacatcttcatgtccaactcatatccccgggactttgtcaactgcagtacacttcctgcattgaacctggcttcctggagggaagcctcctagaggccaggtaagggggtgcagcagtgaggggtatatctgggctggccagttggaaccacggagatctccttgccctagatgagcccagccctgttctgggtgcagctgagaaaatgagtgactagacgttcatttgtgtgctcatgtatgtgcgaagtatataaattggcttttcatgcgtgtgtgttgtctgaacatggggagtgtttcatgggttatgtgtatgtgccatttatgtgagtgtgtgtttgtgctgatgagaatactgagtatgtggaaggcagcagagcggactggtgaggagcacagctcaggaactagactgcctgggttccaatcctggctctgtggcttgctagctatgtgaccttgagcaaattaccctccttaaacaagagttttcttccttgtaaattacatctgtcatggtttcttggagggcccacttgtatcctctggttcttcatttattgagcacctactacatgcaaggcactgtactaggcgtgagaagcatatagaggcaagaaagagataccaagatgccatctgtgtcctggttagcagagctggaccagtggtgccttggagggataagccagctgcagctgggctgtgtggttgacttatgggcccagccagccaggctcaggccatggctcccctttttcttcctcaccctgatttcttgcttattcactgaagttctcctgaagaggaactgggcctgttgccctttctgtaccatttatttgctcccaatgtttatgataataaaggcaccgctgatggggacctcc

SEQ ID NO: 4904 - protein, 745 aa, Homo sapiens
MGVPFFSSLRCMVDLGPCWAGGLTAEMKLLLALAGLLAILATPQPSEGAAPAVLGEVDTSLVLSSMEEAKQLVDKAYKERRESIKQRLRSGSASPMELLSYFKQPVAATRTAVRAADYLHVALDLLERKLRSLWRRPFNVTDVLTPAQLNVLSKSSGCAYQDVGVTCPEQDKYRTITGMCNNRRSPTLGASNRAFVRWLPAEYEDGFSLPYGWTPGVKRNGFPVALARAVSNEIVRFPTDQLTPDQERSLMFMQWGQLLDHDLDFTPEPAARASFVTGVNCETSCVQQPPCFPLKIPPNDPRIKNQADCIPFFRSCPACPGSNITIRNQINALTSFVDASMVYGSEEPLARNLRNMSNQLGLLAVNQRFQDNGRALLPFDNLHDDPCLLTNRSARIPCFLAGDTRSSEMPELTSMHTLLLREHNRLATELKSLNPRWDGERLYQEARKIVGAMVQIITYRDYLPLVLGPTAMRKYLPTYRSYNDSVDPRIANVFTNAFRYGHTLIQPFMFRLDNRYQPMEPNPRVPLSRVFFASWRVVLEGGIDPILRGLMATPAKLNRQNQIAVDEIRERLFEQVMRIGLDLPALNMQRSRDHGLPGYNAWRRFCGLPQPETVGQLGTVLRNLKLARKLMEQYGTPNNIDIWMGGVSEPLKRKGRVGPLLACIIGTQFRKLRDGDRFWWENEGVFSMQQRQALAQISLPRIICDNTGITTVSKNNIFMSNSYPRDFVNCSTLPALNLASWREAS

SEQ ID NO: 4905 - DNA, 1142 bp, Homo sapiens
ttcttccgctcctgcccggcttgccccgggagcaacatcaccatccgcaaccagatcaacgcgctcacttccttcgtggacgccagcatggtgtacggcagcgaggagcccctggccaggaacctgcgcaacatgtccaaccagctggggctgctggccgtcaaccagcgcttccaagacaacggccgggccctgctgccctttgacaacctgcacgatgacccctgtctcctcaccaaccgctcagcgcgcatcccctgcttcctggcaggtcagctttggggtggggaccagaggtggcataggagatgttccctgttggagccacagggacacccgttccagtgagatgcccgagctcacctccatgcacaccctcttacttcgggagcacaaccggctggccacagagctcaagagcctgaaccctaggtgggatggggagaggctctaccaggaagcccggaagatcgtgggggccatggtccaggtaggccgtcttgaacaccgggcacacgggatccagatgtgtccctgcaacatcctagctgtgtgaccttgggcaagttcctaacgctcctgagccttgccttcttcatccatgaggctgtaaggattataatacatatatgaaaacacctttcagatagtaagtgcttgacaaagcctccttcccttccctctccttcttcgcaggtttgctccctgcagtcttctttcctgtgggtctgttattggtgttgggagggttgaatgtttggtttagcgcccaagtagctgttcagtaaattcttcttccctccatctcactgtcactcttagctcctttacccactcacctcttctttttaaaattaaaaaaattatagggctgggcgcggtggctcatgcctgtaatcccagcactttgggaggcggaggcgggtggatcacgaggtcaggagatcaagaccatgctggctaacacggtgaaaccccatctctactaaaaatacaaaaattagccgggcgtggtggcgggcacctgtagtcccagctacttgggaggctgaggcaggagaatggcgtgaacctggctggagtgcagtggtgcgatcttggctcactgcaacctccacctttcaggctcaagccattctccc

SEQ ID NO: 4906 - DNA, 2081 bp, Homo sapiens
agccagtttgaagtagatctgtaccaaaatgaaacagcctgtcagagtcctttggattatcagtaccgtcaggagatcctgaagctggagaattcgggtggcaagaaaaaccgacgaatctttacctacactgactctgatagatacaccaatttggaggagcactgtcagagaatgaccactgcagccagcgaggtgccttcattcttggtcgagcgaatggcaaatgtcaggcgtcgccggcaggacaggcgagggatggagggcggcatcctcaagtcacgcatcgtcacctgggagccctcagaagagtttgtcaggaacaaccacgtcattaacacccctcttcagacaatgcacatcatggcagacctggggccctataaaaagcttggctataagaagtatgaacatgtcctgtgtactctgaaggtggatagcaatggtgtgatcacagtaaagcctgacttcacgggcctcaaaggaccctacaggattgagacggagggggagaagcaggagctgtggaaatatacgatcgacaatgtttccccccacgcacagccggaggaggaggagcgggaacggcgagtgttcaaggatctttatggccggcacaaggagtatctcagcagcctcgtaggcaccgactttgagatgactgtcccaggtgccctccggctctttgtaaatggagaggtcgtttcagcccaaggctatgagtatgacaatctctacgtccacttctttgtagaattgccaactgctcactggtcaagcccagcattccagcagctctcaggagtaacacagacctgcaccaccaagtccctggcaatggacaaggtggctcacttctcctacccattcacgtttgaagccttcttcctccatgaggatgaatcttctgatgcactcccggagtggcctgtgctctactgtgaggtcctctcgctggacttctggcagaggtaccgtgtggaaggctatggggctgtggtgctgcctgccactccaggctcacacaccctgacagtctccacgtggagacctgtggagcttggcacggtggctgagctgaggaggtttttcattggcggttctctggaactggaggacctctcctatgtacggataccaggatccttcaagggggaacgcctgagccgctttggactccgcacagagaccacaggcactgtcaccttccgcttgcactgtctgcagcagtccagggccttcatggaatcgagctcccttcagaaaaggatgcggagtgtgttggaccgtctggaagggttcagccagcagagttccattcacaatgtgctagaggccttccgtcgagcccggcgccgcatgcaggaggcccgggaaagcctcccgcaggacctagtgagcccctctggaaccctggtctcctagctcacagcagccctggcccacagtgcaagaggacaagatgggggatatctgaggccagtgctctcctgcctcttcgtctttctgattagagaccacgttggtctgctgagaaccagaaaagctgggaaattcccggctggcccctctgcctagccttctgcagggtcttctccctaccctgtggaaataaagccagagaccctgtggccccccctttatatttgcagccactgtcagatgggcatcacagcaaggcaggctttttgatctgaagctgtttggggtgaccccatagtgagtctggccttgactcacttttctggcttgtactcacagtagcaggggatctgctgttctccaccctttaaaaatggagcctttcatcttccaagaccaaagaaggaaggaaggtggacggtgagagggtcttaaatccccagcctgtgagtctcagcctctttccagggaagcctcattctactgcttggggcttgctgaggttgagatatgagttatttctgagtaagtgaaggctgaaggcagtgctgagtcctttctgctagctgggtggtatcttttactgtgtttttttgtttgtttgtttttttgttttttgttacataaaccccttttattttggaaaaaaaaaaaaaaaa

SEQ ID NO: 4907 - protein, 416 aa, Homo sapiens
MTTAASEVPSFLVERMANVRRRRQDRRGMEGGILKSRIVTWEPSEEFVRNNHVINTPLQTMHIMADLGPYKKLGYKKYEHVLCTLKVDSNGVITVKPDFTGLKGPYRIETEGEKQELWKYTIDNVSPHAQPEEEERERRVFKDLYGRHKEYLSSLVGTDFEMTVPGALRLFVNGEVVSAQGYEYDNLYVHFFVELPTAHWSSPAFQQLSGVTQTCTTKSLAMDKVAHFSYPFTFEAFFLHEDESSDALPEWPVLYCEVLSLDFWQRYRVEGYGAVVLPATPGSHTLTVSTWRPVELGTVAELRRFFIGGSLELEDLSYVRIPGSFKGERLSRFGLRTETTGTVTFRLHCLQQSRAFMESSSLQKRMRSVLDRLEGFSQQSSIHNVLEAFRRARRRMQEARESLPQDLVSPSGTLVS

SEQ ID NO: 4908 - DNA, 2708 bp, Homo sapiens
ggcctgttctcgagtccgcgcttttcgtcaccgccatgtcgggaggtggtgtgattcgtggccccgcagggaacaacgattgccgcatctacgtgggtaacttacctccagacatccgaaccaaggacattgaggacgtgttctacaaatacggcgctatccgcgacatcgacctcaagaatcgccgcgggggaccgcccttcgccttcgttgagttcgaggacccgcgagacgcggaagacgcggtgtatggtcgcgacggctatgattacgatgggtaccgtctgcgggtggagtttcctcgaagcggccgtggaacaggccgaggcggcggcgggggtggaggtggcggagctccccgaggtcgctatggccccccatccaggcggtctgaaaacagagtggttgtctctggactgcctccaagtggaagttggcaggatttaaaggatcacatgcgtgaagcaggtgatgtatgttatgctgatgtttaccgagatggcactggtgtcgtggagtttgtacggaaagaagatatgacctatgcagttcgaaaactggataacactaagtttagatctcatgagggagaaactgcctacatccgggttaaagttgatgggcccagaagtccaagttatggaagatctcgatctcgaagccgtagtcgtagcagaagccgtagcagaagcaacagcaggagtcgcagttactccccaaggagaagcagaggatcaccacgctattctccccgtcatagcagatctcgctctcgtacataagatgattggtgacactttttgtagaacccatgttgtatacagttttcctttattcagtacaatcttttcattttttaattcaaactgttttgttcagaatgggctaaagtgttgaattgcattcttgtaatatccccttgctcctaacatctacattcccttcgtgtctttgataaattgtattttaagtgatgtcatagacaggattgtttaaatttagttaactccatactcttcagactgtgatattgtgtaaatgtctatctgccctggtttgtgtgaactgggatgttgggggtgtttgtggttatcttacctggggaagttcttatgtttatcttgcttttcatgtgtctttctgtagacatatctgaagagatggattaagaatgctttggattaaggattgtggagcacatttcaatcattttaggattgtcaaaaggaggattgaggaggatcagatcaataatggaggcaatggtatgactccaagtgctattgtcacagatgaaattggcagtattgaccttatactaaaaggcaggggttaaaaatgattatatacattttccttaaaacacttgcaaacattttattcagttgtctttagctacaattgctttgctttttaaaccttggcaattgtggcaaaattatattgcccattttgtagcaacttattttgctcccttccccccatttttgttttaatagggactaatgtgggaagaactggctaatttgtcacagtgcttagttacaactgttaatgtgtgacctgctgttggtgtacatgtgggtacagggtgtttttaaatccaacaagatagagtataatatcaatactgctaaatctgcatgtcctctgtgtgactgatagagcgttgctatttcatttttttaagacaaaatgaaagcaaaatatagagttccaatgtattggtgtagataatctagttgggaatacttttaagtctcaccttcccctttaaactaatattcataattggttcatatgtttaaaagactttaatttacaaattaaattgcaaatgggagcattagatttagttttagacttaggtgggtagcaatgccagtaaacttaaattacgtaacttcttgcaaccacgaaacctgtaatacgctgtacagtaacaagtgttggcattatcagttgaactgtaaatacaaaatgcttcttccaattagtctctatgatgattaagtttctaaaatttatctgaacaccattcagaaacttgttttggggaatttgatagttattgatgtgcatctgttaaactgatgacagacataactcatcattccccagaaaccttttttgattacagtatctaacattttgcctcctcttttttggttttgctggttataaaggtttggattggagagggctcactggatcccaatccttggagctggatcattggattcaaatcataatgtggataggatagggaggatgaattaccaggattcatggagcgggatcagattaccaggaacataggagtggattcctgccccaaccaaaccgcattcgtgtggatttttttattcaacttaattggctattccaaagattttttttttcctatttttgacgattggagcccttaagatgcacgatggaattgtgttttgcgttttttggtaaaaggagcaaagcgaggacctggagataaacgctggagcaatctccttggaaggattcagcacgagtagatggtaaacatttaaaggggaaagggggggtttgtttaaaatagtaaatcagtaagtcacttctaaatttaaagaaaacaaaattggagttgaagaataagtaggtttccaattggctattgccgttttctttgaaaaaataaacattttttaaaaaacaaaaaaaaaaaaaaa

SEQ ID NO: 4909 - protein, 248 aa, Homo sapiens
MSGGGVIRGPAGNNDCRIYVGNLPPDIRTKDIEDVFYKYGAIRDIDLKNRRGGPPFAFVEFEDPRDAEDAVYGRDGYDYDGYRLRVEFPRSGRGTGRGGGGGGGGGAPRGRYGPPSRRSENRVVVSGLPPSGSWQDLKDHMREAGDVCYADVYRDGTGVVEFVRKEDMTYAVRKLDNTKFRSHEGETAYIRVKVDGPRSPSYGRSRSRSRSRSRSRSRSNSRSRSYSPRRSRGSPRYSPRHSRSRSRT

SEQ ID NO: 4910 - DNA, 951 bp, Homo sapiens
atgggtaagatccggaaggcccaaggagaagggctgccccgcccactgcccctgctggtccagcccaacctcccctttgggtacccagtccacggagtggaggtgatgcccctgcacacggttcccatcccaggcctccagtttgaaggacccgatgcccccgtctatgaggtcaccctgacagcttctctggggacactgaacacccttgctgatgtcccagacagtgtggtgcagggcagaggccagaagcagctgatcatttctaccagtgaccggaagctgttgaagttcattcttcagcacgtgacatacaccagcacggggtaccagcaccagaagtactatccccacattgccattgaccccatagagccactcgaggagagaacaaatcatgctgtgcgctttgcacctgtgagtctggagtccaggtcctcagtggccaagtttccagtgaccatccgccatcctgtcatacccaagctatacgaccctggaccagtgttctttcagtgtagtcttaatcagactattcaactcctcatcaccccagacactggtagtatctggcaccaggtggggtggaagacaacccgtgagtattacaccttcatgtgggttactttgcccattgacctaaacaacaaatcagctaaacagcaggaagtccaattcaaagcttactacctgcccaaggatgatgagtattaccagttctgctatgtggatgaggatggtgtggtccggggagcaagtattcctttccaattccgtccagaaaatgaggaagacatcctggttgttaccactcagggagaggtggaagagattgagcagcacaacaaggagctttgcaaagaaaaccaggagctgaaggacagctgtatcagcctccagaagcagaactcagacatgcaggctgagctccaaaagaagcagtatctttga

SEQ ID NO: 4911 - DNA, 3235 bp, Homo sapiens
ggttgctgtccctggacccctaccatggaggagaccatcaaagatccccccacatcagctgtcttgctggatcactgtcatttctctcaggtcatctttaacagtgtggagaagttctacatccctggaggggacgtcacatgtcattataccttcacccagcatttcatccctcgtcgaaaggattggattggcatctttagagtggggtggaagacaacccgtgagtattacaccttcatgtgggttactttgcccattgacctaaacaacaaatcagctaaacagcaggaagtccaattcaaagcttactacctgcccaaggatgatgagtattaccagttctgctatgtggatgaggatggtgtggtccggggagcaagtattcctttccaattccgtccagaaaatgaggaagacatcctggttgttaccactcagggagaggtggaagagattgagcagcacaacaaggagctttgcaaagaaaaccaggagctgaaggacagctgtatcagcctccagaagcagaactcagacatgcaggctgagctccaaaagaagcaggaggagctagaaaccctacagagcatcaataagaagttggaactgaaagtgaaagaacagaaggactattgggagacagagctgcttcaactgaaagaacaaaaccagaagatgtcctcagaaaatgagaagatgggaatcagagtggatcagcttcaggcccagctgtcaactcaagagaaagaaatggagaagcttgttcagggagatcaagataagacagagcagttagagcagctgaaaaaggaaaatgaccacctctttctcagtttaactgaacagaggaaggaccagaagaagctcgagcagacagtggagcaaatgaagcagaatgaaactactgcaatgaagaaacaacaggaattaatggatgaaaactttgacctgtcaaaaagactgagtgagaacgaaattatatgtaatgctctgcagagacagaaagagagattggaaggagaaaatgatcttttgaagagggagaacagcagattgctcagttacatgggtctggattttaattctttgccgtatcaagtacctacttcagatgaaggaggcgcaagacaaaatccaggacttgcctatggaaacccatattctggtatccaagaaagttcttcccccagcccgctctccatcaagaaatgccctatctgcaaagcagatgatatttgtgatcacaccttggagcaacagcagatgcagcccctttgtttcaattgtccaatttgtgacaagatcttcccagctacagagaagcagatctttgaagaccacgtgttctgccactctctctgagtatcccaacctcttggatgtatacagagattttatagaatagaacctatagcttctaccatgagttatatgagtcaagatcctgcctaacctgaaattattagggatttactcagccctgctgccgctaacagtggagttatgtcactgatctgaaggtcactgttaagggcttctgctgccatccttgtgggttgctacctttaagtcgcataactctagctgtatcatcctctcacctgtcattcttctgagggtctcagtacaagggccctgggatggagccaacctgggtattcacaacaggcctgacttgatactaagtgattagttttccaagttgtcccactgccattcaaagtcagcccttgagtgtatttgttctcagtcctaaccctggggccagagattggtccgaggttgagaattccttcctcctcatccttggtgttgctttctccaaatgattgttttagactagccaaaaatgccgtggcaaagagctcagaaatccaatttggataccaaaggtttctcatgttaatttctcagcccccaaagaagcatcttactcctgaaccttagacaggaagtattgtttcagtcacagaaagcttttctgggtacctctggttagcactttctactctctgatatttcctatgtacatagcttttattgttgtaaatcctttcttaatggttaaataggattgttagcaactatgggtttgcagttttctgagtaggtgagttttgaatatgggtaaatcagaataatgagacaacttgttaatctctttaatactaaaaataaattactcttctatttcagggacttaggtaatttaaaataaaccttcaatttatggtcttctgttttgaagctcatgggaaaattgtgatcaaaagggctatgggaagggcagaccccgccaatgatttctcttcacctgtcttaagattaaataaaaaagagtgtcctggcagttatcttgaggtggggaaggaggtgatgaaacattagtttgtgaaatccaaggccctggcttgctttctttcttttttttttttttttttttgaaacagtctctctctgtcacccaggctggcgtgcaatggcgcagttgactcactacagcctctgcctcccaggttcaagcgattctcatgccttagcctcccaagtagctgggattacaggtgtgtgccgcaatgcccagctaatttttgtgtttttagtagagacagggtttcactatgttggccaggctggtctcgaactcctggcctcacgtgatctgtccacttcagccgtccaaagtgctgggattacaagcgtgagccactgtgctgggcccgaggccctgacttcttgctgtaactttccatgcattttttttaaaaggagcagtgtggattttcgcaccctttgtgaactaagttcaatgcgctctatccaaatttgcctaattgaactataagaaagtaataattccattttctatcccctcagggactgaacaaatggaaataactcccaggcagtatcaggtggtcactacagagacttccacaaaaacttttgaatgatgtgaaacacgatgtcatgaataagggttgagccaactatagctctgtgttcctactgggctttccctaatgtggttgggagttatgccctagactaactgtattgtcctagtcacagctccttgctttgatttcatccttgataaaatgaagatgaaacttaaaaaaaaaaaaaaaaaaaaaaaaaaaaaaaaaaaaaaaaaaaaaaaaaaaaaaaaaaaaaaaaaaaaaaaaaaaaaaaaaaaaaaaaaaaaaaaaaaaaaaaaaaaaaaaaaaaa

SEQ ID NO: 4912 - protein, 446 aa, Homo sapiens
MEETIKDPPTSAVLLDHCHFSQVIFNSVEKFYIPGGDVTCHYTFTQHFIPRRKDWIGIFRVGWKTTREYYTFMWVTLPIDLNNKSAKQQEVQFKAYYLPKDDEYYQFCYVDEDGVVRGASIPFQFRPENEEDILVVTTQGEVEEIEQHNKELCKENQELKDSCISLQKQNSDMQAELQKKQEELETLQSINKKLELKVKEQKDYWETELLQLKEQNQKMSSENEKMGIRVDQLQAQLSTQEKEMEKLVQGDQDKTEQLEQLKKENDHLFLSLTEQRKDQKKLEQTVEQMKQNETTAMKKQQELMDENFDLSKRLSENEIICNALQRQKERLEGENDLLKRENSRLLSYMGLDFNSLPYQVPTSDEGGARQNPGLAYGNPYSGIQESSSPSPLSIKKCPICKADDICDHTLEQQQMQPLCFNCPICDKIFPATEKQIFEDHVFCHSL

SEQ ID NO: 4913 - DNA, 2355 bp, Homo sapiens
aaaaaaatgcttctgtgctctaagatatatatgtgtgtgtgtgtgctacatatatatttttaagaaaggaccatctctttaggatatatttttaaattctttgaaacacataaccaaaatggtttgattcactgactgactttgaagctgcatctgccagttacaccccaaatggctttaatcccctctcgggtctggttgccttttgcagtttgggttgtggactcagctcctgtgaggggtctggttaggagagagccatttttaaggacagggagttttatagcccttttctactttcctcccctcctcccagtccttatcaatcttttttcctttttcctgaccccctccttctggaggcagttgggagctatccttgtttatgcctcactattggcagaaaagaccccatttaaaacccagagaacactggagggggatgctctagttggttctgtgtccattttcctctgtgccaaagacagacagacagaggctgagagaggctgttcctgaatcaaagcaatagccagctttcgacacatacctggctgtctgaggaggaaggcctcctggaaactgggagctaagggcgaggcccttcccttcagaggctcctgggggattagggtgtggtgtttgccaagccaaggggtagggagccgagaaattggtctgtcggctcctggttgcactttggggaaggagaggaagtttggggctccaggtagctccctgttgtgggactgctctgtcccctgcccctactgcagagatagcactgccgagttcccttcaggcctggcagacgggcagtgaggaggggcctcagttagctctcaagggtgccttcccctcctcccaacccagacataccctctgccaaactgggaaccagcagtgctagtaactacctcacagagccccagagggcctgcttgagccttcttgctccacaggagaagctggtgcctctaggcaaccccttcctcccacctctcatcaggggtgggggttctcctttctttcccctgaagtgtttatggggagatcctagtggctttgccattcaaaccactcgactgtttgcctgtttcttgaaaaccagtagaagggaaacagcacagcctgtcacagtaattgcaggaagattgaagaaaaatcctcatcaatgccaggggacataaaagccatttcccttccaaatactcgacaatttagatgcagaacatttctctgtattcagacttagagtaacaccagctgaaaactgcagtttctttcctttggatacataaggcttctctatcggggtacgggacagggaggaggcctcatgtctgaagggggatttaggggcgagagccccagccctgaccctcggtcctgtgcaccgctttggggcacagtctgatggcgcctttgctggcgccttagtatggttgactccggatggacaaaagaaaaaaaattttttttcttgaatgaaatagcaggaagctcctcgggagcatgtgttttgattaaccgcaggtgatggatgctacgagtataaatggattaactacctcaatccttacagtaagattggaactaagggcagggactcatgcataagggtatgaatcccagccaggacaagtgagttgaggcttgtgccacaaaaggtttgtccttggggaacaggcaggcctgccaggatcccccccatatcgattgggctgggagggctggccatgaggtccccactttctgctttccttgcccatgtgtcacccctttggcctccagcttgtccctctctcactttctatagctttgttggaccagatggtgaggaaaggaatggcctcttcccttctagagggggctggctggagtgagacctggggcttggcctggaacccaccacacagccccaaagtcaggaagcctggggaaaccagagctgagacctcttcaacagggtttctttgagatcctacacctccattgggccctttttcagtcttcaatgggggcccagttggctctagaaggagaagaggtgaagcaggatcctttgccctgggggagtctgagggcgcggtccttggactcattcaggccgtctttgtagttgggggagttccactgggcgatcccagcccctccccacccaccctctaatggacctcctcatagaagccccatttcacttttgttttatctacctcttagcaaaacaatagataaattaggtagtggcagctccacttgcttaggttagggggggaaaaagatttctttttccaaaggaaaaaaatattaccttgagaatactttccaaaaaataaaattaaaaaaaaaaaa

SEQ ID NO: 4914 - protein, 115 aa, Homo sapiens
MALIPSRVWLPFAVWVVDSAPVRGLVRREPFLRTGSFIALFYFPPLLPVLINLFSFFLTPSFWRQLGAILVYASLLAEKTPFKTQRTLEGDALVGSVSIFLCAKDRQTEAERGCS

SEQ ID NO: 4915 - DNA, 927 bp, Homo sapiens
gggacgtggagacccggggtcccggcagccgggcggcccgcgggcccagggtggggatgcaccgccgcggggtgggagctggcgccatcgccaagaagaaacttgcagaggccaagtataaggagcgagggacggtcttggctgaggaccagctagcccagatgtcaaagcagttggacatgttcaagaccaacctggaggaatttgccagcaaacacaagcaggagatccggaagaatcctgagttccgtgtgcagttccaggacatgtgtgcaaccattggcgtggatccgctggcctctggaaaaggattttggtctgagatgctgggcgtgggggacttctattacgaactaggtgtccaaattatcgaagtgtgcctggcgctgaagcatcggaatggaggtctgataactttggaggaactacatcaacaggtgttgaagggaaggggcaagttcgcccaggatgtcagtcaagatgacctgatcagagccatcaagaaactaaaggcacttggcactggcttcggcatcatccctgtgggcggcacttacctcattcagtctgttccagctgagctcaatatggatcacaccgtggtgctgcagctggcagagaagaatggctacgtgactgtcagtgagatcaaagccagtcttaaatgggagaccgagcgagcgcggcaagtgctggaacacctgctgaaggaagggttggcgtggctggacttacaggccccaggggaggcccactactggctgccagctctcttcactgacctctactcccaggagattacagctgaggaggccagagaagccctcccctgactgcatgtggaagggcacacagcagcaggcagggaggaggcggaggtggcaaataaacctgggcaattttgtttatacaaaaaatagaaaaaaa

SEQ ID NO: 4916 - DNA, 5920 bp, Homo sapiens
agcagacgggagtttctcctcggggtcggagcaggaggcacgcggagtgtgaggccacgcatgagcggacgctaaccccctccccagccacaaagagtctacatgtctagggtctagacatgttcagctttgtggacctccggctcctgctcctcttagcggccaccgccctcctgacgcacggccaagaggaaggccaagtcgagggccaagacgaagacatcccaccaatcacctgcgtacagaacggcctcaggtaccatgaccgagacgtgtggaaacccgagccctgccggatctgcgtctgcgacaacggcaaggtgttgtgcgatgacgtgatctgtgacgagaccaagaactgccccggcgccgaagtccccgagggcgagtgctgtcccgtctgccccgacggctcagagtcacccaccgaccaagaaaccaccggcgtcgagggacccaagggagacactggcccccgaggcccaaggggacccgcaggcccccctggccgagatggcatccctggacagcctggacttcccggaccccccggaccccccggacctcccggaccccctggcctcggaggaaactttgctccccagctgtcttatggctatgatgagaaatcaaccggaggaatttccgtgcctggccccatgggtccctctggtcctcgtggtctccctggcccccctggtgcacctggtccccaaggcttccaaggtccccctggtgagcctggcgagcctggagcttcaggtcccatgggtccccgaggtcccccaggtccccctggaaagaatggagatgatggggaagctggaaaacctggtcgtcctggtgagcgtgggcctcctgggcctcagggtgctcgaggattgcccggaacagctggcctccctggaatgaagggacacagaggtttcagtggtttggatggtgccaagggagatgctggtcctgctggtcctaagggtgagcctggcagccctggtgaaaatggagctcctggtcagatgggcccccgtggcctgcctggtgagagaggtcgccctggagcccctggccctgctggtgctcgtggaaatgatggtgctactggtgctgccgggccccctggtcccaccggccccgctggtcctcctggcttccctggtgctgttggtgctaagggtgaagctggtccccaagggccccgaggctctgaaggtccccagggtgtgcgtggtgagcctggcccccctggccctgctggtgctgctggccctgctggaaaccctggtgctgatggacagcctggtgctaaaggtgccaatggtgctcctggtattgctggtgctcctggcttccctggtgcccgaggcccctctggaccccagggccccggcggccctcctggtcccaagggtaacagcggtgaacctggtgctcctggcagcaaaggagacactggtgctaagggagagcctggccctgttggtgttcaaggaccccctggccctgctggagaggaaggaaagcgaggagctcgaggtgaacccggacccactggcctgcccggaccccctggcgagcgtggtggacctggtagccgtggtttccctggcgcagatggtgttgctggtcccaagggtcccgctggtgaacgtggttctcctggccctgctggccccaaaggatctcctggtgaagctggtcgtcccggtgaagctggtctgcctggtgccaagggtctgactggaagccctggcagccctggtcctgatggcaaaactggcccccctggtcccgccggtcaagatggtcgccccggacccccaggcccacctggtgcccgtggtcaggctggtgtgatgggattccctggacctaaaggtgctgctggagagcccggcaaggctggagagcgaggtgttcccggaccccctggcgctgtcggtcctgctggcaaagatggagaggctggagctcagggaccccctggccctgctggtcccgctggcgagagaggtgaacaaggccctgctggctcccccggattccagggtctccctggtcctgctggtcctccaggtgaagcaggcaaacctggtgaacagggtgttcctggagaccttggcgcccctggcccctctggagcaagaggcgagagaggtttccctggcgagcgtggtgtgcaaggtccccctggtcctgctggtccccgaggggccaacggtgctcccggcaacgatggtgctaagggtgatgctggtgcccctggagctcccggtagccagggcgcccctggccttcagggaatgcctggtgaacgtggtgcagctggtcttccagggcctaagggtgacagaggtgatgctggtcccaaaggtgctgatggctctcctggcaaagatggcgtccgtggtctgactggccccattggtcctcctggccctgctggtgcccctggtgacaagggtgaaagtggtcccagcggccctgctggtcccactggagctcgtggtgcccccggagaccgtggtgagcctggtccccccggccctgctggctttgctggcccccctggtgctgacggccaacctggtgctaaaggcgaacctggtgatgctggtgctaaaggcgatgctggtccccctggccctgccggacccgctggaccccctggccccattggtaatgttggtgctcctggagccaaaggtgctcgcggcagcgctggtccccctggtgctactggtttccctggtgctgctggccgagtcggtcctcctggcccctctggaaatgctggaccccctggccctcctggtcctgctggcaaagaaggcggcaaaggtccccgtggtgagactggccctgctggacgtcctggtgaagttggtccccctggtccccctggccctgctggcgagaaaggatcccctggtgctgatggtcctgctggtgctcctggtactcccgggcctcaaggtattgctggacagcgtggtgtggtcggcctgcctggtcagagaggagagagaggcttccctggtcttcctggcccctctggtgaacctggcaaacaaggtccctctggagcaagtggtgaacgtggtccccctggtcccatgggcccccctggattggctggaccccctggtgaatctggacgtgagggggctcctggtgccgaaggttcccctggacgagacggttctcctggcgccaagggtgaccgtggtgagaccggccccgctggaccccctggtgctcctggtgctcctggtgcccctggccccgttggccctgctggcaagagtggtgatcgtggtgagactggtcctgctggtcccaccggtcctgtcggccctgttggcgcccgtggccccgccggaccccaaggcccccgtggtgacaagggtgagacaggcgaacagggcgacagaggcataaagggtcaccgtggcttctctggcctccagggtccccctggccctcctggctctcctggtgaacaaggtccctctggagcctctggtcctgctggtccccgaggtccccctggctctgctggtgctcctggcaaagatggactcaacggtctccctggccccattgggccccctggtcctcgcggtcgcactggtgatgctggtcctgttggtccccccggccctcctggacctcctggtccccctggtcctcccagcgctggtttcgacttcagcttcctgccccagccacctcaagagaaggctcacgatggtggccgctactaccgggctgatgatgccaatgtggttcgtgaccgtgacctcgaggtggacaccaccctcaagagcctgagccagcagatcgagaacatccggagcccagagggcagccgcaagaaccccgcccgcacctgccgtgacctcaagatgtgccactctgactggaagagtggagagtactggattgaccccaaccaaggctgcaacctggatgccatcaaagtcttctgcaacatggagactggtgagacctgcgtgtaccccactcagcccagtgtggcccagaagaactggtacatcagcaagaaccccaaggacaagaggcatgtctggttcggcgagagcatgaccgatggattccagttcgagtatggcggccagggctccgaccctgccgatgtggccatccagctgaccttcctgcgcctgatgtccaccgaggcctcccagaacatcacctaccactgcaagaacagcgtggcctacatggaccagcagactggcaacctcaagaaggccctgctcctccagggctccaacgagatcgagatccgcgccgagggcaacagccgcttcacctacagcgtcactgtcgatggctgcacgagtcacaccggagcctggggcaagacagtgattgaatacaaaaccaccaagacctcccgcctgcccatcatcgatgtggcccccttggacgttggtgccccagaccaggaattcggcttcgacgttggccctgtctgcttcctgtaaactccctccatcccaacctggctccctcccacccaaccaactttccccccaacccggaaacagacaagcaacccaaactgaaccccctcaaaagccaaaaaatgggagacaatttcacatggactttggaaaatatttttttcctttgcattcatctctcaaacttagtttttatctttgaccaaccgaacatgaccaaaaaccaaaagtgcattcaaccttaccaaaaaaaaaaaaaaaaaaagaataaataaataactttttaaaaaaggaagcttggtccacttgcttgaagacccatgcgggggtaagtccctttctgcccgttgggcttatgaaaccccaatgctgccctttctgctcctttctccacaccccccttggggcctcccctccactccttcccaaatctgtctccccagaagacacaggaaacaatgtattgtctgcccagcaatcaaaggcaatgctcaaacacccaagtggcccccaccctcagcccgctcctgcccgcccagcacccccaggccctgggggacctggggttctcagactgccaaagaagccttgccatctggcgctcccatggctcttgcaacatctccccttcgtttttgagggggtcatgccgggggagccaccagcccctcactgggttcggaggagagtcaggaagggccacgacaaagcagaaacatcggatttggggaacgcgtgtcaatcccttgtgccgcagggctgggcgggagagactgttctgttccttgtgtaactgtgttgctgaaagactacctcgttcttgtcttgatgtgtcaccggggcaactgcctgggggcggggatgggggcagggtggaagcggctccccattttataccaaaggtgctacatctatgtgatgggtggggtggggagggaatcactggtgctatagaaattgagatgcccccccaggccagcaaatgttcctttttgttcaaagtctatttttattccttgatatttttctttttttttttttttttttgtggatggggacttgtgaatttttctaaaggtgctatttaacatgggaggagagcgtgtgcggctccagcccagcccgctgctcactttccaccctctctccacctgcctctggcttctcaggcctctgctctccgacctctctcctctgaaaccctcctccacagctgcagcccatcctcccggctccctcctagtctgtcctgcgtcctctgtccccgggtttcagagacaacttcccaaagcacaaagcagtttttccccctaggggtgggaggaagcaaaagactctgtacctattttgtatgtgtataataatttgagatgtttttaattattttgattgctggaataaagcatgtggaaatgacccaaacataa

SEQ ID NO: 4917 - DNA, 1921 bp, Homo sapiens
cctgttgctgatgctgccgtgcggtacttgtcatggagctggcactgcggcgctctcccgtcccgcggtggttgctgctgctgccgctgctgctgggcctgaacgcaggagctgtcattgactggcccacagaggagggcaaggaagtatgggattatgtgacggtccgcaaggatgcctacatgttctggtggctctattatgccaccaactcctgcaagaacttctcagaactgcccctggtcatgtggcttcagggcggtccaggcggttctagcactggatttggaaactttgaggaaattgggccccttgacagtgatctcaaaccacggaaaaccacctggctccaggctgccagtctcctatttgtggataatcccgtgggcactgggttcagttatgtgaatggtagtggtgcctatgccaaggacctggctatggtggcttcagacatgatggttctcctgaagaccttcttcagttgccacaaagaattccagacagttccattctacattttctcagagtcctatggaggaaaaatggcagctggcattggtctagagctttataaggccattcagcgagggaccatcaagtgcaactttgcgggggttgccttgggtgattcctggatctcccccgtggattcggtgctctcctggggaccttacctgtacagcatgtctcttctcgaagacaaaggtctggcagaggtgtctaaggttgcagagcaagtactgaatgccgtaaataaggggctctacagagaggccacagagctgtgggggaaagcagaaatgatcattgaacagaacacagatggggtgaacttctataacatcttaactaaaagcactcccacgtctacaatggagtcgagtctagaattcacacagagccacctagtttgtctttgtcagcgccacgtgagacacctacaacgagatgccttaagccagctcatgaatggccccatcagaaagaagctcaaaattattcctgaggatcaatcctggggaggccaggctaccaacgtctttgtgaacatggaggaggacttcatgaagccagtcattagcattgtggacgagttgctggaggcagggatcaacgtgacggtgtataatggacagctggatctcatcgtagataccatgggtcaggaggcctgggtgcggaaactgaagtggccagaactgcctaaattcagtcagctgaagtggaaggccctgtacagtgaccctaaatctttggaaacatctgcttttgtcaagtcctacaagaaccttgctttctactggattctgaaagctggtcatatggttccttctgaccaaggggacatggctctgaagatgatgagactggtgactcagcaagaataggatggatggggctggagatgagctggtttggccttggggcacagagctgagctgaggccgctgaagctgtaggaagcgccattcttccctgtatctaactggggctgtgatcaagaaggttctgaccagcttctgcagaggataaaatcattgtctctggaggcaatttggaaattatttctgcttcttaaaaaaacctaagattttttaaaaaattgatttgttttgatcaaaataaaggatgataatagatattattttttcttatgacagaagcaaatgatgtgatttatagaaaaactgggaaatacaggtacccaaagagtaaatcaacatctgtatacccccttcccaggggtaagcactgttaccaatttagcatatgtccttgcagaatttttttttctatatatacatatatattttttaccaaaatgaatcattactctatgttgttttactatttgtttgacatatcagtatatctgaaacaccttttcatgtcaataaatgttcttctctaacattaa

SEQ ID NO: 4918 - protein, 452 aa, Homo sapiens
MELALRRSPVPRWLLLLPLLLGLNAGAVIDWPTEEGKEVWDYVTVRKDAYMFWWLYYATNSCKNFSELPLVMWLQGGPGGSSTGFGNFEEIGPLDSDLKPRKTTWLQAASLLFVDNPVGTGFSYVNGSGAYAKDLAMVASDMMVLLKTFFSCHKEFQTVPFYIFSESYGGKMAAGIGLELYKAIQRGTIKCNFAGVALGDSWISPVDSVLSWGPYLYSMSLLEDKGLAEVSKVAEQVLNAVNKGLYREATELWGKAEMIIEQNTDGVNFYNILTKSTPTSTMESSLEFTQSHLVCLCQRHVRHLQRDALSQLMNGPIRKKLKIIPEDQSWGGQATNVFVNMEEDFMKPVISIVDELLEAGINVTVYNGQLDLIVDTMGQEAWVRKLKWPELPKFSQLKWKALYSDPKSLETSAFVKSYKNLAFYWILKAGHMVPSDQGDMALKMMRLVTQQE

SEQ ID NO: 4919 - DNA, 1932 bp, Homo sapiens
ccggactgcggaaggatggagctggccgccggaagcttctcggaggagcagttctgggaggcctgcgccgagctccagcagcccgctctggccggggccgactggcagctcctagtggagacctcgggcatcagcatctaccggctgctggacaagaagactggacttcatgagtataaagtctttggtgttctggaggactgctcaccaactctactggcagacatctatatggactcagattacagaaaacaatgggaccagtatgttaaagaactctatgaacaagaatgcaacggagagactgtggtctactgggaagtgaagtacccttttcccatgtccaacagagactatgtctaccttcggcagcggcgagacctggacatggaagggaggaagatccatgtgatcctggcccggagcacctccatgcctcagcttggcgagaggtctggggtgatccgggtgaagcaatacaagcagagcctggcgattgagagtgacggcaagaaggggagcaaagttttcatgtattacttcgataacccgggtggccaaattccgtcctggctcattaactgggccgccaagaatggagttcctaacttcttgaaagacatggcaagagcctgtcagaactacctcaagaaaacctaagaaagagaactgggaacattgcatccatgggttgatgtctctggaagtgcaaccacccaatgtctctggaagtgccacctggaagtgccacctggaagtgtctctggaagagcacccaccactgttcagccttcccctgctgtttctgtcttcagaggcctacacactaccacatcctttctaagcatgtttgcctgacatccagctcactcgtctgcttcctttctcgctccccccatcctgggctgggctgccttcttctacagttcaatatggggcagactagggaaacctttgcttgcttactattaggaggggaagtcttcagtagggaacacgatcattccattgtgcaattttacggggatgggtgggcggagggacacaacaaaatttaagaatgactatttgggcgggctggctcttttgcagcttgtgatttcttccagcttgggaggggctgctggaagtggcatttcgttcagagctgactttcagtgcacccaaactggatgacgtgccaatgtccatttgccttatgctttgtggagctgattaggctgggatttgaggtgataatccagtaagtctttcctcgttcctacttgtggaggatcagtagctgttatgatgccagaccatttggagaagtatcagaggcctgaccggacacataatacgacaaccacatttttcctcatcatccatgaggaaatggatgatttctcttttccatatgtcactgggggaaaggctgcctgtacctctcaagctttgcattttactggaaactgaggcgtcaagatggctgtggcagctagcaaaagcaaagatgctttgtgcatagccttgtgaaaaagtatctttctatgcaataagatgaattttcctcccagaatatttagaaatgtagaagggataacagttcacagccaggtaaaatttaactggtggcttaatgactctgcacctttttctcaggaattctgcctaagttgtctgccttttctaccaccaaaaagacttttagttttctatgctttctcctgaattttggtagggtaagtatttctatgtcaaaggcacagccttgatgatctcagggaaaaattttaatcactgtgtataatgatactgaaccttgattaataacagaaattcaggatgtaaagccacagaatgggatttattaatgtgggatacctcagactgtttgttttctttctgggaagaaaagtgtgttctataatgaataaatatagagtggttttt

SEQ ID NO: 4920 - protein, 214 aa, Homo sapiens
MELAAGSFSEEQFWEACAELQQPALAGADWQLLVETSGISIYRLLDKKTGLHEYKVFGVLEDCSPTLLADIYMDSDYRKQWDQYVKELYEQECNGETVVYWEVKYPFPMSNRDYVYLRQRRDLDMEGRKIHVILARSTSMPQLGERSGVIRVKQYKQSLAIESDGKKGSKVFMYYFDNPGGQIPSWLINWAAKNGVPNFLKDMARACQNYLKKT

SEQ ID NO: 4921 - DNA, 6111 bp, Homo sapiens
ccgcccccgacccgagctctttcgtctgcctgccagtttcctgcgtccccggagaggatcctgctgagcccagcctcccccctccccttctcctcctctcccttggagagcccgggcagccactgccccgcagccccagtgacaggaggagaccataacccccgacagcgccatggcccagattctgccaattcgttttcaggagcatctccagctccagaacctgggtatcaacccagcaaacattggcttcagtaccctgactatggagtctgacaaattcatctgcattagagaaaaagtaggagagcaggcccaggtggtaatcattgatatgaatgacccaagtaatccaattcgaagaccaatttcagcagacagcgccatcatgaatccagctagcaaagtaattgcactgaaagctgggaaaactcttcagatttttaacattgaaatgaaaagtaaaatgaaggctcataccatgactgatgatgtcaccttttggaaatggatctctttgaatacggttgctcttgttacggataatgcagtttatcactggagtatggaaggagagtctcagccagtgaaaatgtttgatcgccattctagccttgcagggtgccagattatcaattaccgtacagatgcaaaacaaaagtggttacttctgactggtatatctgcacagcaaaatcgtgtggtgggagctatgcagctatattctgtagataggaaagtgtctcagcccattgaaggacatgcagctagctttgcacagtttaagatggaaggaaatgcagaagaatcaacgttattttgttttgcagttcggggccaagctggagggaagttacatattattgaagttggcacaccacctacagggaaccagccctttccaaagaaggcagtggatgtcttctttcctccagaagcacaaaatgattttcctgttgcaatgcagatcagtgaaaagcatgatgtggtgttcttgataaccaagtatggttatatccacctctatgatcttgagactggtacctgcatctacatgaatagaatcagtggagaaacaatttttgttactgcacctcatgaagccacagctggaataattggagtaaacagaaagggacaagttctgtcagtgtgtgtggaagaagaaaacataattccttacatcaccaatgttctacaaaatcctgatttggctctgagaatggctgtacgtaataacttagccggtgctgaagaactctttgcccggaaatttaatgctctttttgcccagggaaattactcggaggcagcaaaggtggctgctaatgcaccaaagggaattcttcgtactccagacactatccgtcggttccagagtgtcccagcccagccaggtcaaacttctcctctacttcagtactttggtatccttttggaccagggacagctcaacaaatacgaatccttagagctttgtaggcctgtacttcagcaagggcgaaaacagcttttggagaaatggttaaaagaagataagctggaatgttctgaagaactgggtgatcttgtgaaatctgtggaccctacattggcacttagtgtgtacctaagggctaacgtcccaaataaagtcattcagtgctttgcagaaacaggtcaagtccaaaagattgttttatatgctaaaaaagttggatacactccagattggatatttctgctgagaaatgtaatgcgaatcagtccagatcagggacagcagtttgcccaaatgttagttcaagatgaagagcctcttgctgacatcacacagattgtagatgtctttatggaatacaatctaattcagcagtgtactgcattcttgcttgatgctctgaagaataatcgcccatctgaaggtcctttacagacgcggttacttgagatgaaccttatgcatgcgcctcaagttgcagatgctattctaggcaatcagatgttcacacattatgaccgggctcatattgctcaactgtgtgaaaaggctggcctactgcagcgtgcattagaacatttcactgatttatatgatataaaacgtgcagtggttcacacccatcttcttaaccctgagtggttagtcaactactttggttccttatcagtagaagactccctagaatgtctcagagccatgctgtctgccaacatccgtcagaatctgcagatttgtgttcaggtggcttctaaatatcatgaacaactgtcaactcagtctctgattgaactttttgaatctttcaagagttttgaaggtctcttttattttctgggatccattgttaactttagccaggacccagatgtgcactttaaatatattcaggcagcttgcaagactgggcaaatcaaagaagtagaaagaatctgtagagaaagcaactgctacgatcctgagcgagtcaagaattttcttaaggaagcaaaactaacagatcagctaccacttatcattgtgtgtgatcgatttgactttgtccatgatttggtgctctatttatatagaaataatcttcaaaagtatatagagatatatgtacagaaggtgaatccaagtcgacttcctgtagttattggaggattacttgatgttgactgttctgaagatgtcataaaaaacttgattcttgttgtaagaggtcaattctctactgatgagcttgttgctgaggttgaaaaaagaaacagattgaaactgcttctgccttggctagaggccagaattcatgagggctgtgaggagcctgctactcacaatgccttagccaaaatctacatagacagtaataacaacccggagagatttcttcgtgaaaatccctactatgacagtcgcgttgttggaaagtattgtgagaagagagatccacatctggcctgtgttgcttatgaacgtggccaatgtgatctggaacttattaatgtttgcaatgagaattccctcttcaaaagtctttctcgctacctggtacgtcgaaaggatccagaattgtggggcagcgtgctgctggaaagcaatccttacaggagacccctaattgaccaggttgtacaaacagctttgtctgagactcaggaccctgaagaagtgtcagtaactgtaaaggctttcatgactgcagaccttcctaatgaactcattgaactgctggagaaaattgtccttgataactctgtattcagtgaacacaggaatctgcaaaacctccttatcctcactgcaattaaggctgaccgtacacgtgttatggagtatattaaccgcctggataattatgatgccccagatattgccaatatcgccatcagcaatgagctgtttgaagaagcatttgccattttccggaaatttgatgtcaatacttcagcagttcaggtcttaattgagcatattggaaacttggatcgggcatatgagtttgctgaacgttgcaatgaacctgcggtctggagtcaacttgcaaaagcccagttgcagaaaggaatggtgaaagaagccattgattcttatatcaaagcagatgatccttcctcctacatggaagttgttcaggctgccaatactagtggaaactgggaagaactggtgaagtacttgcagatggcccgtaagaaggctcgagagtcctatgtggagacagaactgatattcgcactggctaaaacaaaccgccttgcagagttagaagaatttatcaatggaccaaataatgctcatatccaacaagttggtgaccgttgttatgatgaaaaaatgtatgatgctgctaagttgttgtacaataatgtttccaattttggacgtttggcatctaccctggttcacctgggtgaatatcaggcagctgttgatggggctaggaaagctaacagtactcgaacatggaaagaggtctgcttcgcctgtgtagatgggaaagaattccgtcttgctcagatgtgtggacttcatattgttgtacatgcagatgaattagaagaacttatcaactactatcaggatcgtggctattttgaagagctgatcaccatgttggaagcagcactgggacttgagcgagctcacatgggaatgtttactgaattagctattctatactctaaatttaagcctcagaaaatgagggagcacctggagctgttctggtctagagtgaatattcccaaggtgctaagagctgcagaacaagctcatctttgggcagaactggtgtttttgtatgacaagtatgaagaatatgataatgccataattaccatgatgaatcatccaactgatgcctggaaagaagggcaattcaaagatatcattaccaaggttgccaatgtggaactatactacagagcaatacagttctacttagaattcaagcctctgttgttaaatgatttgctgatggtgctgtctccacggttggatcacactcgtgcagtcaattatttcagcaaggttaaacagctaccactggtgaaaccgtatttgcgttcagttcagaaccataacaacaaatctgtgaatgaatcattgaacaatctttttattacagaagaagattatcaggctctgcgaacatcaatagatgcttatgacaactttgacaatatctcgcttgctcagcgtttggaaaaacatgaactcattgagttcaggagaattgctgcttatctcttcaaaggcaacaatcgctggaaacagagtgtagagctgtgcaagaaagacagcctttacaaggatgcaatgcagtatgcttctgaatctaaagatactgaattggctgaagaactcctgcagtggtttttgcaggaagaaaaaagagagtgctttggagcttgtctgtttacctgttacgatcttttaaggccagatgtcgtcctagaaactgcatggaggcacaatatcatggattttgccatgccctatttcatccaggtcatgaaggagtacttgacaaaggtggataaattagatgcttcagaatcactgagaaaagaagaagaacaagctacagagacacaacccattgtttatggtcagccccagttgatgctgacagcaggacccagtgttgccgtccctccccaggcaccttttggttatggttataccgcaccaccgtatggacagccacagcctggctttgggtacagcatgtgagatgaagcgctgatcctgtagtcacctattttcgtactgaaacatcgtctttacccacttctcagtttataatgggggaaaacaggcaacgtgttcttgtaacctttatttcatgaaggacttctttttgtttctaactataaacttggatcacctatgttaaaaccttatttcacattccacatcattttagaatttattttcgaaggggaatagtttcaatgttttattcacttgggctttttttcttccccctctttctttaaagaactgctcaatattcaatctgttgtgaagaacctgatttgcactctgtagtgtttaaagaaacaaagaaactctaatattgaatctcttaaatttagtgtatgtaaacagcttacaaatacgtattgtctaaatgcatttaaatctgttttattcaaagaaaagctaaagcaaaaacactggcatatgaccatgcaagactgtcagtgccaacaaagacaacactaatcagcacatcgtacactggattgcagtgcttcccagattattgaaaaatgttacagacaacttgcctgatttttaaatgagcgtaaaaggccctctaacctatgcaggtttccccattatgcatatagaaaatgctagtatgttttgctcacttcatatgtaacaggtgcccttatgttgtgctgtatcctgtgctttttctgtgggaccattccattcaggagcaaagagcaccatgattccaatcttgtgtgtgtttactaacccttccctgaggcttgtgtatgttggatattgtggtgttttagatcactgagtgtacagaagagagaaattcaaacaaaatattgctgttcttcagttttgtttgtggaatttgaaattactcaaatttaaaataaattactggactgtgg

SEQ ID NO: 4922 - protein, 1675 aa, Homo sapiens
MAQILPIRFQEHLQLQNLGINPANIGFSTLTMESDKFICIREKVGEQAQVVIIDMNDPSNPIRRPISADSAIMNPASKVIALKAGKTLQIFNIEMKSKMKAHTMTDDVTFWKWISLNTVALVTDNAVYHWSMEGESQPVKMFDRHSSLAGCQIINYRTDAKQKWLLLTGISAQQNRVVGAMQLYSVDRKVSQPIEGHAASFAQFKMEGNAEESTLFCFAVRGQAGGKLHIIEVGTPPTGNQPFPKKAVDVFFPPEAQNDFPVAMQISEKHDVVFLITKYGYIHLYDLETGTCIYMNRISGETIFVTAPHEATAGIIGVNRKGQVLSVCVEEENIIPYITNVLQNPDLALRMAVRNNLAGAEELFARKFNALFAQGNYSEAAKVAANAPKGILRTPDTIRRFQSVPAQPGQTSPLLQYFGILLDQGQLNKYESLELCRPVLQQGRKQLLEKWLKEDKLECSEELGDLVKSVDPTLALSVYLRANVPNKVIQCFAETGQVQKIVLYAKKVGYTPDWIFLLRNVMRISPDQGQQFAQMLVQDEEPLADITQIVDVFMEYNLIQQCTAFLLDALKNNRPSEGPLQTRLLEMNLMHAPQVADAILGNQMFTHYDRAHIAQLCEKAGLLQRALEHFTDLYDIKRAVVHTHLLNPEWLVNYFGSLSVEDSLECLRAMLSANIRQNLQICVQVASKYHEQLSTQSLIELFESFKSFEGLFYFLGSIVNFSQDPDVHFKYIQAACKTGQIKEVERICRESNCYDPERVKNFLKEAKLTDQLPLIIVCDRFDFVHDLVLYLYRNNLQKYIEIYVQKVNPSRLPVVIGGLLDVDCSEDVIKNLILVVRGQFSTDELVAEVEKRNRLKLLLPWLEARIHEGCEEPATHNALAKIYIDSNNNPERFLRENPYYDSRVVGKYCEKRDPHLACVAYERGQCDLELINVCNENSLFKSLSRYLVRRKDPELWGSVLLESNPYRRPLIDQVVQTALSETQDPEEVSVTVKAFMTADLPNELIELLEKIVLDNSVFSEHRNLQNLLILTAIKADRTRVMEYINRLDNYDAPDIANIAISNELFEEAFAIFRKFDVNTSAVQVLIEHIGNLDRAYEFAERCNEPAVWSQLAKAQLQKGMVKEAIDSYIKADDPSSYMEVVQAANTSGNWEELVKYLQMARKKARESYVETELIFALAKTNRLAELEEFINGPNNAHIQQVGDRCYDEKMYDAAKLLYNNVSNFGRLASTLVHLGEYQAAVDGARKANSTRTWKEVCFACVDGKEFRLAQMCGLHIVVHADELEELINYYQDRGYFEELITMLEAALGLERAHMGMFTELAILYSKFKPQKMREHLELFWSRVNIPKVLRAAEQAHLWAELVFLYDKYEEYDNAIITMMNHPTDAWKEGQFKDIITKVANVELYYRAIQFYLEFKPLLLNDLLMVLSPRLDHTRAVNYFSKVKQLPLVKPYLRSVQNHNNKSVNESLNNLFITEEDYQALRTSIDAYDNFDNISLAQRLEKHELIEFRRIAAYLFKGNNRWKQSVELCKKDSLYKDAMQYASESKDTELAEELLQWFLQEEKRECFGACLFTCYDLLRPDVVLETAWRHNIMDFAMPYFIQVMKEYLTKVDKLDASESLRKEEEQATETQPIVYGQPQLMLTAGPSVAVPPQAPFGYGYTAPPYGQPQPGFGYSM

SEQ ID NO: 4923 - DNA, 529 bp, Homo sapiens; identical to SEQ ID NO: 2417

SEQ ID NO: 4924 - DNA, 3127 bp, Homo sapiens
aaccggcgccagccatggcctctggggcgggcggaagctggggtcgctccccaccgcagagcgcagtcccgacgccctgggtcaccttcctgcagcccctctcgtgggccgtcccacctgcgcccccgcagccaggccgcgtgaaggaagacctgctggaactgatgatgctgcagaacgcgcagatgcaccagctgctgctgagtcgcctggtggctggagcgctgcagccccggcctgcctcgccctgccctcaggtctacctggaggttccacaggaagagcctgaggaggaggaggaggagatggacgtgcgggagaaagggcctttggtgtttcaccaccactacttgccctatttgatgccctccccgggtgccctgctgccctggccagcccccttcttccccacccctgcttgtcagccctacttgcaggacgtgcccaggattcagcactgtcctgcctccagggaaagggaggtgagagctgtgcccccacccccaccccccagtgccacagggactgtgggtgctgatgtacccccggcttcagactactatgatgccgagagcctcctatgaggacagaccccggccctgggaactgcaccagcttcctgctctggatacagccccggagccgcctcctgcacctctcttgtcgactccccggtgcccatggctggcagtccttctcactccctcaacctcagccaggccctcttctcctggggaaatcagtccctgccccacgccaatgagttcctggacgggccggatctgtgctgttgtgtaagagctccctagagcaccacccaggcccttgaagccacgtcagcccgcctctgccccactgcttcctgcctggagcagggggaggcctgggaacagagcccccaccctctctccctcacccctctctctgggatgatgaggtctccttccagcctagtaatggagcaagaggggagggggggattccttctgctttccacagctttgaaggcccctttgaggtggctggaggggcccagagtggtcggggagagactttgctgggcagcgcccctgagcagagtcagttcgctgggccccccacccctcatcccaggaagcagctctgttggcagaaaggagaggtcagagctttgtcctgctgtggccaggagtggcctgaggtctcctggggccaggtgggaacagtgtgtcctctgccccctgggccagggtgtgtttcccccaccctccctcagtagcaatgagctactcgggccagatgggggcctgttgcatgggctgggaggcccctgtgaaggagagggtggggagggaggcatctagggagaggggtcccccatggtggctcccctccctggccattgttatcccaggaggagacactgtgggcacagggctaagtccaggtgtttgtattcgggctagaaaaggcaatgtcccaagtctctgctgcctgtcacagtccttcagccagggctggacctcaaccctgaggagtcacactgagttccagtgaccaccgtggtggtggccatgccactcatggttgctatggccggaaggcctggggcagcctcctccaagccgctcgcaccccgtaggtgcccatccgctgctggcgcaagtgctggccgaagatgaagcagagcaggacagatgtcacgaacagggacagcaacaccgacaccaccgtgactatgatgaccatctggctgtccgacacaggctctggggagggagggggcaagggtcttagacgtcctgtgatcccagttaccagggaccaaaagggagtggaagtccacccccaacccagacccccagaccccgccgcccgctcatgcatccagcagtcaccccagttgcagagatgagtggtgaatggtgtctgcattaaaattattatctggaaaaaaggtggcccagggctcaggctaccagctggacttctgtgtggctgtgagggcagatgtccccttgtcagcagccatgggaccagtgtgtagctgctggacaccgtggcctggagggtggcatggtcccagccaagccccttcttgggcagagctgagtgaacttcatgccaggctccctgtgtgccggccgtccagggtcaccaagcagcagagctctggggacctcagtgggggcagtcaggccaaacttctcattgtggaggggagccaaggccagggagagccgtcaaggtcatggggcttgatggtggccgaggaactagttgacctctcccgacctctggagcagttgaggtccaagctggggacttggaaagaacttcagggaagagggagagtaagagggaagcctcaggatgaagggtgggctcctgggtgtttgcttcccaagtgggactcaagatttttcttcccccgaggggctgaaagtgacttatcactcccaactccatccacggatcccccctcaccatagatctccaacatcttcggggctgagtgtttgtgaaagatgttgccaccgcgagacatcaagtccagcacagccaggcaggagaagttgcggtggccatcctctctgtcagccgtgctgttgaatgtggctgtggcctcctgcggagcaggggctgccttcccgaaggtctcatagtgcagagtctcattgccacggaacaggaagagggtgaggctgtccaggggctccacggtgggcaccctgcactcaatggtgaaggacttgcccacagccaccaaagtgggttgcagtgtcaggatgacctgccttggaggctctgcaggggacaaaggagggaggtctggtcaggatgggggtgcagtcccagcagcctccccctggccagggccatctcctgtcaccatggtgttccacggttggggaggaggtggcctggccggctccagtgcagagaggaagagggcagcagttgaggatggaggctggactgtgtggtagttttacagacatgatggtttccggtgaccaggtgtctacaaggacaaggttcagaaattgtacagccaactggaaagatataaaagtttgggtctgtctcctctccttcagaaatgaaatataaatttcaaacattaaacagttgggtgatcacgttg

SEQ ID NO: 4925 - protein, 189 aa, Homo sapiens
MASGAGGSWGRSPPQSAVPTPWVTFLQPLSWAVPPAPPQPGRVKEDLLELMMLQNAQMHQLLLSRLVAGALQPRPASPCPQVYLEVPQEEPEEEEEEMDVREKGPLVFHHHYLPYLMPSPGALLPWPAPFFPTPACQPYLQDVPRIQHCPASREREVRAVPPPPPPSATGTVGADVPPASDYYDAESLL

SEQ ID NO: 4926 - DNA, 2718 bp, Homo sapiens
ggcggccaaacctccggaggccggggacggaaggcgggcccgcagcagatcctggatccggaatctcccgggcaggagcggaatctgtcccgaaccgggtctgtgaggaactcgcgaacttggattaggaaatcccggagcccggatcgacaaatcccggaacccggaattaagatcgccaagtcccggatcgcggagcacagagcacggagtggactcgacgcggagcccggagtccggatcgcggcaccgcgggacgggacggagcgatgtcgggccgaggcgcgggcgggttcccgctgcccccgctaagccctggcggcggcgccgtggctgcggccctgggagcgccgcctccccccgcgggacccggcatgctgcccggaccggcgctccggggaccgggtccggcaggaggcgtggggggccccggggccgccgccttccgccccatgggccccgcgggccccgcggcgcagtaccagcgacctggcatgtcaccagggaaccggatgcccatggctggcttgcaggtgggaccccctgctggctccccatttggtgcagcagctccgcttcgacctggcatgccacccaccatgatggatccattccgaaaacgcctgcttgtgccccaggcgcagcctcccatgcctgcccagcgccgggggttaaagaggaggaagatggcagataaggttctacctcagcgaatccgggagcttgttccagagtctcaggcgtacatggatctcttggcttttgagcggaagctggaccagaccattgctcgcaagcggatggagatccaggaggccatcaaaaagcctctgacacaaaagcgaaagcttcggatctacatttccaatacgttcagtcccagcaaggcggaaggcgatagtgcaggaactgcagggacccctgggggaaccccagcaggggacaaggtggcttcctgggaactccgagtggaaggaaaactgctggatgatcctagcaaacagaagaggaagttttcttcattctttaagagcctcgtcattgagctggacaaggagctgtacgggcctgacaatcacctggtggagtggcaccggatgcccaccacccaggagacagatggcttccaagtaaaacggcctggagacctcaacgtcaagtgcaccctcctgctcatgctggatcatcagcctccccagtacaaattggacccccgattggcaaggctgctgggagtgcacacgcagacgagggccgccatcatgcaggccctgtggctttacatcaagcacaaccagctgcaggatgggcacgagcgggagtacatcaactgcaaccgttacttccgccagatcttcagttgtggccgactccgtttctccgagattcccatgaagctggcagggttgctgcagcatccagaccccattgtcatcaaccatgtcattagtgtcgaccctaacgaccagaagaagacagcctgttacgacatcgatgtggaggtggacgacccactgaaggcccaaatgagcaattttctggcctctaccaccaatcagcaggagatcgcctcccttgatgtcaagatccatgagaccattgagtccatcaaccagctgaagacccagagagatttcatgctcagttttagcaccgacccccaggacttcatccaggaatggctccgttcccagcgccgagacctcaagatcatcactgatgtgattggaaatcctgaggaggagagacgagctgctttctaccaccagccctgggcccaggaagcagtaggcaggcacatctttgccaaggtgcagcagcgaaggcaggaactggaacaggtgctgggaattcgcctgacctaactgctcagggatctttcttcccagccctggagcctggagggagaccaccctctgggtccttgctggggccgcagacacgtaggctggggtgaggagtgtctgctgtcaccctctactctccagctttagtcttataaatgtagtgataggattccttgttgcttggtccccaaagccttatactttttgcattggctttaattgggttcagcagatgcctcctctgcccccctgcaggcaggcccaagtaggactgctggaggctgtgctttgacattgtaagacatttccgaaccaaaggctgctgggtttgcatgtttacagactccccctggggcgagggtcagagctggctctggggagctgggctaggaagaggaggtgcagcccagactcttcctagcctttctaaaccaaagttctttgccattcctacaagcccagccttgctgctggttttttcctttcctttgggtatttgcactattttgggagcaagttttctatgtgggagccactttttttgtacaggggtaagttgggggttttcagggagcctgttaggtgcctccttcttttctttcctcaatctatgcaagcggctctggccgccatcatctcctgggatgccagagggctgcctctccagcggcttgggccggggaggggacactccagttctctagcatggcctgaggtatggggtatgtgcatgtggaggccagggtaaggtgaatggggaggctgggaggactggtgttgccctttggagcttggtgaggagggtgggcctagggcttggcgagtgccacatctggcaggtttggaaatttccaaataaatccttttgtct

SEQ ID NO: 4927 - DNA, 1271 bp, Rattus norvegicus
atggcgcttgacggaccagagcagatggagctggaggaggggaaggcaggcagcggactccgccaatattatctgtccaagattgaagaactccagctgattgtgaatgataagagccaaaacctccggaggctgcaggcacagaggaacgaactaaatgctaaagttcgcctattgcgggaggagctacagctgctgcaggagcagggctcctatgtgggggaagtagtccgggccatggataagaagaaagtgttggtcaaggtacatcctgaaggtaaatttgttgtagacgtggacaaaaacattgacatcaatgatgtgacacccaattgccgggtggctctaaggaatgacagctacactctgcacaagatcctgcccaacaaggtagacccattagtgtcactgatgatggtggagaaagtaccagattcaacttatgagatgattggtggactggacaaacagatcaaggagatcaaagaagtgatcgagctgcctgttaagcatcctgagctcttcgaagcactgggcattgctcagcccaagggagtgctgctgtatggacctccaggcactgggaagacactgttggcccgggctgtggctcatcatacggactgtacctttattcgtgtctctggctctgaactggtacagaaattcataggggaaggggcaagaatggtgagggagctgtttgtcatggcacgggaacatgctccatctatcatcttcatggacgaaatcgactccatcggctcctcgcggctggaggggggttctggaggggacagtgaagtgcagcgcacgatgctggagttgctcaaccagctcgacggctttgaggccaccaagaacatcaaggttatcatggctactaataggattgatatcctggactcggcactgcttcgcccagggcgcattgacagaaaaattgaattcccaccccccaatgaggaggcccggctggacattttgaagattcattctcggaagatgaacctgacccgggggatcaacctgagaaaaattgctgagctcatgccaggagcatcaggggctgaagtgaagggcgtgtgcacagaagctggcatgtatgccctgcgagaacggcgagtccatgtcactcaggaggactttgagatggcagtagccaaggtcatgcagaaggacagtgagaaaaacatgtccatcaagaaattatggaagtgagtggacagcctttgtgtgtatctctccaataaagctctgtgggccaagtc

SEQ ID NO: 4928 - protein, 406 aa, Rattus norvegicus
MALDGPEQMELEEGKAGSGLRQYYLSKIEELQLIVNDKSQNLRRLQAQRNELNAKVRLLREELQLLQEQGSYVGEVVRAMDKKKVLVKVHPEGKFVVDVDKNIDINDVTPNCRVALRNDSYTLHKILPNKVDPLVSLMMVEKVPDSTYEMIGGLDKQIKEIKEVIELPVKHPELFEALGIAQPKGVLLYGPPGTGKTLLARAVAHHTDCTFIRVSGSELVQKFIGEGARMVRELFVMAREHAPSIIFMDEIDSIGSSRLEGGSGGDSEVQRTMLELLNQLDGFEATKNIKVIMATNRIDILDSALLRPGRIDRKIEFPPPNEEARLDILKIHSRKMNLTRGINLRKIAELMPGASGAEVKGVCTEAGMYALRERRVHVTQEDFEMAVAKVMQKDSEKNMSIKKLWK

SEQ ID NO: 4929 - DNA, 2999 bp, Homo sapiens
atacttgtgcggttccaagtgtggagaaagcggctctgggtctagattgagggatactccccctttccaccatgggcaagaagggcaaagttggcaagagccgacgagacaagttttatcacttggcgaaggagacgggttaccgttcccgatctgctttcaagctgatccagctcaatcgccgctttcagttcctgcagaaagcccgagccttgctggacctgtgtgctgcgccagggggatggctgcaggtagctgccaagtttatgcctgtatccagccttattgtgggagtggacctggttccaatcaagcctctccccaatgtggtgactctccaggaggacatcacaacagaacgttgtaggcaggccctgaggaaggagctgaagacctggaaggttgatgttgtgctcaatgatggggcccccaacgttggggctagctgggtccatgatgcttactcacaagcccatttgacactgatggctctacgtttggcttgtgactttttggcccgtggtggcagcttcatcacaaaggttttccgttctcgtgactatcagcctctgctatggatctttcagcagctgttccgccgtgtccaggccaccaagccccaagcctctcgccatgaatctgcagagatctttgtagtctgccaaggattcctggcccctgacaaggttgacagtaaattctttgaccccaaatttgcctttaaggaggttgaagttcaggctaagaccgttactgaattggttactaagaagaagccaaaggctgaaggctatgctgagggtgacctcactctctatcaccgtacctcagtcactgacttcctccgagctgccaaccctgttgacttcctctccaaggccagcgaaatcatggtagatgatgaagagttggcacagcatccagctaccactgaggacatacgggtgtgctgtcaggacatcagagtgttggggcgcaaggagctcaggtcgctactaaactggagaacaaaacttcggcgatatgtggccaagaagctgaaagaacaagcaaaggcactggacatcagcctcagctctggagaggaagatgaaggtgatgaggaggactcaacagctggaaccacaaagcagccctctaaggaggaggaggaagaggaggaggaggaacaactgaaccagaccttggcagaaatgaaggcccaggaggtggcggaattgaagaggaagaaaaagaagctgttgcgtgagcagagaaagcagcgggagcgtgtggagctgaagatggatctgcctggggtttccattgcagacgagggggagactggcatgttctccttgtgcaccatccggggtcaccagttattagaggaagtaacacaaggggatatgagtgcagcagacacatttctgtccgatctgccaagggatgatatctatgtgtcagatgttgaggacgacggtgatgacacatctctggatagtgacctggatccagaggagctggcaggagtcaggggacatcagggtctaagggaccaaaagcgtatgcgacttactgaagtgcaagatgataaagaggaggaggaggaggagaatccactgctggtaccactggaggaaaaggcagtactgcaggaagaacaagccaacctgtggttctcaaagggcagctttgctgggatcgaggacgatgccgatgaggccctggagatcagtcaggcccagctgttatttgagaaccggcggaagggacggcagcagcagcagaagcagcagctgccacagacacccccttcctgtttgaagactgagataatgtctcccctgtaccaagatgaagcccctaagggaacagaggcttcttcggggacagaagctgccactggccttgaaggggaagaaaaggatggcatctcagacagtgatagcagtactagcagtgaggaagaagagagctgggaacccctccgtggtaagaagcgaagccgtgggcctaagtcagatgatgacgggtttgagatagtgcctattgaggacccagcgaaacatcggatactggaccccgaaggccttgctctaggtgctgttattgcctcttccaaaaaggccaagagagacctcatagataactccttcaaccggtacacatttaatgaggatgagggggagcttccggagtggtttgtgcaagaggaaaagcagcaccggatacgacagttgcctgttggtaagaaggaggtggagcattaccggaaacgctggcgggaaatcaatgcacgtcccatcaagaaggtggctgaggctaaggctagaaagaaaaggaggatgctgaagaggctggagcagaccaggaagaaggcagaagccgtggtgaacacagtggacatctcagaacgagagaaagtggcacagctgcgaagtctctacaagaaggctgggcttggcaaggagaaacgccatgtcacctacgttgtagccaaaaaaggtgtgggccgcaaagtgcgccggccagctggagtcagaggtcatttcaaggtggtggactcaaggatgaagaaggaccaaagagcacagcaacgtaaggaacaaaagaaaaaacacaaacggaagtaagcagagctgccaggctcccaggagagcatggggactaggaggaagggtgtggcatggctcagtctggcccccttgattaccggcctagcccctgctcacatcacagctgtctgaagaacagtgaggtggagtgcctagaactcccgtggtggtcctgagcagagaggaggatgtcctcctgcctgcctgaaggtctcccatgaaaacactgctgaactgtgttgacactcatgaccctttttttaaaccgttaaagggaagttcggtgttggagcgatactcaatgtagtcagtctacacctggacgtgtgggccacttaagccctccccacccccatcctattcctaaataaaaccaggataatggaaaaaaaaaaaaaaaaa

SEQ ID NO: 4930 - protein, 847 aa, Homo sapiens
MGKKGKVGKSRRDKFYHLAKETGYRSRSAFKLIQLNRRFQFLQKARALLDLCAAPGGWLQVAAKFMPVSSLIVGVDLVPIKPLPNVVTLQEDITTERCRQALRKELKTWKVDVVLNDGAPNVGASWVHDAYSQAHLTLMALRLACDFLARGGSFITKVFRSRDYQPLLWIFQQLFRRVQATKPQASRHESAEIFVVCQGFLAPDKVDSKFFDPKFAFKEVEVQAKTVTELVTKKKPKAEGYAEGDLTLYHRTSVTDFLRAANPVDFLSKASEIMVDDEELAQHPATTEDIRVCCQDIRVLGRKELRSLLNWRTKLRRYVAKKLKEQAKALDISLSSGEEDEGDEEDSTAGTTKQPSKEEEEEEEEEQLNQTLAEMKAQEVAELKRKKKKLLREQRKQRERVELKMDLPGVSIADEGETGMFSLCTIRGHQLLEEVTQGDMSAADTFLSDLPRDDIYVSDVEDDGDDTSLDSDLDPEELAGVRGHQGLRDQKRMRLTEVQDDKEEEEEENPLLVPLEEKAVLQEEQANLWFSKGSFAGIEDDADEALEISQAQLLFENRRKGRQQQQKQQLPQTPPSCLKTEIMSPLYQDEAPKGTEASSGTEAATGLEGEEKDGISDSDSSTSSEEEESWEPLRGKKRSRGPKSDDDGFEIVPIEDPAKHRILDPEGLALGAVIASSKKAKRDLIDNSFNRYTFNEDEGELPEWFVQEEKQHRIRQLPVGKKEVEHYRKRWREINARPIKKVAEAKARKKRRMLKRLEQTRKKAEAVVNTVDISEREKVAQLRSLYKKAGLGKEKRHVTYVVAKKGVGRKVRRPAGVRGHFKVVDSRMKKDQRAQQRKEQKKKHKRK

SEQ ID NO: 4931 - DNA, 3347 bp, Homo sapiens
atcccttggaggcattcatggctgaagtggaggatcaggcagctagagacatgaagaggcttgaagaaaaggacaaggaaagaaaaaacgtaaagggtattcgagatgacattgaagaggaagatgaccaagaagcttattttcgatacatggcagaaaacccaactgctggtgtggttcaggaggaagaggaagacaatctagaatatgatagtgacggaaatccaattgcacctaccaaaaaaatcattgatcctcttccccccattgatcattcagagattgactatccaccatttgaaaaaaacttttacaatgagcatgaagagataaccaacctcactccacagcagttaatagatctccggcataagctcaatcttcgggtctctggtgctgcacctcctagaccaggaagtagctttgctcattttgggtttgacgaacaacttatgcaccagattcggaaatctgaatacacacagcccactccaatacagtgccagggtgtgcctgtggcattaagtggtagagacatgattggtattgccaaaacaggtagtgggaaaactgcagccttcatttggcccatgttgattcatataatggaccagaaggagttggaaccaggtgatggaccaattgcagtgattgtgtgtcctaccagggagctttgccagcagatccatgcagaatgtaagcggtttggaaaagcatataatcttcgatcagtggccgtatatggaggagggagtatgtgggagcaggccaaggcccttcaggagggggcagagattgttgtgtgtaccccaggtcgactgatagatcatgtgaaaaagaaagctaccaatcttcaaagagtctcttaccttgtgtttgatgaagcagatcgaatgtttgacatgggatttgagtaccaagttcgatccatagcaagtcatgttcgtcctgacaggcagactctcttatttagtgcaacttttcggaagaagattgaaaagttggccagagacatcctgatcgaccctattcgagtggtgcagggagatattggagaggcaaatgaagatgtgacacagattgtggagattctccattctggacctagtaaatggaactggcttacccggcgtctggtagaatttacctcttcagggagtgtcctcctctttgttactaaaaaagccaatgctgaagagctagcgaataaccttaaacaggagggtcataatcttgggctgctccatggggatatggatcagagtgagagaaacaaggtcatttcagactttaagaaaaaggacatcccagtcctggtggccacagatgttgcagcccgtggtctggacattccttcaattaagactgtcattaactatgatgtggcacgagacattgatacccacacgcataggattggccgcacaggaagagcgggtgagaaaggtgtggcctataccctactcactcccaaggacagcaattttgctggtgacctggtccggaacttggaaggagccaatcaacacgtttctaaggaactcctagatctggcaatgcagaatgcctggtttcggaaatctcgattcaaaggagggaaaggaaaaaagctgaacattggtggaggaggcctaggctacagggagcggcctggcctgggctctgagaacatggatcgaggaaataacaatgtaatgagcaattatgaggcctacaagccttccacaggagctatgggagatcgactaacggcaatgaaagcagctttccagtcacagtacaagagtcactttgttgcagccagtttaagtaatcagaaggctggaagttctgctgctggggcaagtgggtggactagtgcagggagcttgaattctgttccaactaactcagcacaacagggccataacagtcctgacagccccgtcaccagtgccgccaagggcatcccaggctttggcaatactggcaacatcagtggtgcccctgtgacctacccgtctgccggagcccaaggagtcaacaacacagcttcagggaataacagccgagaagggactgggggcagcaacgggaaaagagagagatatactgagaaccggggcagcagcccgtcacagtcacggagagactggcaatcggcatagcgatagtccacgtcacggagatggtggtcgccatggagatggataccgccatccagaaagcagcagccgtcatactgatggccatcggcacggggagaacagacatggaggaagcgcaggccggcatggggagaaccggggtgcaaatgatggtcggaatggggaaagcaggaaagaagcttttaatcgtgagagcaagatggagcccaagatggaacccaaagtggacagcagcaagatggacaaggtggacagcaagacagataagacagctgacggctttgctgtcccagagccgcctaaacgcaagaaaagtcgatgggacagttagaggggatgtgctaaagcgtgaaatcagttgtccttaatttttagaaagattttggtaactaggtgtctcagggctgggttggggtccaaagtgtaaggaccccctgcccttagtggagagctggagcttggagacattaccccttcatcagaaggaattttcggatgttttcttgggaagctgttttggtccttggaagcagtgagagctgggaagcttcttttggctctaggtgagttgtcatgtgggtaagttgaggttatcttgggataaagggtcttctagggcacaaaactcactctaggtttatattgtatgtagcttatattttttactaaggtgtcaccttataagcatctataaattgacttctttttcttagttgtatggccaggcagtccccattttaggagttggcttctgcaaattcaatccattgagctaactgttggggagcaatttggtagttgtagacatttgcagggaagggagatgtctgattctaaatgggagttgatgctcaggtccccagccaggtttgcatccagccctgagacatgtaggaaacacctttcagacccaggctctgaagattcccagaagccacaaggattgaagggaaaaggtgatcctggtaactgttccaggattgctccaggtttgagatggtattgctaaatttaaaattaaacaagaaacccaacaacagcttttaaagtgtcttctatctcattgtattttttttaacttgccccaatgatagaaaagtcttttgctgaaatgattttgatgatttttgtttatcgtttataaaaaggaaaagaaatatacaaactttgacttttgtgaaaaaaaaaaaaaaaaaaaaa

SEQ ID NO: 4932 - protein, 709 aa, Homo sapiens
MAEVEDQAARDMKRLEEKDKERKNVKGIRDDIEEEDDQEAYFRYMAENPTAGVVQEEEEDNLEYDSDGNPIAPTKKIIDPLPPIDHSEIDYPPFEKNFYNEHEEITNLTPQQLIDLRHKLNLRVSGAAPPRPGSSFAHFGFDEQLMHQIRKSEYTQPTPIQCQGVPVALSGRDMIGIAKTGSGKTAAFIWPMLIHIMDQKELEPGDGPIAVIVCPTRELCQQIHAECKRFGKAYNLRSVAVYGGGSMWEQAKALQEGAEIVVCTPGRLIDHVKKKATNLQRVSYLVFDEADRMFDMGFEYQVRSIASHVRPDRQTLLFSATFRKKIEKLARDILIDPIRVVQGDIGEANEDVTQIVEILHSGPSKWNWLTRRLVEFTSSGSVLLFVTKKANAEELANNLKQEGHNLGLLHGDMDQSERNKVISDFKKKDIPVLVATDVAARGLDIPSIKTVINYDVARDIDTHTHRIGRTGRAGEKGVAYTLLTPKDSNFAGDLVRNLEGANQHVSKELLDLAMQNAWFRKSRFKGGKGKKLNIGGGGLGYRERPGLGSENMDRGNNNVMSNYEAYKPSTGAMGDRLTAMKAAFQSQYKSHFVAASLSNQKAGSSAAGASGWTSAGSLNSVPTNSAQQGHNSPDSPVTSAAKGIPGFGNTGNISGAPVTYPSAGAQGVNNTASGNNSREGTGGSNGKRERYTENRGSSPSQSRRDWQSA

SEQ ID NO: 4933 - DNA, 3295 bp, Homo sapiens
ccgccgcccgggcccccggcatgcagccccggctgcggaggtgacactcacggaccttagccaccgccgccgccatcgccaccatggacgaacaggaggcattgaactcaatcatgaacgatctggtggccctccagatgaaccgacgtcaccggatgcctggatatgagaccatgaagaacaaagacacaggtcactcaaataggcagagtgacgtcagaatcaagttcgagcacaacggggagaggcgaattatagcgttcagccggcctgtgaaatatgaagatgtggagcacaaggtgacaacagtatttggacaacctcttgatctacattacatgaacaatgagctctccatcctgctgaaaaaccaagatgatcttgataaagcaattgacattttagatagaagctcaagcatgaaaagccttaggatattgctgttgtcccaggacagaaaccataacagttcctctccccactctgaggtgtccagacaggtgcggatcaaggcttcccagtccgcaggggatataaatactatctaccagccccccgagcccagaagcaggcacctctctgtcagctcccagaaccctggccgaagctcacctccccctggctatgttcctgagcggcagcagcacattgcccggcaggggtcctacaccagcatcaacagtgagggggagttcatcccagagaccagcgagcagtgcatgctggatcccctgagcagtgcagaaaattccttgtctggaagctgccaatccttggacaggtcagcagacagcccatccttccggaaatcacgaatgtcccgtgcccagagcttccctgacaacagacaggaatactcagatcgggaaactcagctttatgacaaaggggtcaaaggtggaacctacccccggcgctaccacgtgtctgtgcaccacaaggactacagtgatggcagaagaacatttccccgaatacggcgtcatcaaggcaacttgttcaccctggtgccctccagccgctccctgagcacaaatggcgagaacatgggtctggctgtgcaatacctggacccccgtgggcgcctgcggagtgcggacagcgagaatgccctctctgtgcaggagaggaatgtgccaaccaagtctcccagtgcccccatcaactggcgccggggaaagctcctgggccagggtgccttcggcagggtctatttgtgctatgacgtggacacgggacgtgaacttgcttccaagcaggtccaatttgatccagacagtcctgagacaagcaaggaggtgagtgctctggagtgcgagatccagttgctaaagaacttgcagcatgagcgcatcgtgcagtactatggctgtctgcgggaccgcgctgagaagaccctgaccatcttcatggagtacatgccagggggctcggtgaaagaccagttgaaggcttacggtgctctgacagagagcgtgacccgaaagtacacgcggcagatcctggagggcatgtcctacctgcacagcaacatgattgttcaccgggacattaagggagccaacatcctccgagactctgctgggaatgtaaagctgggggactttggggccagcaaacgcctgcagacgatctgtatgtcggggacgggcatgcgctccgtcactggcacaccctactggatgagccctgaggtgatcagcggcgagggctatggaaggaaagcagacgtgtggagcctgggctgcactgtggtggagatgctgacagagaaaccaccgtgggcagagtatgaagctatggccgccatcttcaagattgccacccagcccaccaatcctcagctgccctcccacatctctgaacatggccgggacttcctgaggcgcatttttgtggaggctcgccagagaccttcagctgaggagctgctcacacaccactttgcacagctcatgtactgagctctcacggccacacagctgccggtcgccctttgctgcatggcagggggctgctgctgggctcagtgaagttgctgcttctcccaggcaaggctgtggaccatggagtggcagcccagccagcgtcggtctgtgccccttccgccactggggctcagagccggggtggggtggctgcagcctcaggactgggagcccccagcctgtcagatccaggagctccagtgtcctgagctcagcgtggaggggtaggggctgggaacagtgtgcaaggcagccgtgggccccaccctcggggatgtgtcctgacactgcaattggcaccgaagcccagagggtctgggggcacaagactgacgccagggtatgaagagtgttattttcattcaaagtgttattttgtttttccttccaatgtctggagaccaccagggcatctctgggctggatgagctcccacaagcctgagggaaaggccagcactcgctagcagtggcaggcagaggcccaggctgccgtcccctagagtcccaggttggctctgccagtcctgtcctttaccaaagatgaatgaagcaaatgtcatgctgccttattcagggaaggaggagcctgtcctgcctgtggccatgaccctgcctctcccaggcaggggcccgcgatgtggaactgctgccactgaggggggatccagttttgtcaatgcagttgtctctgttttacaagttggagtcactcttatgctgtacccagtttctaaactggagactgtgtgtgccctctgggctctgagtacccctgctttgggcttgggcctaggctgcattgaaaagagctgaaggttgtggcctttgcgctcctggcccagcctttgttccccactggagcagaaggggagatggacgacacggtgggggcatctggcctggccagtgccctgatcccagagagcccgaggaggtgtctcaggctgcctgagtcgtgacctgctaggccagagcccactccatctggtagaagggaaagcccatatgctaccaccagctgtgtccaaaaccgccagctctgttcttcctcagccagcctcgcccatccccttgaggtctcagcccctttcccttgtagctcctcccctggagggggaatggcagcaggggttggggaaacagcatctccaagcagcttagagttggccatatttacctcagcctgggcgctggtcctttcttccggcccctcccctccaaaatgtgcctattgctagagctcctccctctcaacacccagtttccttgggagttgtcattaaaggaaaaaaaaaaaaaaaaaaa

SEQ ID NO: 4934 - protein, 626 aa, Homo sapiens
MDEQEALNSIMNDLVALQMNRRHRMPGYETMKNKDTGHSNRQSDVRIKFEHNGERRIIAFSRPVKYEDVEHKVTTVFGQPLDLHYMNNELSILLKNQDDLDKAIDILDRSSSMKSLRILLLSQDRNHNSSSPHSEVSRQVRIKASQSAGDINTIYQPPEPRSRHLSVSSQNPGRSSPPPGYVPERQQHIARQGSYTSINSEGEFIPETSEQCMLDPLSSAENSLSGSCQSLDRSADSPSFRKSRMSRAQSFPDNRQEYSDRETQLYDKGVKGGTYPRRYHVSVHHKDYSDGRRTFPRIRRHQGNLFTLVPSSRSLSTNGENMGLAVQYLDPRGRLRSADSENALSVQERNVPTKSPSAPINWRRGKLLGQGAFGRVYLCYDVDTGRELASKQVQFDPDSPETSKEVSALECEIQLLKNLQHERIVQYYGCLRDRAEKTLTIFMEYMPGGSVKDQLKAYGALTESVTRKYTRQILEGMSYLHSNMIVHRDIKGANILRDSAGNVKLGDFGASKRLQTICMSGTGMRSVTGTPYWMSPEVISGEGYGRKADVWSLGCTVVEMLTEKPPWAEYEAMAAIFKIATQPTNPQLPSHISEHGRDFLRRIFVEARQRPSAEELLTHHFAQLMY

SEQ ID NO: 4935 - DNA, 978 bp, Homo sapiens
agaaggaggccccaaccctgagcacaacagcaacctggccaatatcttagaggtgtgtcgcagcaaacatatgcccaagtcaacgattgagacagcactgaaaatggagaaatccaaggacacttatttgctgtatgagggtcgaggccctggtggctcttctctgctcatcgaggcattatctaacagtagccacaagtgccaagcagacattagacatatcctgaataagaatggaggagtgatggctgtaggagctcgtcactcttttgacaaaaagggggtgattgtggttgaagtggaggacagagagaagaaggctgtgaacctagagcgtgccctggagatggcaatcgaagcaggagctgaggatgtcaaggaaactgaagatgaagaagaaaggaacgtttttaaatttatttgtgatgcctcttcactgcaccaagtgaggaagaagctggactccctgggcctgtgttctgtgtcctgtgcactagagttcatccccaactcaaaggtgcagctggctgagcccgacctggaacaggccgcacatctcattcaggctctcagcaaccacgaggatgtgattcacgtctatgataacattgaataaccaggctacatgtgcccccgggttccttcctagaaatgtggcagcccattccagcacacaggcttctgcagcaatctctgagggtaaagccggtgggaggctcagcaggccaggaggcccaaggacaggacttgcgaccttgaagccaaaggaatctcacttgtggggcctccttgtcagctctgctgctgtctcagagccatctggatgagtgtcccgacaccctctcggatgcagggcaggaccacccagctggtcagactctgatgttgggtagctggcctctgtggggattgtaagtgccctgaggcgctctgtactagaaactgctcttaataataacggtgattattggttgctgc

SEQ ID NO: 4936 - DNA, 5641 bp, Homo sapiens
cggaggaggacgcgagccccttgcgggcggtcatcacagcccagcctcggggctgccacagcgcgttgcgcctgtgcgccctcggtccccgcgtccactgagcgccgcgctcggggatggggcccggccggccggcccccgcgccctggcctcgtcacctgctgcgctgcgtcctgctcctcgggtgcctgcacctcggccgtcccggcgcccctggggacgccgccctcccggaacccaacgtcttcctcatcttcagccatggactgcagggctgcctggaggcccagggcgggcaggtcagagtcaccccggcttgcaataccagcctccctgcccagcgctggaagtgggtctcccgaaaccggctattcaacctgggtaccatgcagtgcctgggcacaggctggccaggcaccaacaccacggcctccctgggcatgtatgagtgtgaccgggaagcactgaatcttcgctggcattgtcgtacactgggtgaccagctgtccttgctcctgggggcccgcaccagcaacatatccaagcctggcacccttgagcgtggtgaccagacccgcagtggccagtggcgcatctacggcagcgaggaggacctatgtgctctgccctaccacgaggtctacaccatccagggaaactcccacggaaagccgtgcaccatccccttcaaatatgacaaccagtggttccacggctgcaccagcacgggccgcgaggatggtcacctgtggtgtgccaccacccaggactacggcaaagacgagcgctggggcttctgccccatcaagagtaacgactgcgagaccttctgggacaaggaccagctgactgacagctgctaccagtttaacttccagtccacgctgtcgtggagggaggcctgggccagctgcgagcagcagggtgcggatctgctgagcatcacggagatccacgagcagacctacatcaacggcctcctcactgggtacagctccaccctgtggatcggcttgaatgacttggacacgagcggaggctggcagtggtcggacaactcgcccctcaagtacctcaactgggagagtgaccagccggacaaccccagtgaggagaactgtggagtgatccgcactgagtcctcgggcggctggcagaaccgtgactgcagcatcgcgctgccctatgtgtgcaagaagaagcccaacgccacggccgagcccacccctccagacaggtgggccaatgtgaaggtggagtgcgagccgagctggcagcccttccagggccactgctaccgcctgcaggccgagaagcgcagctggcaggagtccaagaaggcatgtctacggggcggtggcgacctggtcagcatccacagcatggcggagctggaattcatcaccaagcagatcaagcaagaggtggaggagctgtggatcggcctcaacgatttgaaactgcagatgaattttgagtggtctgacgggagccttgtgagcttcacccactggcacccctttgagcccaacaacttccgggacagtctggaggactgtgtcaccatctggggcccggaaggccgctggaacgacagtccctgtaaccagtccttgccatccatctgcaagaaggcaggccagctgagccagggggccgccgaggaggaccatggctgccggaagggttggacgtggcacagcccatcctgctactggctgggagaagaccaagtgacctacagtgaggcccggcgcctgtgcactgaccatggctctcagctggtcaccatcaccaacaggttcgagcaggccttcgtcagcagcctcatctacaactgggagggcgagtacttctggacggccctgcaggacctcaacagcaccggctccttcttctggctcagtggggatgaagtcatgtacacccactggaaccgggaccagcccgggtacagccgtgggggctgcgtggcgctggccactggcagcgccatggggctgtgggaggtgaagaactgtacctcgttccgggcccgctacatctgccggcagagcctgggcactccagtgacgccggagctgccggggccagatcccacgcccagcctcactggctcctgtccccagggctgggcctcggacaccaaactccggtattgctataaggtgttcagctcagagcggctgcaggacaagaagagctgggtccaggcccagggggcctgccaggagctgggggcccagctgctgagcctggccagctacgaggaggagcactttgtggccaacatgctcaacaagatcttcggtgaatcagaacccgagatccacgagcagcactggttctggatcggcctgaaccgtcgggatcccagagggggtcagagttggcgctggagcgacggcgtagggttctcttaccacaatttcgaccggagccggcacgacgacgacgacatccgaggctgtgcggtgctggacctggcctccctgcagtgggtggccatgcagtgcgacacacagctggactggatctgcaagatccccagaggtacggacgtgcgggagcccgacgacagccctcaaggccgacgggaatggctgcgcttccaggaggccgagtacaagttctttgagcaccactccacgtgggcgcaggcgcagcgcatctgcacgtggttccaggccgagctgacctccgtgcacagccaggcagagctagacttcctgagccacaacttgcagaagttctcccgggcccaggagcagcactggtggatcggcctgcacacctctgagagcgatgggcgcttcagatggacagatggttccattataaacttcatctcctgggcaccaggcaaacctcggcctgtcggcaaggacaagaagtgcgtgtacatgacagccagccgagaggactggggggaccagaggtgcctgacagccttgccctacatctgcaagcgcagcaacgtcaccaaagaaacgcagcccccagacctgccaactacagccctggggggctgcccctctgactggatccagttcctcaacaagtgttttcaggtccagggccaggaaccccagagccgggtgaagtggtcagaggcacagttctcctgtgaacagcaagaggcccagctggtcaccatcacaaaccccttagagcaagcattcatcacagccagcctgcccaatgtgacctttgacctttggattggcctccatgcctcgcagagggacttccagtgggtggagcaggagcctttgatgtatgccaactgggcacctggggagccctctggccctagccctgctcccagtggcaacaaaccgaccagctgtgcggtggtcctgcacagcccctcagcccacttcactggccgctgggacgatcggagctgcacggaggagacccatggcttcatctgccagaagggcacggacccctccctgagcccgtccccagcagcgctgccccccgccccgggcactgagctctcctacctcaacggcaccttccggctgcttcagaagccgctgcgctggcacgatgccctcctgctgtgtgagagccacaatgccagcctggcctacgtgcccgacccctacacccaggccttcctcacgcaggctgcccgagggctgcgcacgccgctctggattgggctggctggcgaggagggctctcggcggtactcctgggtctcagaggagccgctgaactacgtgggctggcaggacggggagccgcagcagccggggggctgtacctacgtagatgtggacggggcctggcgcaccaccagctgtgacaccaagctgcagggggctgtgtgtggggttagcagtgggccccctcctccccgaagaataagctaccatggcagctgtccccagggactggcagactccgcgtggattcccttccgggagcactgctattctttccacatggagctgctgctgggccacaaggaggcgcgacagcgctgccagagagcgggtggggccgtcctgtctatcctggatgagatggagaatgtgtttgtctgggagcacctgcagagctatgagggccagagtcggggcgcctggctgggcatgaacttcaaccccaaaggaggcactctggtctggcaggacaacacagctgtgaactactccaactgggggcccccgggcttgggccccagcatgctgagccacaacagctgctactggattcagagcaacagcgggctatggcgccccggcgcttgcaccaacatcaccatgggtgtcgtctgcaagcttcctcgtgctgagcagagcagcttctccccatcagcgcttccagagaacccagcggccctggtggtggtgctgatggcggtgctgctgctcctggccttgctgaccgcagccctcatcctttaccggaggcgccagagcatcgagcgcggggcctttgagggtgcccgctacagccgcagcagctccagccccaccgaggccactgagaagaacatcctggtgtcagacatggaaatgaatgagcaacaagaatagagccaggcgcgtgggcagggccagggcgggaggagctggggagctggggccctgggtcagtctggccccccaccagctgcctgtccagttggcctatggaagggtgcccttgggagtcgctgttgggagccggagctgggcagagcctgggctggtggggtgccaccctcccacaagggctgggctgagacccagctgagtgcagcgtggcgtttccctttctgggggggcctgaggtcttgtcacctggtcctgtgcccccacaggaaccagaggtaggatgggagggggaacgagagcctctttctccccagagcccccggcccaggcctgttgatccgcgccccaggacccccttctttgcagagcccgaggagcctcccctgtcccctcgggcagatctgttgtgtctctcttcccacctggcagcctcagctctgtgcccctcaccctgctccctctcgccccttctctcccaccccttccttctgagccgggccctggggattggggagccctcttgttcctgatgagggtcagctgagggggctgagcatccatcactcctgtgcctgctggggtggctgtggggcgtggcaggaggggcctaggtgggttgggcctgagaaccagggcacgggtgtggtgtctgctgggctggagataagactggggagagacaccccaacctcccagggtgggagctgggccgggctgggatgtcatctcctgccgggcgggggagggctctgcccctggaagagtcccctgtggggaccaaaataagttccctaacatctccagctcctggctctggtttggagcaaggggaagggttgccagagtcctgggggccccagaggagcaggagtctgggagggcccagagttcaccctctagtggatccaggaggagcagcacccgagccctggagtggcccagtacccttccaagaggccacagtcccagccaggacaaagtatgcggcccatcctggtgcgacagcgtgggacaatgtgaacatggactcgaagacatggccctttctctgtagttgattttttaaatgtgccattattgttttt

SEQ ID NO: 4937 - protein, 1479 aa, Homo sapiens
MGPGRPAPAPWPRHLLRCVLLLGCLHLGRPGAPGDAALPEPNVFLIFSHGLQGCLEAQGGQVRVTPACNTSLPAQRWKWVSRNRLFNLGTMQCLGTGWPGTNTTASLGMYECDREALNLRWHCRTLGDQLSLLLGARTSNISKPGTLERGDQTRSGQWRIYGSEEDLCALPYHEVYTIQGNSHGKPCTIPFKYDNQWFHGCTSTGREDGHLWCATTQDYGKDERWGFCPIKSNDCETFWDKDQLTDSCYQFNFQSTLSWREAWASCEQQGADLLSITEIHEQTYINGLLTGYSSTLWIGLNDLDTSGGWQWSDNSPLKYLNWESDQPDNPSEENCGVIRTESSGGWQNRDCSIALPYVCKKKPNATAEPTPPDRWANVKVECEPSWQPFQGHCYRLQAEKRSWQESKKACLRGGGDLVSIHSMAELEFITKQIKQEVEELWIGLNDLKLQMNFEWSDGSLVSFTHWHPFEPNNFRDSLEDCVTIWGPEGRWNDSPCNQSLPSICKKAGQLSQGAAEEDHGCRKGWTWHSPSCYWLGEDQVTYSEARRLCTDHGSQLVTITNRFEQAFVSSLIYNWEGEYFWTALQDLNSTGSFFWLSGDEVMYTHWNRDQPGYSRGGCVALATGSAMGLWEVKNCTSFRARYICRQSLGTPVTPELPGPDPTPSLTGSCPQGWASDTKLRYCYKVFSSERLQDKKSWVQAQGACQELGAQLLSLASYEEEHFVANMLNKIFGESEPEIHEQHWFWIGLNRRDPRGGQSWRWSDGVGFSYHNFDRSRHDDDDIRGCAVLDLASLQWVAMQCDTQLDWICKIPRGTDVREPDDSPQGRREWLRFQEAEYKFFEHHSTWAQAQRICTWFQAELTSVHSQAELDFLSHNLQKFSRAQEQHWWIGLHTSESDGRFRWTDGSIINFISWAPGKPRPVGKDKKCVYMTASREDWGDQRCLTALPYICKRSNVTKETQPPDLPTTALGGCPSDWIQFLNKCFQVQGQEPQSRVKWSEAQFSCEQQEAQLVTITNPLEQAFITASLPNVTFDLWIGLHASQRDFQWVEQEPLMYANWAPGEPSGPSPAPSGNKPTSCAVVLHSPSAHFTGRWDDRSCTEETHGFICQKGTDPSLSPSPAALPPAPGTELSYLNGTFRLLQKPLRWHDALLLCESHNASLAYVPDPYTQAFLTQAARGLRTPLWIGLAGEEGSRRYSWVSEEPLNYVGWQDGEPQQPGGCTYVDVDGAWRTTSCDTKLQGAVCGVSSGPPPPRRISYHGSCPQGLADSAWIPFREHCYSFHMELLLGHKEARQRCQRAGGAVLSILDEMENVFVWEHLQSYEGQSRGAWLGMNFNPKGGTLVWQDNTAVNYSNWGPPGLGPSMLSHNSCYWIQSNSGLWRPGACTNITMGVVCKLPRAEQSSFSPSALPENPAALVVVLMAVLLLLALLTAALILYRRRQSIERGAFEGARYSRSSSSPTEATEKNILVSDMEMNEQQE

SEQ ID NO: 4938 - DNA, 2417 bp, Homo sapiens
ggagccgcgccgcatctcaggcgcagtctctaggggctgtgcgcatccgtgggggggacatgcgcatctcaggggggctgctcgcatctgggggtgctgtgtgcatctcgggggggctgtgcccatctagcggggtggctgtgcgcatctggagggggctgtgcgcaacccggggggggtgttgcgcgcatctagcaggggcggctgtgcgcatttcggggggggctgtgcatatctggggggaccgtgcttatctccgggggcggctgtgcgcatcttgaggggtgtgtacatctcggggggcctgtgcgcatcttggggggctgtgtgcatccgcgggggctgtgcgcatctcggggtgctgtgcgctgctcctctgagctctgctctttcttgcagcgtttgcctcagcatggagggcggggccgcggcagccacccccacagcactgccttactacgtggccttctcccagctgctgggcctgaccttggtggccatgaccggcgcgtggctcgggctgtaccgaggcggcattgcctgggagagcgacctgcagttcaacgcgcaccccctctgcatggtcataggcctgatcttcctgcagggaaatgccctgctggtttaccgtgtcttcaggaacgaagctaaacgcaccaccaaggtcctgcacgggctgctgcacatctttgcgctcgtcatcgccctggttggcttggtggcggtgttcgactaccacaggaagaagggctacgctgacctgtacagcctacacagctggtgcgggatccttgtctttgtcctgtactttgtgcagtggctggtgggcttcagcttcttcctgttccccggagcttcattctccctgcggagccgctaccgcccacagcacatcttctttggtgctaccatcttcctcctttccgtgggcaccgccctgctgggcctgaaggaggcactgctgttcaacctcgggggcaagtatagcgcatttgagcccgagggtgtcctggccaacgtgctgggcctgctgctggcctgcttcggtggggcggtgctctacatcttgacccgggccgactggaagcggccttcccaggcggaagagcaggccctctccatggacttcaagacgctgacggagggagatagccccggctcccagtgatgcgcccggccggccctgggggttcgcggggtgtcttcttgcctgcccctgctgaggcgtcttcaggactgcaggctccggagagtggctctggcagcaggcgggcgcgtgggtgcagctgcatctgtttgagtgctgctttctggggtcaggtctccgcctcctctgcttctcctttctccgctgctatagaccagttcattgtgtgtggctcccgtgtctctgttgcccccttcagtgcagaaggctttgggtaggacttcgggtgttcggtcctggtcgcagagcacagatctttaaagaagcgagagaggaggccccaccctcctggcagcagatgcctggggcaaggccaggggaaactgggggggcctcagggacaggcctggaaaggccacgatggctgctgaattcaaacaaggagtccctccagcctgaataacacgtggcacaaatgggcccggcctttggcagaggagcaagtgatatgatgtgtaaagtatgttggtggtgaaagcaaggttccccaggagaggggagggactggcccctgggaagctctgagatgaggctgtggcccagctgtagtcctgaccttcctcttctttaaccctttagccctaggatggctttggtgggagaggggatagaagcccatgacttcagacagactttctcttggcagatgcaggcgggcctcctcccaggctgctccagacatgggggttggggatggggggcaccttgcagccccttcctgctggggctccctccttgtagcaccccccttgcggctcagctctggtttcctctcccaggctcacccaggctctgctcaggctgggaggcagagggcacaaaccttataattttttaaatgaaaaaccgctgctgctggctgtggctagagccccctggggctgctggagctgctgcctctgttctggaggacgagccttctccttatctgctgcccatctttccaggaagtcaggatggagtcagaacaactacagtcatcccccgtggtgtctgcacatcactccagccccataaagagtgtcatgttagctgagtcaccatttggcttcggcctggaaatagtgtgattagaacactgatcgtgtgcgaggccaggagatcaagaccatcctgactaacaaacacagtgaaaccccgtctctactaaaaatacaaaaaaattagccaggcgtggtggtgggcgcctgtagtcccagctacttgggag

SEQ ID NO: 4939 - DNA, 1826 bp, Homo sapiens
agtatgtgtggttggggaattcatgtggaggtcagagtggaagcaggtgtgagagggtccagcagaaggaaacatggctgccaaagtgtttgagtccattggcaagtttggcctggccttagctgttgcaggaggcgtggtgaactctgccttatataatgtggatgctgggcacagagctgtcatctttgaccgattccgtggagtgcaggacattgtggtaggggaagggactcattttctcatcccgtgggtacagaaaccaattatctttgactgccgttctcgaccacgtaatgtgccagtcatcactggtagcaaagatttacagaatgtcaacatcacactgcgcatcctcttccggcctgtcgccagccagcttcctcgcatcttcaccagcatcggagaggactatgatgagcgtgtgctgccgtccatcacaactgagatcctcaagtcagtggtggctcgctttgatgctggagaactaatcacccagagagagctggtctccaggcaggtgagcgacgaccttacagagcgagccgccacctttgggctcatcctggatgacgtgtccttgacacatctgaccttcgggaaggagttcacagaagcggtggaagccaaacaggtggctcagcaggaagcagagagggccagatttgtggtggaaaaggctgagcaacagaaaaaggcggccatcatctctgctgagggcgactccaaggcagctgagctgattgccaactcactggccactgcaggggatggcctgatcgagctgcgcaagctggaagctgcagaggacatcgcgtaccagctctcacgctctcggaacatcacctacctgccagcggggcagtccgtgctcctccagctgccccagtgagggcccaccctgcctgcacctccgcgggctgactgggccacagccccgatgattcttaacacagccttccttctgctcccaccccagaaatcactgtgaaatttcatgattggcttaaagtgaaggaaataaaggtaaaatcacttcagatctctaattagtctatcaaatgaaactctttcattcttctcacatccatctacttttttatccacctccctaccaaaaattgccaagtgcctatgcaaaccagctttaggtcccaattcggggcctgctggagttccggcctgggcaccagcatttggcagcacgcaggcggggcagtatgtgatggactggggagcacaggtgtctgcctagatccacgtgtggcctccgtcctgtcactgatggaaggtttgcggatgagggcatgtgcggctgaactgagaaggcaggcctccgtcttcccagcggttcctgtgcagatgctgctgaagagaggtgccggggaggggcagagaggaagtggtctgtctgttaccataagtctgattctctttaactgtgtgaccagcggaaacaggtgtgtgtgaactgggcacagattgaagaatctgcccctgttgaggtgggtgggcctgactgttgccccccagggtcctaaaacttggatggacttgtatagtgagagaggaggcctggaccgagatgtgagtcctgttgaagacttcctctctaccccccaccttggtccctctcagatacccagtggaattccaacttgaaggattgcatcctgctggggctgaacatgcctgccaaagacgtgtccgacctacgttcctggccccctcgttcagagactgcccttctcacgggctctatgcctgcactgggaaggaaacaaatgtgtataaactgctgtcaataaatgacacccagaccttcc

SEQ ID NO: 4940 - protein, 272 aa, Homo sapiens
MAAKVFESIGKFGLALAVAGGVVNSALYNVDAGHRAVIFDRFRGVQDIVVGEGTHFLIPWVQKPIIFDCRSRPRNVPVITGSKDLQNVNITLRILFRPVASQLPRIFTSIGEDYDERVLPSITTEILKSVVARFDAGELITQRELVSRQVSDDLTERAATFGLILDDVSLTHLTFGKEFTEAVEAKQVAQQEAERARFVVEKAEQQKKAAIISAEGDSKAAELIANSLATAGDGLIELRKLEAAEDIAYQLSRSRNITYLPAGQSVLLQLPQ

SEQ ID NO: 4941 - DNA, 1642 bp, Homo sapiens
agatcgatctaagatggcgaccgtcgaaccggaaaccacccctactcctaatcccccgactacagaaaaggagaaaacggaatctaatcaggaggttgctaacccagaacactatattaaacatcccctacagaacagatgggcactctggttttttaaaaatgataaaagcaaaacttggcaagcaaacttgtggctgatctccaagtttgatactgttgaagacttttgggctctgtacaaccatatccagttgtctagtaatttaatgcctggctgtgactactcactttttaaggatggtattgagcctatgtgggaagatgagaaaaacaaacggggaggacgatggctaattacattgaacaaacagcagagacgaagtgacctcgatcgcttttggctagagacacttctgtgccttattggagaatcttttgatgactacagtgatgatgtatgtggcgctgttgttaatgttagagctaaaggtgataagatagcaatatggactactgaatgtgaaaacagagaagctgttacacatatagggagggtatacaaggaaaggttaggacttcctccaaagatagtgattggttatcagtcccacgcagacacagctactaagagcggctccaccactaaaaataggtttgttgtttaagaagacaccttctgagtattctcataggagactgcgtcaagcaatcgagatttgggagctgaaccaaagcctcttcaaaaagcagagtggactgcatttaaatttgatttccatctaaatgttactcagatataagagaagtctcattcgcctttgtcttgtacttctgtgttcttttttttttttttttttttttttttttggctagagtttacactatcccaatcaaagaattacagtacacatctccagaatccataaatgtgttcctggcccactctgtaatagttcagtagaattaccattaattacatacagattttacctatccacaatagtcagaaaacaacttggcatttctatactttacaggaaaaaaaattctgttgttccattttatgcagaagcatattttgctggtttgaaagattatgatgcatacagttttctagcaattttctttgtttctttttacagcattgtctttgctgtactcttgctgatggctgctagattttaatttatttgtttccctacttgataatattagtgattctgatttcagtttttcatttgttttgcttttgtttttttcctcatgtaacattggtgaaggatccaggaatatgacacaaaggtggaataaacattaattttgtgcattctttggtaattttttttgttttttgtaactacaaagctttgctacaaatttatgcatttcattcaaatcagtgatctatgtttgtgtgatttcctaaacataattgtggattataaaaaatgtaacatcataattacattcctaactagaattagtatgtctgtttttgtatctttatgctgtattttaacactttgtattacttaggttattttgctttggttaaaaatggctcaagtagaaaagcagtcccattcatattaaaacagtgtacaaaactgtaaataaaatgtgtacagtgaattgtcttt

SEQ ID NO: 4942 - DNA, 701 bp, Homo sapiens
agatcgatctaagatggcgaccgtcgaacagatgggcactctggttttttaaaaatgataaaagcaaaacttggcaagcaaacttgtggctgatctccaagtttgatactgttgaagacttttgggctctgtacaaccatatccagttgtctagtaatttaatgcctggctgtgactactcactttttaaggatggtattgagcctatgtgggaagatgagaaaaacaaacggggaggacgatggctaattacattgaacaaacagcagagacgaagtgacctcgatcgcttttggctagagacacttctgtgccttattggagaatcttttgatgactacagtgatgatgtatgtggcgctgttgttaatgttagagctaaaggtgataagatagcaatatggactactgaatgtgaaaacagagaagctgttacacatatagggagggtatacaaggaaaggttaggacttcctccaaagatagtgattggttatcagtcccacgcagacacagctactaagagcggctccaccactaaaaataggtttgttgtttaagaagacaccttctgagtattctcataggagactgcgtcaagcaatcgagatttgggagctgaaccaaagcctcttcaaaaagcagagtggactgcatttaaatttgatttccatctaaatgttactcagatataagagaag

SEQ ID NO: 4943 - DNA, 4037 bp, Homo sapiens
  unsure 88: unknown base
  unsure 114: unknown base
  unsure 116: unknown base
  unsure 134: unknown base
  unsure 146: unknown base
  unsure 214: unknown base
  unsure 295: unknown base
  unsure 299: unknown base
  unsure 308: unknown base
  unsure 316: unknown base
  unsure 325: unknown base
  unsure 361: unknown base
  unsure 365: unknown base
  unsure 370: unknown base
  unsure 417: unknown base
  unsure 571: unknown base
  unsure 2774: unknown base
  unsure 2814: unknown base
  unsure 3554: unknown base
  unsure 3570: unknown base
  unsure 3590: unknown base
  unsure 3591: unknown base
  unsure 3601: unknown base
  unsure 3649: unknown base
  unsure 3714: unknown base
  unsure 3768: unknown base
  unsure 3809: unknown base
  unsure 3813: unknown base
  unsure 3844: unknown base
  unsure 3877: unknown base
  unsure 3881: unknown base
gccgagcaccgcgcaccgcgtcatgggggccgcctcgggccgccgggggccggggctgctgctgccgctgccgctgctgttgctgctngccgccgcagcccgccctggcgttgngnaccccgggctgcagcccngaaacttttctngctgacgaggccggggcgcagctcttcgcgcagagctacaactccagcgccgaacaggtgctgttccnagagcgtggccgccagctgggcgcacgacaccaacatcaccgcggagaatggaggaagcagccctgctcagccaggagttntgcnggaggcctnggggcagnaaggccaanggagctgtatgaaccgatctggcagaacttcacggnaccncgcangctgcgcaggatcatcggagctgtgcgcaccctgggctctgccaacnctgcccctggctaagcggcagcagtacaacgccctgctaagcaacatgagcaggatctactccaccgccaaggtctgcctccccaacaagactgccacctgctggtccctggacccagatctcaccaacatcctggcttcctcgcgaactacgnccatgctcctgtttgcctgggagggctggcacaatgctgcgggcatcccgctgaaaccgctgtacgaggatttcactgccctcagcaatgaagcctacaagcaggacggcttcacagacacgggggcctactggcgctcctggtacaactcccccaccttcgaggacgatctggaacacctctaccaacagctagagcccctctacctgaacctccatgccttcgtccgccgcgcactgcatcgccgatacggagacagatacatcaacctcaggggacccatccctgctcatctgctgggagacatgtgggcccagagctgggaaaacatctacgacatggtggtgcctttcccagacaagcccaacctcgatgtcaccagtactatgctgcagcagggctggaacgccacgcacatgttccgggtggcagaggagttcttcacctccctggagctctcccccatgcctcccgagttctgggaagggtcgatgctggagaagccggccgacgggcgggaagtggtgtgccacgcctcggcttgggacttctacaacaggaaagacttcaggatcaagcagtgcacacgggtcacgatggaccagctctccacagtgcaccatgagatgggccatatacagtactacctgcagtacaaggatctgcccgtctccctgcgtcggggggccaaccccggcttccatgaggccattggggacgtgctggcgctctcggtctccactcctgaacatctgcacaaaatcggcctgctggaccgtgtcaccaatgacacggaaagtgacatcaattacttgctaaaaatggcactggaaaaaattgccttcctgccctttggctacttggtggaccagtggcgctggggggtctttagtgggcgtacccccccttcccgctacaacttcgactggtggtatcttcgaaccaagtatcaggggatctgtcctcctgttacccgaaacgaaacccactttgatgctggagctaagtttcatgttccaaatgtgacaccatacatcaggtactttgtgagttttgtcctgcagttccagttccatgaagccctgtgcaaggaggcaggctatgagggcccactgcaccagtgtgacatctaccggtccaccaaggcaggggccaagctccggaaggtgctgcaggctggctcctccaggccctggcaggaggtgctgaaggacatggtcggcttagatgccctggatgcccagccgctgctcaagtacttccagccagtcacccagtggctgcaggagcagaaccagcagaacggcgaggtcctgggctggcccgagtaccagtggcacccgccgttgcctgacaactacccggagggcatagacctggtgactgatgaggctgaggccagcaagtttgtggaggaatatgaccggacatcccaggtggtgtggaacgagtatgccgaggccaactggaactacaacaccaacatcaccacagagaccagcaagattctgctgcagaagaacatgcaaatagccaaccacaccctgaagtacggcacccaggccaggaagtttgatgtgaaccagttgcagaacaccactatcaagcggatcataaagaaggttcaggacctagaacgggcagcactgcctgcccaggagctggaggagtacaacaagatcctgttggatatggaaaccacctacagcgtggccactgtgtgccacccgaatggcagctgcctgcagctcgagccagatctgacgaatgtgatggccacgtcccggaaatatgaagacctgttatgggcatgggagggctggcgagacaaggcggggagagccatcctccagttttacccgaaatacgtggaactcatcaaccaggctgcccggctcaatggctatgtagatgcaggggactcgtggaggtctatgtacgagacaccatccctggagcaagacctggagcggctcttccaggagctgcagccactctacctcaacctgcatgcctacgtgcgccgggccctgcaccgtcactacggggcccagcacatcaacctggaggggcccattcctgctcacctgctggggaacatgtgggcgcagacctggtccaacatctatgacttggtggtgcccttcccttcagccccctcgatggacaccacagaggctatgctaaagcagggctggacgcnccaggaggatgtttaaggaggctgatgatttcttcacctnccctggggctgctgcccgtgcctcctgagttctggaacaagtcgatgctggagaagccaaccgacgggcgggaggtggtctgccacgcctcggcctgggacttctacaacggcaaggacttccggatcaagcagtgcaccaccgtgaacttggaggacctggtagtggcccaccacgaaatgggccacatccagtatttcatgcagtacaaagacttacctgtggccttgagggagggtgccaaccccggcttccatgaggccattggggacgtgctagccctctcagtgtctacgcccaagcacctgcacagtctcaacctgctgagcagtgagggtggcagcgacgagcatgacatcaactttctgatgaagatggcccttgacaagatcgcctttatccccttcagctacctcgtcgatcagtggcgctggagggtatttgatggaagcatcaccaaggagaactataaccaggagtggtggagcctcaggctgaagtaccagggcctctgccccccagtgcccaggactcaaggtgactttgacccaggggccaagttccacattccttctagcgtgccttacatcaggtactttgtcagcttcatcatccagttccagttccacgaggcactgtgccaggcagctggccacacgggccccctgcacaagtgtgacatctaccagtccaaggaggccgggcagcgcctggcgaccgccatgaagctgggcttcagntaggccgtggccgganagccatgcagctgatcacgnnggccagcccnaacatgagcgcctcggccatgttgagctacttcaagccgctgctgganctggctccgcacggagaacgagctgcatggggagaagctgggctggccgcagtacaactggacgnccgaactccgctcgctcagaagggcccctcccagacagcggccgcgtcagcttncctgggcctggacctggatgcgcaggaggcccgcgtgggcncagntggctgctgctcttcctgggcatcgccctgnctggtagccaccctgggcctcagccagcggctncttncagcatccgccaccgcagcctccaccggcactcccacgggccccagttcggctccgaggtggagctgagacactcctgaggtgacccggctgggtcggccctgcccaagggcctcccaccagagactgggatgggaacactggtgggcagctgagg

SEQ ID NO: 4944 - DNA, 1144 bp, Homo sapiens
tgacccaggactctttgtttattgctgtgatttttcttccacagctatagaactggtccagacaaattcagaatatgatccttctcggtgttttgcctttgttcacgacctgtgtgatgaagagaagagttacccagtgcccaagggcagtcttgatattatcattctcatatttgttctttcagcaattgttccagacaagatgcagaaggctatcaacaggctgagcaggcttctgaaacctggcgggatgatgcttctgcgagattacggccgctatgacatggctcagcttcggtttaaaaaaggtcagtgtctatctggaaatttctacgtgagaggtgatggaaccagagtttacttcttcacacaagaggaactggacacgcttttcaccactgctggactggaaaaagttcagaacctggtggatcgccgactgcaggtgaaccgaggaaagcaactgacaatgtaccgggtttggattcagtgcaaatactgcaagccccttctgtccagcaccagctgagaggcacctgctgccaacacgatgcaagcccattgtgtttccgggcttttttaaaaaaaaaattgtagcactgggcgtggtgcatgcctgtaatcccagccactcaggaggctgaggcggggaggatccattgagcccagcagtccaacctgggcaaaatagtgagagaccctgtatctgaaagtaataataaaaataaaaaatataaatgaggtctcgttgatgttggacaattcaagaattcagacttgaaccttaaacctaggaaaagttactttgtatcaggattctaacaattatgcttcatatttgtgaagtcctttaaaacataattttctcaagttctttctttgagatctcaatctgtcttagcattttgtaactaataactgaaattttattcaaaggaattgtaaaccttaaaccaccaatttatttccatgtgaaaaagtgttacatatgacaagtgttttttgactgtaattgcgttaaatcttttgagaatgtaaatgccgggctaggcaattgcagttaatacatacagaggttagtgaagggcttattaagttgtaggggaagcaagctgggaagaatcagatcagatattttcctgac

SEQ ID NO: 4945 - DNA, 1159 bp, Homo sapiens
aggttcagcttgttggtttagatgaggagagttcagagtttatttgcagaaacacctttgaccacccataccccaccacaaagctcatgtggatccctgacacaaaaggcgtctatccagacctactggcaacaagcggtgactatctccgtgtgtggagggttggtgaaacagagaccaggctggagtgtttgctaaacaataataagaactctgatttctgtgctcccctgacctcctttgactggaatgaggtggatccttatcttttaggtacctcaagcattgatacgacatgcaccatctgggggctggagacagggcaggtgttagggcgagtgaatctcgtgtctggccacgtgaagacccagctgatcgcccatgacaaagaggtctatgatattgcatttagccgggccgggggtggcagggacatgtttgcctctgtgggtgctgatggctcggtgcggatgtttgacctccgccatctagaacacagcaccatcatttacgaagacccacagcatcacccactgcttcgcctctgctggaacaagcaggaccctaactacctggccaccatggccatggatggaatggaggtggtgattctagatgtccgggttccctgcacacctgtcgccaggttaaacaaccatcgagcatgtgtcaatggcattgcttgggccccacattcatcctgccacatctgcactgcagcggatgaccaccaggctctcatctgggacatccagcaaatgccccgagccattgaggaccctatcctggcctacacagctgaaggagagatcaacaatgtgcagtgggcatcaactcagcccgactggatcgccatctgctacaacaactgcctggagatactcagagtgtagtgttggtggcgctgtgcccacgaggcaggggcttttgtatttcctgcctctgccccacccccaaagtaagaagaaacatgtttccagtggccagtatgtctttcattgctttgcacccactgttaccagaagctgctctaggagttcctggccagtcaccccatcgccctctgtggcagactcagtgctgtgtggcgcctcctcagcccagggctgagttttaagattttctctcctttcctcttctcctttggttcctcaattaa

SEQ ID NO: 4946 - DNA, 864 bp, Homo sapiens
atgagtggctccttcgatcgcaagctcagcagcatcctcaccgacatctccagctcccttagctgccatgcgggctccaaggactcgcctaccctgcccgagtcttctgtcactgacctgggctactacagcgctccccagcacgattactactcgggccagccctatggccagacggtgaacccctacacctaccaccaccaattcaatctcaatgggcttgcaggcacgggcgcttactcgcccaagtcggaatatacctacggagcctcctaccggcaatacggggcgtatcgggagcagccgctgccagcccaggacccagtgtcggtgaaggaggagccggaagcagaggtgcgcatggtgaatgggaagcccaagaaggtccgaaagccgcgtacaatctactccagctaccagctggccgccctgcagcgccgcttccagaaggcccagtacctggcgctgcccgagcgcgccgagctggccgcgcagctgggcctcacgcagacacaggtgaaaatctggttccagaaccgccgttccaagttcaagaaactctacaagaacggggaggtgccgctggagcacagtcccaataacagtgattccatggcctgcaactcaccaccatcacccgccctctgggacacctcttcccactccactccggcccctgcccgcagtcagctgcccccgccgctcccatacagtgcctcccccagctacctggacgaccccaccaactcctggtatcacgcacagaacctgagtggaccccacttacagcagcagccgcctcagccagccaccctgcaccatgcctctcccgggcccccgcccaaccctggggctgtgtactga

SEQ ID NO: 4947 - protein, 287 aa, Homo sapiens
MSGSFDRKLSSILTDISSSLSCHAGSKDSPTLPESSVTDLGYYSAPQHDYYSGQPYGQTVNPYTYHHQFNLNGLAGTGAYSPKSEYTYGASYRQYGAYREQPLPAQDPVSVKEEPEAEVRMVNGKPKKVRKPRTIYSSYQLAALQRRFQKAQYLALPERAELAAQLGLTQTQVKIWFQNRRSKFKKLYKNGEVPLEHSPNNSDSMACNSPPSPALWDTSSHSTPAPARSQLPPPLPYSASPSYLDDPTNSWYHAQNLSGPHLQQQPPQPATLHHASPGPPPNPGAVY

SEQ ID NO: 4948 - DNA, 523 bp, Homo sapiens
cccgtcaccaagctgggccgcttggtcaaggaaatgaagatcaaatccctggaggagatctatcccttctccctgcccattaaggtatctgagatcattgactttttcctgggggcctctcttaaggacgaggttttgaagattatgtcggtgcagaagcagacccgctgcggctctgtgctggtgcgcctcatccctgcacccaggggcactggcattgtctccgcacctgtgcccaagaagctgctcatgatagctggtatcgatgactgctacacctcagcccggggctgcactgccaccctgggcaacttcgccaaggccacctttgacgccatctctaagacctacagctacctgacccccgacctctggaaggagactgtatttaccaagtctccctgtcaggaattcactgaccacctcgtcaagacccacaccagagtcttcgtgcagcagacccaggctccagctgtggctacaacatagggtttttatacaagaaaaataaagtgaattaagc

SEQ ID NO: 4949 - protein, 151 aa, Homo sapiens
MKIKSLEEIYPFSLPIKVSEIIDFFLGASLKDEVLKIMSVQKQTRCGSVLVRLIPAPRGTGIVSAPVPKKLLMIAGIDDCYTSARGCTATLGNFAKATFDAISKTYSYLTPDLWKETVFTKSPCQEFTDHLVKTHTRVFVQQTQAPAVATT

SEQ ID NO: 4950 - DNA, 557 bp, Homo sapiens
agacccttttcacaagatggcgccgaaagcgaagaaggaagctcctgcccctcctaaagccgaagccaaagcgaaggctttaaaggccaagaaggcagtgttgaaaggtgtccacagccacaaaaagaagaagatccgcacgtcacccaccttccggcagccgaagacactgcgactctggagacagcccaaatatcctcggaagagcgctcccaggagaaacaagcttgaccactatgctatcatcaagtttccgctgaccactgagtctgccatgaagaagacagaagacaacaacacacttgtgttccttgtggatgttaaagccaacaagcaccagattaaacaggctgtgaagaagctctatgacattgatgtggccaaggtcaacaccctgatttggcctgatggagagaagaaggcatatgttcgactggctcctggttacgatgctttggatgttgccaacaaaattgggatcatctaaactgagtccagctgcctaattctgaatatatatatatatatatatatatatatatatatcttttcaccat

SEQ ID NO: 4951 - DNA, 2734 bp, Homo sapiens
gcaaccgcagcccagccccagtccgggaggaagttctgccgggcgctctccgccggtgcctcactggttatagtgctatacaggaaacctggcagcgccggagccgcgcggtcgaggagggagcgcgggacgccgagcccacgcgcgcctgccgggacaagtggagacgaggccggcgagcggacgccccgaggtttggcgaaggagctgtggccgggtccccttcttatccagcccgagacactgcgctccggtgggcgtccctgcgctgggaatccctctcggagtttttccaggcccggccgggttgctccgggaaaggccctgttgggggaggtgggcccggagctggcaggtctacaatccggttggaagggctcgcagtgggtgattcagggtgccaatgacctccccgcgaacgggaacgcccgcactagacaaccagccccagaccggcattcccagagccgcaggcgggagggacgcagggactccgggacagcaaatccccgggggagaagggaagggggaaggcgggacaggggaggcccaccctccttgggctccgctagcgaccagccagcgccccttcagacgcagccttcctggctccggaccccggctttctgctccggtcctcgtcccaatgccccccaaggtccccagcagaggcattcaggttcctcctcgccccgcccagacgcagcttctttgggtatgggtgacagcactcctgagcgtcgctgtccctattcgctgccgttgccagctccgattccgcgaaacctctccggcaccacctcggaagccccgcccagggcgatggtccgggcctaacctgccggccccgcccacccggcccttgggctccctgaggcccgcccagcagacaccggagagcaatggtgtgatctccgcacactgcaacctctgcctccagggttcaagtggttctcctgcctcagcctcccaagcagatgggactacaggtactggtagttaactctcaaggagaaatttcacggttgagcaccgaaaagaaagtggtcatgaaaggaagtatcaacaattatcttaaattgggtcaagaagggaagtatcgcgtctaccacaatcaatactccactaattcatttgctttgaataagcaccagcacagagaagaccatgataagagaaggcatcttgcacataagttctgtctgactccagcaggagagttcaaatggaacggttctgtccatgggtccaaagttcttaccatatctactctgagactgactatcacccaattagaaaacaacatcccttcatcctttcttcatcccaaccgggcatcacatagggcaaactggatcaaggcagttcagatgtgtagcaaactcagagaatttgcattggctttagccattttggagtgtgcagttaaaccagttgtgatgctaccaatatggcgagaatctttaggacataccagctttctccctttgtctcataaccatgtccaccaatgagaatgctaatacacaagctgcccatcttcacagatctaagaacaagggaaaggacagtacagaaacgaggcgtcacagaatagaggtcaatgtggagctgaggaaagctaagaaggatgaccagatgctgaagaggagaaatgtaagctcatttcctgatgatgctacttctccgctgcaggaaaactgcaacaaccaggactcctgccctaagagccatagggaatatcgtcactggtacagatgaacagactcaggttgtgattgatgcaggagcactcgccgtctttcccagcctgctcaccaaccccaaaactaacattcagaaggaagctacgtggacaatgtcaaacatcacagccagccgccaggaccagatacagcaagttgtgaatcatggattagtcccattccttgtcagcgatctctctaagattttgagacacaaaaggaagctgtatgggccgtggaacagttgaacagattgtgtaccttgttcactgtggcataatagaaccgttgatgaacctcttacctgcaaaagataccaagattattctggttatcctggatgccatttcaaatatctttcaggctgctgagaaactaggtgaaactgagaaacttagtataatgattgaagaatgtggaggcgtagacaaaattgaagctctacaaaaccatgaaaatgagtctgtatataaggcttcattaagcttaactgagaagtatttctctgtagagctgccagagcagagctgagccacccattgctggagaggacatccacgcaggcctggacgagccggactgccttactaaggatttcctccgtatctgactgcaactcagcactcagctgcatgcgggacaggaagaggaagatcaaaacgttgtgccagaaactacctctgaaggctacactttccaagttcaggatggggctcctgggacctttaacttttagatcatgtagctgaggcataaatttgttgtgtactatgtttggtattttgtcttattgtttctctactaagaactctttcttaaatgtggtttgttattgtagcactttttacactgaaactatacttgaacagttccaactgtacatactgtatgaagcttgtcctctgactaggtttctaatttctatgtggaatttcctatcttgcagcatcctgtaaataaacattcaagtccacccttttcttgacttc

SEQ ID NO: 4952 - protein, 199 aa, Homo sapiens
MTSPRTGTPALDNQPQTGIPRAAGGRDAGTPGQQIPGGEGKGEGGTGEAHPPWAPLATSQRPFRRSLPGSGPRLSAPVLVPMPPKVPSRGIQVPPRPAQTQLLWVWVTALLSVAVPIRCRCQLRFRETSPAPPRKPRPGRWSGPNLPAPPTRPLGSLRPAQQTPESNGVISAHCNLCLQGSSGSPASASQADGTTGTGS

SEQ ID NO: 4953 - DNA, 1109 bp, Homo sapiens
gccagtgaattcgggggctcagccctcctccctcccttccccctgcttcaggctgctgagcactgagcagcgctcagaatggaagccatcgccaaatatgacttcaaagctactgcagacgacgagctgagcttcaaaaggggggacatcctcaaggttttgaacgaagaatgtgatcagaactggtacaaggcagagcttaatggaaaagacggcttcattcccaagaactacatagaaatgaaaccacatccgtggttttttggcaaaatccccagagccaaggcagaagaaatgcttagcaaacagcggcacgatggggcctttcttatccgagagagtgagagcgctcctggggacttctccctctctgtcaagtttggaaacgatgtgcagcacttcaaggtgctccgagatggagccgggaagtacttcctctgggtggtgaagttcaattctttgaatgagctggtggattatcacagatctacatctgtctccagaaaccagcagatattcctgcgggacatagaacaggtgccacagcagccgacatacgtccaggccctctttgactttgatccccaggaggatggagagctgggcttccgccggggagattttatccatgtcatggataactcagaccccaactggtggaaaggagcttgccacgggcagaccggcatgtttccccgcaattatgtcacccccgtgaaccggaacgtctaagagtcaagaagcaattatttaaagaaagtgaaaaatgtaaaacacatacaaaagaattaaacccacaagctgcctctgacagcagcctgtgagggagtgcagaacacctggccgggtcaccctgtgaccctctcactttggttggaactttagggggtgggagggggcgttggatttaaaaatgccaaaacttacctataaattaagaagagtttttattacaaattttcactgctgctcctctttcccctcctttgtcttttttttcatccttttttctcttctgtccatcagtgcatgacgtttaaggccacgtatagtcctagctgacgccaataataaaaaacaagaaaccaaaaaaaaaaaacccgaattca

SEQ ID NO: 4954 - protein, 217 aa, Homo sapiens [sequence omitted]

SEQ ID NO: 4955 - DNA, 2147 bp, Homo sapiens
ggcacgagggctctgagcgggaggcctgagcgggaagcattggcgtccgagcgacttctaggagcctggggttcggcgctatggaggagctcgatggcgagccaacagtcactttgattccaggcgtgaattccaagaagaaccaaatgtattttgactggggtccaggggagatgctggtatgtgaaacctccttcaacaaaaaagaaaaatcagagatggtgccaagttgcccctttatctatatcatccgtaaggatgtagatgtttactctcaaatcttgagaaaactcttcaatgaatcccatggaatctttctgggcctccagagaattgacgaagagttgactggaaaatccagaaaatctcaattggttcgagtgagtaaaaactaccgatcagtcatcagagcatgtatggaggaaatgcaccaggttgcaattgctgctaaagatccagccaatggccgccagttcagcagccaggtctccattttgtcagcaatggagctcatctggaacctgtgtgagattctttttattgaagtggccccagctggccctctcctcctccatctccttgactgggtccggctccatgtgtgcgaggtggacagtttgtcggcagatgttctgggcagtgagaatccaagcaaacatgacagcttctggaacttggtgaccatcttggtgctgcagggccggctggatgaggcccgacagatgctctccaaggaagccgatgccagccccgcctctgcaggcatatgccgaatcatgggggacctgatgaggacaatgcccattcttagtcctgggaacacccagacactgacagagctggagctgaagtggcagcactggcacgaggaatgtgagcggtacctccaggacagcacattcgccaccagccctcacctggagtctctcttgaagattatgctgggagacgaagctgccttgttagagcagaaggaacttctgagtaattggtatcatttcctagtgactcggctcttgtactccaatcccacagtaaaacccattgatctgcactactatgcccagtccagcctggacctgtttctgggaggtgagagcagcccagaacccctggacaacatcttgttggcagcctttgagtttgacatccatcaagtaatcaaagagtgcagcatcgccctgagcaactggtggtttgtggcccacctgacagacctgctggaccactgcaagctcctccagtcacacaacctctatttcggttccaacatgagagagttcctcctgctggagtacgcctcgggactgtttgctcatcccagcctgtggcagctgggggtcgattactttgattactgccccgagctgggccgagtctccctggagctgcacattgagcggatacctctgaacaccgagcagaaagccctgaaggtgctgcggatctgtgagcagcggcagatgactgaacaagttcgcagcatttgtaagatcttagccatgaaagccgtccgcaacaatcgcctgggttctgccctctcttggagcatccgtgctaaggatgccgcctttgccacgctcgtgtcagacaggttcctcagggattactgtgagcgaggctgcttttctgatttggatctcattgacaacctggggccagccatgatgctcagtgaccgactgacattcctgggaaagtatcgcgagttccaccgtatgtacggggagaagcgttttgccgacgcagcttctctccttctgtccttgatgacgtctcggattgcccctcggtctttctggatgactctgctgacagatgccttgccccttttggaacagaaacaggtgattttctcagcagaacagacttatgagttgatgcggtgtctggaggacttgacgtcaagaagacctgtgcatggagaatctgataccgagcagctccaggatgatgacatagagaccaccaaggtggaaatgctgagactttctctggcacgaaatcttgctcgggcaattataagagaaggctcactggaaggttcctgagaactgcttcaatgtggtatctttgtatggcaatgtatatagattttttaaaagaataaatgttgttttgcaaatgtaaaaaaaaaaaaaaaaaaa

SEQ ID NO: 4956 - protein, 656 aa, Homo sapiens
MEELDGEPTVTLIPGVNSKKNQMYFDWGPGEMLVCETSFNKKEKSEMVPSCPFIYIIRKDVDVYSQILRKLFNESHGIFLGLQRIDEELTGKSRKSQLVRVSKNYRSVIRACMEEMHQVAIAAKDPANGRQFSSQVSILSAMELIWNLCEILFIEVAPAGPLLLHLLDWVRLHVCEVDSLSADVLGSENPSKHDSFWNLVTILVLQGRLDEARQMLSKEADASPASAGICRIMGDLMRTMPILSPGNTQTLTELELKWQHWHEECERYLQDSTFATSPHLESLLKIMLGDEAALLEQKELLSNWYHFLVTRLLYSNPTVKPIDLHYYAQSSLDLFLGGESSPEPLDNILLAAFEFDIHQVIKECSIALSNWWFVAHLTDLLDHCKLLQSHNLYFGSNMREFLLLEYASGLFAHPSLWQLGVDYFDYCPELGRVSLELHIERIPLNTEQKALKVLRICEQRQMTEQVRSICKILAMKAVRNNRLGSALSWSIRAKDAAFATLVSDRFLRDYCERGCFSDLDLIDNLGPAMMLSDRLTFLGKYREFHRMYGEKRFADAASLLLSLMTSRIAPRSFWMTLLTDALPLLEQKQVIFSAEQTYELMRCLEDLTSRRPVHGESDTEQLQDDDIETTKVEMLRLSLARNLARAIIREGSLEGS

SEQ ID NO: 4957 - DNA, 692 bp, Homo sapiens
ggtgctgcttgtgtgctcgtttggtgcggacctggtacctcttttgtgaagcggcagctgaggagactccggcgctcgccatggccgacgaaaagcccaaggaaggagtcaagactgagaacaacgatcatattaatttgaaggtggcggggcaggatggttctgtggtgcagtttaagattaagaggcatacaccacttagtaaactaatgaaagcctattgtgaacgacagggattgtcaatgaggcagatcagattccgatttgacgggcaaccaatcaatgaaacagacacacctgcacagttggaaatggaggatgaagatacaattgatgtgttccaacagcagacgggaggtgtctactgaaaagggaacctgcttctttactccagaactctgttctttaaagaccaagattacattctcaattagaaaactgcaatttggttccaccacatcctgactactaccgtatagttttctctattctttcatttcccccttccccattcctttattgtacataaagtaactggtatatgtgcacaagcatattgcattttttttttttttaactaaacagccaatggtatgttttgattgacatcaagtggagacgggatggggaaaaatactgattctgtgaaaataccccctttctccattagtggcatgctcattcagctctta

SEQ ID NO: 4958 - DNA, 1339 bp, Homo sapiens
gcagcgcgagcttcggcctcggctctgtaccatgaagaagggccccagtggctatggcttcaacctgcacagcgacaagtccaagccaggccagttcatccggtcagtggacccagactccccggctgaggcttcagggctccgggcccaggatcgcattgtggaggtgaacggggtctgcatggaggggaagcagcatggggacgtggtgtccgccatcagggctggcggggacgagaccaagctgctggtggtggacagggaaactgacgagttcttcaagaaatgcagagtgatcccatctcaggagcacctgaatggtcccctgcctgtgcccttcaccaatggggagatacagaaggagaacagtcgtgaagccctggcagaggcagccttggagagccccaggccagccctggtgagatccgcctccagtgacaccagcgaggagctgaattcccaagacagccccccaaaacaggactccacagcgccctcgtctacctcctcctccgaccccatcctagacttcaacatctccctggccatggccaaagagagggcccaccagaaacgcagcagcaaacgggccccgcagatggactggagcaagaaaaacgaactcttcagcaacctctgagcgccctgctgccacccagtgactggcagggccgagccagcattccaccccacctttttccttctccccaattactcccctgaatcaatgtacaaatcagcacccacatcccctttcttgacaaatgatttttctagagaactatgttcttccctgactttagggaaggtgaatgtgttcccgtcctcccgcagtcagaaaggagactctgcctccctcctcctcactgagtgcctcatcctaccgggtgtccctttgccaccctgcctgggacatcgctggaacctgcaccatgccaggatcatgggaccaggcgagagggcaccctcccttcctcccccatgtgataaatgggtccagggctgatcaaagaactctgactgcagaactgccgctctcagtggacagggcatctgttaccctgagacctgtggcagacacgtcttgttttcatttgatttttgttaagagtgcagtattgcagagtctagaggaatttttgtttccttgattaacatgattttcctggttgttacatccagggcatggcagtggcctcagccttaaacttttgttcctactcccaccctcagcgaactgggcagcacggggagggtttggctacccctgcccatccctgagccaggtaccaccattgtaaggaaacactttcagaaattcagctggttcctccaaacc

SEQ ID NO: 4959 - protein, 358 aa, Homo sapiens
MSADAAAGAPLPRLCCLEKGPNGYGFHLHGEKGKLGQYIRLVEPGSPAEKAGLLAGDRLVEVNGENVEKETHQQVVSRIRAALNAVRLLVVDPETDEQLQKLGVQVREELLRAQEAPGQAEPPAAAEVQGAGNENEPREADKSHPEQRELRPRLCTMKKGPSGYGFNLHSDKSKPGQFIRSVDPDSPAEASGLRAQDRIVEVNGVCMEGKQHGDVVSAIRAGGDETKLLVVDRETDEFFKKCRVIPSQEHLNGPLPVPFTNGEIQKENSREALAEAALESPRPALVRSASSDTSEELNSQDSPPKQDSTAPSSTSSSDPILDFNISLAMAKERAHQKRSSKRAPQMDWSKKNELFSNL

SEQ ID NO: 4960 - DNA, 3480 bp, Homo sapiens
cgcccagcagcccgtgggcaggcgcggcggagcgagcggggccggcggcgggcgccgagggacgccgaggcctcgggcgggggctggcccggggttccaggtctccagtgggggctgcagactaagcaaaatgaggcggttcctgaggccagggcatgaccctgtgcgggagaggctcaagcgggacctgttccagtttaacaagacggtggagcatggcttcccgcaccagcccagcgccctcggctacagcccgtccctgcacatcctggccatcggcacccgttctggagccatcaagctctacggagccccaggcgtggagttcatggggctgcaccaggagaacaacgctgtgacgcagatccacctcctgcccggccagtgccagctggtcaccctgctggatgacaacagcctgcacctttggagcctgaaggtcaagggcggggcatcggagctgcaggaggatgagagcttcacactgcgtggacccccaggggctgcccccagtgccacacagatcaccgtggtcctgccacattcctcctgcgagctgctctacctgggcaccgagagtggcaacgtgtttgtggtgcagctgccagcttttcgtgcgctggaggaccggaccatcagctcggacgcggtgctgcagcggttgccagaggaggcccgccaccggcgtgtgttcgagatggtggaggcactgcaggagcaccctcgagaccccaaccagatcctgatcggctacagccgaggcctcgttgtcatctgggacctacagggcagccgcgtgctctaccacttcctcagcagccagcaactggagaacatctggtggcagcgggacggccgcctgctcgtcagctgtcactctgacggcagctactgccagtggcccgtgtccagcgaagcccagcaaccagagcccctccgcagcctcgtgccttacggtccctttccttgcaaagcgattaccagaatcctctggctgaccactaggcaggggttgcccttcaccatcttccagggtggcatgccacgggccagctacggggaccgccactgcatctcagtgatccacgatggccagcagacggccttcgacttcacctcccgtgtcatcggcttcactgtcctcacagaggcagaccctgcagccacctttgacgacccctatgccctggtggtgctggctgaggaggagctggtggtgattgacctgcagacagcaggctggccaccggtccagctgccctacctggcttctctgcactgttccgccatcacctgctctcaccacgtctccaacatcccgctgaagctgtgggagcggatcattgccgccggcagccggcagaacgcacacttctccaccatggagtggccaattgatggtggcaccagcctgaccccagccccaccccagagggacctgctgctcacagggcacgaggacggcacggtgcggttctgggatgcctcgggtgtctgcctgcggctgctctacaaactcagcactgtgcgcgtgttcctcaccgacacggaccccaacgagaacttcagtgcccagggcgaggacgagtggcccccactccgcaaggtgggctcctttgacccctacagtgatgacccccggctgggcatccagaagatcttcctctgcaagtacagcggctacctggctgtggcaggcacggcagggcaggtgctggtactggaactgaatgacgaggcagcggagcaggctgtggagcaggtggaggccgacctgctgcaggaccaagagggctaccgctggaaggggcacgagcgcctggcagcccgctcagggcccgtgcgctttgagcctggctttcagcccttcgtgttggtgcagtgtcagcccccggctgtggtcacctccttggccctgcactctgagtggcggctcgtggccttcggcaccagccatggctttggcctctttgaccaccagcagcggcggcaggtctttgttaagtgcacactgcaccccagtgaccagctggccttggagggcccactctcccgcgtcaagtccctcaagaagtccttgcgtcagtcattccgccggatgcgtcggagccgggtgtccagccggaagcggcacccggctggccccccaggagaggcacaggaggggagtgccaaggctgagcggccaggcctccagaacatggagctggcgcctgtgcagcgcaagatcgaggctcgctcggcagaggactccttcacaggcttcgtccggaccctgtactttgctgacacctacctgaaggacagctcccggcactgcccctcgctgtgggctggcaccaatgggggcaccatctatgccttctccctgcgtgtgcctcccgccgagcggagaatggatgagcctgtgcgggcagagcaggccaaggagatccagctgatgcaccgggcgccggtggtgggcatcctggtgctcgacggacacagcgtaccccttcccgagcccctcgaagtggcccatgatctgtcgaagagccctgacatgcagggaagccaccagctgctcgtcgtatcagaggagcagttcaaggtgttcacgctgcccaaggtgagtgccaagctgaagttgaagctgacggccctggagggctcaagagtgcggcgggtcagcgtggcccacttcggcagtcgtcgagccgaggactacggggagcaccacctggcagtccttaccaacctgggcgacatccaggtggtctcgctgcccctgctcaagccccaggtgcgctacagctgcatccgccgggaggacgtcagtggcatcgcctcctgcgtcttcaccaaatatggccaaggcttctacctgatctcaccctcggagtttgagcgcttctctctctccaccaagtggctggtggagccccggtgtctggtggattcagcagaaaccaagaaccaccgccctggtaacggtgcgggccccaagaaggccccgagccgagccaggaactcagggactcagagtgatggcgaggagaagcagcccggcctggtgatggagcgcgctctgctcagtgatgagagagcggcaactggcgttcacatcgagccgccgtggggtgcagcctcagcaatggcggagcagagtgagtggctgagcgtccaggctgcgcgatgagcacacactactactgatggcctttcgggggtccctgccccaaccggagaggccggtgcacagggccccgccaggggctgggggcatcccggcttccacaatgcagctgctctgggcctcgggagaggagagaccccagtcccctgggctgcccttcccgggcctcgtctgtctgggtcctttggtcaatgttgcacagtttttattgctcccatccctttttgtagtgggctgggttttaagttataaatgttaactgcctctgggtgaaaaagtttttaataaacacctattacctcttg

SEQ ID NO: 4961 - protein, 1015 aa, Homo sapiens
MRRFLRPGHDPVRERLKRDLFQFNKTVEHGFPHQPSALGYSPSLHILAIGTRSGAIKLYGAPGVEFMGLHQENNAVTQIHLLPGQCQLVTLLDDNSLHLWSLKVKGGASELQEDESFTLRGPPGAAPSATQITVVLPHSSCELLYLGTESGNVFVVQLPAFRALEDRTISSDAVLQRLPEEARHRRVFEMVEALQEHPRDPNQILIGYSRGLVVIWDLQGSRVLYHFLSSQQLENIWWQRDGRLLVSCHSDGSYCQWPVSSEAQQPEPLRSLVPYGPFPCKAITRILWLTTRQGLPFTIFQGGMPRASYGDRHCISVIHDGQQTAFDFTSRVIGFTVLTEADPAATFDDPYALVVLAEEELVVIDLQTAGWPPVQLPYLASLHCSAITCSHHVSNIPLKLWERIIAAGSRQNAHFSTMEWPIDGGTSLTPAPPQRDLLLTGHEDGTVRFWDASGVCLRLLYKLSTVRVFLTDTDPNENFSAQGEDEWPPLRKVGSFDPYSDDPRLGIQKIFLCKYSGYLAVAGTAGQVLVLELNDEAAEQAVEQVEADLLQDQEGYRWKGHERLAARSGPVRFEPGFQPFVLVQCQPPAVVTSLALHSEWRLVAFGTSHGFGLFDHQQRRQVFVKCTLHPSDQLALEGPLSRVKSLKKSLRQSFRRMRRSRVSSRKRHPAGPPGEAQEGSAKAERPGLQNMELAPVQRKIEARSAEDSFTGFVRTLYFADTYLKDSSRHCPSLWAGTNGGTIYAFSLRVPPAERRMDEPVRAEQAKEIQLMHRAPVVGILVLDGHSVPLPEPLEVAHDLSKSPDMQGSHQLLVVSEEQFKVFTLPKVSAKLKLKLTALEGSRVRRVSVAHFGSRRAEDYGEHHLAVLTNLGDIQVVSLPLLKPQVRYSCIRREDVSGIASCVFTKYGQGFYLISPSEFERFSLSTKWLVEPRCLVDSAETKNHRPGNGAGPKKAPSRARNSGTQSDGEEKQPGLVMERALLSDERAATGVHIEPPWGAASAMAEQSEWLSVQAAR

SEQ ID NO: 4962 - DNA, 3879 bp, Homo sapiens
gtgggttctgcctaaagctgaattcccagcgctttggcttctctgagttggggttgtgtataggggtcttcgaacagttccggaaccagccagcagcctttaattcttgggcggaccacggccggttctgatatcttagggtgaagagagggaggtgtcggccagccaagagagaaaattgcggatcttgggctcaggaagacgggagaaggggttcggggtcccggggtggaagaacggtcgtcgtggttgcgcttatagaagtaggagcagagggttctcgtggcaaccttttactacctttgccttaacctttggccactgttcttggctaagatgagcagccaccataccacctttccttttgaccctgagcggcgagtccggagtacgctgaagaaggtctttgggtttgactcttttaagacgcctttacaggagagtgcgaccatggctgtagtaaaaggtaacaaggacgtctttgtgtgcatgcccacaggggcaggaaaatccctatgctatcagctccctgctctgttggccaaaggcatcaccattgtagtctctcctctcattgctttgattcaggaccaagtggaccacttgctaaccctaaaggtacgagtaagttccctgaactcgaagctctctgcacaggaaaggaaggagctgcttgctgacctggagcgagaaaagccccagaccaagattctgtacatcaccccagagatggcagcttcatcctccttccagcccaccctgaactccctggtgtcccgccacctgctgtcttacttggtggtggatgaagctcattgtgtttcccaatgggggcatgactttcgtcctgactacttgcgtctgggtgccctgcgctcccgcctgggacatgccccttgtgtggctctgaccgccacagccaccccacaggtccaagaggacgtgtttgctgccctgcacctgaagaaaccagttgccatcttcaagactccctgcttccgggccaacctcttctatgatgtgcaattcaaggaactgatttctgatccctatgggaacctgaaggacttctgccttaaggctcttggacaggaggctgataaagggttatctggctgcggcattgtgtactgcaggactagagaggcttgtgaacagctggccatagagctcagctgcaggggtgtgaacgccaaggcttaccatgcagggctgaaggcctctgaaagaacgctggtgcagaacgactggatggaggagaaggtccctgtaattgttgcaaccattagttttgggatgggagtggataaagccaatgtcaggtttgtcgcccattggaatattgccaagtctatggctgggtactaccaggagtctggccgggctggcagggatgggaagccttcctggtgccgtctctattactccaggaatgaccgggaccaagtcagcttcctgatcaggaaggaagtagcaaaactccaggaaaagagaggaaacaaagcatctgataaagccactatcatggcctttgatgccctggtgaccttctgtgaagaactggggtgccgccatgccgccattgccaagtacttcggggatgcgctgcctgcctgcgccaaaggctgcgaccactgccagaaccccacggccgtgcggaggcggctggaggccttggagcgcagcagcagctggagcaagacctgcatcgggccctcccaggggaacggctttgaccccgagctgtatgagggaggccgcaagggctacggggacttcagcaggtatgacgaaggttctggaggcagcggggatgaaggcagagatgaggcccacaagcgggagtggaacctcttctatcagaagcagatgcagctgcgcaagggcaaagaccccaagatagaagaatttgtacccccagatgagaactgtcccctgaaagaggcttctagcaggaggatccccaggctgactgtgaaggcacgggagcactgcctgcggcttctggaggaggcgctgagcagcaaccgccagtcaacacgtaccgctgatgaagctgacctccgggccaaggccgtggagctggaacatgagacattccggaacgccaaggtggccaacctctacaaggccagcgtgctgaagaaggtggccgatatccacagagcctccaaggatgggcagccctatgacatgggaggcagtgccaagagctgcagtgcccaagctgagcccccggagcccaatgagtatgacattccaccagcctcccatgtgtactcgctcaaacccaagcgggtgggagctggtttccccaaaggctcctgcccgttccagacggccacggaactgatggagacaactcggatcagggagcaagccccccagcccgagcggggaggcgagcacgagcccccgagccggccctgtggcctcctggatgaggatgggagtgagcccctccctgggcccagaggggaggtccctggaggcagcgctcactatggggggccctcccctgagaagaaggcaaaaagttcctctgggggcagctcccttgccaagggccgggctagcaagaaacagcagctcctagccacagcggcccacaaggattctcagagcatcgcccgcttcttctgccgaagggtggaaagcccagctctgctggcatcagccccagaggcagaaggtgcctgcccctcctgtgagggggttcagggacccccgatggccccagagaagtacacaggggaggaagatggagccgggggacattcgcctgcccctccccagactgaggagtgcctcagggagaggccaagcacctgcccgcccagagaccagggcacccctgaagtccagcccacccctgcaaaggacacatggaagggcaagcggcctcgatcccagcaggagaacccagagagccagcctcagaagaggccacgcccctcagccaagccctccgtcgtagctgaggtcaagggcagcgtctcggccagcgaacagggcaccttgaatcccacggctcaagaccccttccagctctccgctcctggcgtctccttgaaggaggctgcaaatgttgtggtcaagtgcctcacccctttctacaaggagggcaagtttgcttccaaggagttgtttaaaggctttgcccgccacctctcacacttgctgactcagaagacctctcctggaaggagcgtgaaagaagaggcccagaacctcatcaggcacttcttccatggccgggcccggtgcgagagcgaagctgactggcatggcctgtgtggcccccagagatgaccaactgctggctgggcagggcccgcgtcctcccccagattctagcatgggtcatcctgggcctcacctgctgatgccagggccatcgtcttttctcagtccttctcctttccaaccatacttggctttggggatgaccccagacaccccctgaatccaggtcagaggtcagcccacctttctttctgcttgcaaagcctatagacccttctcagagcggtcctcatggctgggttttctgggacacatgtcgaggacagaaggtggagggtggtggagctgctgctggaagaaggggaaggaagagtggcccctccccgagttctaagtcaggatgaggcccacctgtccaaggtatcggaacctacccaggggaccctcagatcctccacccactcccccatccattacgatgccagcttccagccttgcccaggtcagagctgtggcagaggagaggcagccaggccctgttcctgctcagctcctgctcaggaaggccaggcctgacagatgtttgggagaggaataaagttgtgttgttgtggggcatgcaggcgtgcacac

SEQ ID NO: 4963 - DNA, 5994 bp, Homo sapiens
gcgctgcccgcctcgtccccaccccccaaccccccgcgcccgccctcggacagtccctgctcgcccgcgcgctgcagccccatctcctagcggcagcccaggcgcggagggagcgagtccgccccgaggtaggtccaggacgggcgcacagcagcagccgaggctggccgggagagggaggaagaggatggcagggccacgccccagcccatgggccaggctgctcctggcagccttgatcagcgtcagcctctctgggaccttggcaaaccgctgcaagaaggccccagtgaagagctgcacggagtgtgtccgtgtggataaggactgcgcctactgcacagacgagatgttcagggaccggcgctgcaacacccaggcggagctgctggccgcgggctgccagcgggagagcatcgtggtcatggagagcagcttccaaatcacagaggagacccagattgacaccaccctgcggcgcagccagatgtccccccaaggcctgcgggtccgtctgcggcccggtgaggagcggcattttgagctggaggtgtttgagccactggagagccccgtggacctgtacatcctcatggacttctccaactccatgtccgatgatctggacaacctcaagaagatggggcagaacctggctcgggtcctgagccagctcaccagcgactacactattggatttggcaagtttgtggacaaagtcagcgtcccgcagacggacatgaggcctgagaagctgaaggagccctggcccaacagtgacccccccttctccttcaagaacgtcatcagcctgacagaagatgtggatgagttccggaataaactgcagggagagcggatctcaggcaacctggatgctcctgagggcggcttcgatgccatcctgcagacagctgtgtgcacgagggacattggctggcgcccggacagcacccacctgctggtcttctccaccgagtcagccttccactatgaggctgatggcgccaacgtgctggctggcatcatgagccgcaacgatgaacggtgccacctggacaccacgggcacctacacccagtacaggacacaggactacccgtcggtgcccaccctggtgcgcctgctcgccaagcacaacatcatccccatctttgctgtcaccaactactcctatagctactacgagaagcttcacacctatttccctgtctcctcactgggggtgctgcaggaggactcgtccaacatcgtggagctgctggaggaggccttcaatcggatccgctccaacctggacatccgggccctagacagcccccgaggccttcggacagaggtcacctccaagatgttccagaagacgaggactgggtcctttcacatccggcggggggaagtgggtatataccaggtgcagctgcgggcccttgagcacgtggatgggacgcacgtgtgccagctgccggaggaccagaagggcaacatccatctgaaaccttccttctccgacggcctcaagatggacgcgggcatcatctgtgatgtgtgcacctgcgagctgcaaaaagaggtgcggtcagctcgctgcagcttcaacggagacttcgtgtgcggacagtgtgtgtgcagcgagggctggagtggccagacctgcaactgctccaccggctctctgagtgacattcagccctgcctgcgggagggcgaggacaagccgtgctccggccgtggggagtgccagtgcgggcactgtgtgtgctacggcgaaggccgctacgagggtcagttctgcgagtatgacaacttccagtgtccccgcacttccgggttcctgtgcaatgaccgaggacgctgctccatgggccagtgtgtgtgtgagcctggttggacaggcccaagctgtgactgtcccctcagcaatgccacctgcatcgacagcaatgggggcatctgtaatggacgtggccactgtgagtgtggccgctgccactgccaccagcagtcgctctacacggacaccatctgcgagatcaactactcggcgatccacccgggcctctgcgaggacctacgctcctgcgtgcagtgccaggcgtggggcaccggcgagaagaaggggcgcacgtgtgaggaatgcaacttcaaggtcaagatggtggacgagcttaagagagccgaggaggtggtggtgcgctgctccttccgggacgaggatgacgactgcacctacagctacaccatggaaggtgacggcgcccctgggcccaacagcactgtcctggtgcacaagaagaaggactgccctccgggctccttctggtggctcatccccctgctcctcctcctcctgccgctcctggccctgctactgctgctatgctggaagtactgtgcctgctgcaaggcctgcctggcacttctcccgtgctgcaaccgaggtcacatggtgggctttaaggaagaccactacatgctgcgggagaacctgatggcctctgaccacttggacacgcccatgctgcgcagcgggaacctcaagggccgtgacgtggtccgctggaaggtcaccaacaacatgcagcggcctggctttgccactcatgccgccagcatcaaccccacagagctggtgccctacgggctgtccttgcgcctggcccgcctttgcaccgagaacctgctgaagcctgacactcgggagtgcgcccagctgcgccaggaggtggaggagaacctgaacgaggtctacaggcagatctccggtgtacacaagctccagcagaccaagttccggcagcagcccaatgccgggaaaaagcaagaccacaccattgtggacacagtgctgatggcgccccgctcggccaagccggccctgctgaagcttacagagaagcaggtggaacagagggccttccacgacctcaaggtggcccccggctactacaccctcactgcagaccaggacgcccggggcatggtggagttccaggagggcgtggagctggtggacgtacgggtgcccctctttatccggcctgaggatgacgacgagaagcagctgctggtggaggccatcgacgtgcccgcaggcactgccaccctcggccgccgcctggtaaacatcaccatcatcaaggagcaagccagagacgtggtgtcctttgagcagcctgagttctcggtcagccgcggggaccaggtggcccgcatccctgtcatccggcgtgtcctggacggcgggaagtcccaggtctcctaccgcacacaggatggcaccgcgcagggcaaccgggactacatccccgtggagggtgagctgctgttccagcctggggaggcctggaaagagctgcaggtgaagctcctggagctgcaagaagttgactccctcctgcggggccgccaggtccgccgtttccacgtccagctcagcaaccctaagtttggggcccacctgggccagccccactccaccaccatcatcatcagggacccagatgaactggaccggagcttcacgagtcagatgttgtcatcacagccaccccctcacggcgacctgggcgccccgcagaaccccaatgctaaggccgctgggtccaggaagatccatttcaactggctgcccccttctggcaagccaatggggtacagggtaaagtactggattcagggcgactccgaatccgaagcccacctgctcgacagcaaggtgccctcagtggagctcaccaacctgtacccgtattgcgactatgagatgaaggtgtgcgcctacggggctcagggcgagggaccctacagctccctggtgtcctgccgcacccaccaggaagtgcccagcgagccagggcgtctggccttcaatgtcgtctcctccacggtgacccagctgagctgggctgagccggctgagaccaacggtgagatcacagcctacgaggtctgctatggcctggtcaacgatgacaaccgacctattgggcccatgaagaaagtgctggttgacaaccctaagaaccggatgctgcttattgagaaccttcgggagtcccagccctaccgctacacggtgaaggcgcgcaacggggccggctgggggcctgagcgggaggccatcatcaacctggccacccagcccaagaggcccatgtccatccccatcatccctgacatccctatcgtggacgcccagagcggggaggactacgacagcttccttatgtacagcgatgacgttctacgctctccatcgggcagccagaggcccagcgtctccgatgacactggctgcggctggaagttcgagcccctgctgggggaggagctggacctgcggcgcgtcacgtggcggctgcccccggagctcatcccgcgcctgtcggccagcagcgggcgctcctccgacgccgaggcccccacggccccccggacgacggcggcgcgggcgggaagggcggcagccgtgccccgcagtgcgacacccgggccccccggagagcacctggtgaatggccggatggactttgccttcccgggcagcaccaactccctgcacaggatgaccacgaccagtgctgctgcctatggcacccacctgagcccacacgtgccccaccgcgtgctaagcacatcctccaccctcacacgggactacaactcactgacccgctcagaacactcacactcgaccacactgcccagggactactccaccctcacctccgtctcctcccacgactctcgcctgactgctggtgtgcccgacacgcccacccgcctggtgttctctgccctggggcccacatctctcagagtgagctggcaggagccgcggtgcgagcggccgctgcagggctacagtgtggagtaccagctgctgaacggcggtgagctgcatcggctcaacatccccaaccctgcccagacctcggtggtggtggaagacctcctgcccaaccactcctacgtgttccgcgtgcgggcccagagccaggaaggctggggccgagagcgtgagggtgtcatcaccattgaatcccaggtgcacccgcagagcccactgtgtcccctgccaggctccgccttcactttgagcactcccagtgccccaggcccgctggtgttcactgccctgagcccagactcgctgcagctgagctgggagcggccacggaggcccaatggggatatcgtcggctacctggtgacctgtgagatggcccaaggaggagggccagccaccgcattccgggtggatggagacagccccgagagccggctgaccgtgccgggcctcagcgagaacgtgccctacaagttcaaggtgcaggccaggaccactgagggcttcgggccagagcgcgagggcatcatcaccatagagtcccaggatggaggacccttcccgcagctgggcagccgtgccgggctcttccagcacccgctgcaaagcgagtacagcagcatcaccaccacccacaccagcgccaccgagcccttcctagtggatgggctgaccctgggggcccagcacctggaggcaggcggctccctcacccggcatgtgacccaggagtttgtgagccggacactgaccaccagcggaacccttagcacccacatggaccaacagttcttccaaacttgaccgcaccctgccccacccccgccatgtcccactaggcgtcctcccgactcctctcccggagcctcctcagctactccatccttgcacccctgggggcccagcccacccgcatgcacagagcaggggctaggtgtctcctgggaggcatgaagggggcaaggtccgtcctctgtgggcccaaacctatttgtaaccaaagagctgggagcagcacaaggacccagcctttgttctgcacttaataaatggttttgctactgctaaaaaaaaaaaaaaaaaaaaaaaaaaaaaaaaaaaaaaaaaaaaaaaaaaaaaaaaaaaaaaaaaaaaaaaaaaaa

SEQ ID NO: 4964 - protein, 1822 aa, Homo sapiens
MAGPRPSPWARLLLAALISVSLSGTLANRCKKAPVKSCTECVRVDKDCAYCTDEMFRDRRCNTQAELLAAGCQRESIVVMESSFQITEETQIDTTLRRSQMSPQGLRVRLRPGEERHFELEVFEPLESPVDLYILMDFSNSMSDDLDNLKKMGQNLARVLSQLTSDYTIGFGKFVDKVSVPQTDMRPEKLKEPWPNSDPPFSFKNVISLTEDVDEFRNKLQGERISGNLDAPEGGFDAILQTAVCTRDIGWRPDSTHLLVFSTESAFHYEADGANVLAGIMSRNDERCHLDTTGTYTQYRTQDYPSVPTLVRLLAKHNIIPIFAVTNYSYSYYEKLHTYFPVSSLGVLQEDSSNIVELLEEAFNRIRSNLDIRALDSPRGLRTEVTSKMFQKTRTGSFHIRRGEVGIYQVQLRALEHVDGTHVCQLPEDQKGNIHLKPSFSDGLKMDAGIICDVCTCELQKEVRSARCSFNGDFVCGQCVCSEGWSGQTCNCSTGSLSDIQPCLREGEDKPCSGRGECQCGHCVCYGEGRYEGQFCEYDNFQCPRTSGFLCNDRGRCSMGQCVCEPGWTGPSCDCPLSNATCIDSNGGICNGRGHCECGRCHCHQQSLYTDTICEINYSAIHPGLCEDLRSCVQCQAWGTGEKKGRTCEECNFKVKMVDELKRAEEVVVRCSFRDEDDDCTYSYTMEGDGAPGPNSTVLVHKKKDCPPGSFWWLIPLLLLLLPLLALLLLLCWKYCACCKACLALLPCCNRGHMVGFKEDHYMLRENLMASDHLDTPMLRSGNLKGRDVVRWKVTNNMQRPGFATHAASINPTELVPYGLSLRLARLCTENLLKPDTRECAQLRQEVEENLNEVYRQISGVHKLQQTKFRQQPNAGKKQDHTIVDTVLMAPRSAKPALLKLTEKQVEQRAFHDLKVAPGYYTLTADQDARGMVEFQEGVELVDVRVPLFIRPEDDDEKQLLVEAIDVPAGTATLGRRLVNITIIKEQARDVVSFEQPEFSVSRGDQVARIPVIRRVLDGGKSQVSYRTQDGTAQGNRDYIPVEGELLFQPGEAWKELQVKLLELQEVDSLLRGRQVRRFHVQLSNPKFGAHLGQPHSTTIIIRDPDELDRSFTSQMLSSQPPPHGDLGAPQNPNAKAAGSRKIHFNWLPPSGKPMGYRVKYWIQGDSESEAHLLDSKVPSVELTNLYPYCDYEMKVCAYGAQGEGPYSSLVSCRTHQEVPSEPGRLAFNVVSSTVTQLSWAEPAETNGEITAYEVCYGLVNDDNRPIGPMKKVLVDNPKNRMLLIENLRESQPYRYTVKARNGAGWGPEREAIINLATQPKRPMSIPIIPDIPIVDAQSGEDYDSFLMYSDDVLRSPSGSQRPSVSDDTGCGWKFEPLLGEELDLRRVTWRLPPELIPRLSASSGRSSDAEAPTAPRTTAARAGRAAAVPRSATPGPPGEHLVNGRMDFAFPGSTNSLHRMTTTSAAAYGTHLSPHVPHRVLSTSSTLTRDYNSLTRSEHSHSTTLPRDYSTLTSVSSHDSRLTAGVPDTPTRLVFSALGPTSLRVSWQEPRCERPLQGYSVEYQLLNGGELHRLNIPNPAQTSVVVEDLLPNHSYVFRVRAQSQEGWGREREGVITIESQVHPQSPLCPLPGSAFTLSTPSAPGPLVFTALSPDSLQLSWERPRRPNGDIVGYLVTCEMAQGGGPATAFRVDGDSPESRLTVPGLSENVPYKFKVQARTTEGFGPEREGIITIESQDGGPFPQLGSRAGLFQHPLQSEYSSITTTHTSATEPFLVDGLTLGAQHLEAGGSLTRHVTQEFVSRTLTTSGTLSTHMDQQFFQT

SEQ ID NO: 4965 - DNA, 4270 bp, Homo sapiens
caaggggccaggaccctgagttttattgggccttgactaatgtgcctcctcatctgtgtcctcaccctcattgtggacttaggtttcaggtatctcagaggcagacccacaggctctgctccaggccatgaaggacctggacggcatggatgctgatatcttaggtctgaagaaatctaattcagcccctagcaaaaaagctgcaaaggaccctgggaaaggagagctgcccaaccaccccaagcctgcagggggtgccattcccaccaagaagtcacttccgtctcccagcagctctgggcatcagaacaggaggttttcctctgaagacttggaagacccattgagaggacttctctcctatgatgaaggaggaatcaccaagcagccgcctgtgacacagagtaaaacagcttctgacaagagccccagcacagtgagagatcaaggtccctctattcctctaactcctggggacacccccatccgaaaaaaagaagaattgttgtttgatgatggggatgacatcatggccaccttggggtttggagacagccccaaagcagagaagaggcagataggagaccaggaagggcctcgccctgctcgctccacgctggatgagctgctgggtcgaggcatggccaccaaactcctggcccgcccgggcaccggggagcacagggagttcaagctagacaagaagtaccagaggccacaggacagtgaagatatgtggggtgacgaggacttcacctttggagcctatcagcccactgtggtctcctctgagggccggcagtcccgccggcagtctgtcagtaggttcttcgcagacagtggcgcagaccccaagggagaaccaggctccaaacagagccctccaatggcttccagccccatccagcccaggaagggaggagctgactggttgggcctcaaggacgaggacttggacctgttccctgcctcacccaccagagaggcccatcgggaaagttcagtgcctgtcacgccctcagtgcctcctcctgcgagccagcactccacgccagctgggctgcccccctccagggcaaagccaccaactgaaggtgcagggtcccctgccaaagccagccaggcttccaagctgcgagcctccaaggaggagaaagaggactggctgagccatgccctgtctcggaagaagtcccaaggcctggccagagagcagcatgctgggacctctgagggcctgcatttggcggggacagcgggccatcccccttctggcagcctgacctgggccttctgtcaccttcaccttgaacgctgcctttcctcagccaacctctcaccagcacacaagggcttgagcacgcagctgctggagggagttctggaacaactgcacgagaaagaccgtgtgtcaggcctggtgtctcggggtcccctgtgactcagaaccatgccgcctcagcactccctacaggttccccaaagaggggaacagcccctggagacctctcagccactgagcctgccacgtgtttcccgagcacccagaaacccacagagccttccgtgcccgtccagcccctgctcccagagtccctggcccggagcctgctgccgagcacagaataccagaagcagctcctggcagcacaggtgcaacttcagtgcagccccgctgagctccaggccgagctgctgcatagccaggcccggctggcagagctggaggcccaggtgcggaagctggagctagaacgggcccagcatgagctgctgctggggagtctgcagcagcagcaccaggcagacctggagctcatcgagagtgcacacagaagccgcatcaaggtgctagaaacatcgtaccagcaacgggaggagcggctccggagagagaacgaagagctgtcagctcggtatctgtcgcagtgccaggaggccgaacaggcccgtgctgagcttacggcccagcaccagcggcgcttggcggccatagcgcaggagaaggaccaggaaatggagcggctccgggagctgcagcgggcgtccatcctagacatgcgcagagaccacgaggagcagctgcagcggctaaagctgctgaaggaccgagaggtcgatgcggccaccagtgccacctcccacacacggtccctgaatagcatcatccaccagatggagaagttctccagcagcctgcacgagttgtcctcccgcgtggaggcctcgcacctcaccacctcccaggagcgggagctggggatccggcagcgtgacgagcagctgcggggagcggctgggccagcagcagcgggacatggaggaggagcggagccggcaacaggaggtcatcgggaagatggaggcacggctgaatgagcagagccggctgctggagcaggaacgctggcgggtgactgccgagcagtccaaggcggagtccatgcagcgcgccctagaggagcaaaggaaggtcacggcccagcagatggccatggaaagggcggagctggaacgggccaagagcgccttgctggaggagcagaagtctgtcatgctcaagtgcggggaggagcggcggcgcctggctgccgagtgggcggagttctccgcgcagcaaaagctgagagcaggctgagctgaagatcagggccagcgagctccgggccgaggagaagcagctggcagcggagagagcagccctggagcaggagcggcaggagctgcggctggagaaggagaggatcaacgccaccgccctgcgtgtcaagctccgcgccgaggaggtggagagcatgagcaaggtggcctccgagaagtacgaggagggggagcgggcattgcgcgaggcccagcaggtgcaggcagagcagcaggcccggttgcaggcggtgcagcaacagcaggagcggctgcggaagcaggagcagcacatgcaccaggagcatctgagtctggcccagcagaggctgcaactggaccgcgcacgacaggacctgccctctagcctcgtgggtctgttccccagggcccagggccctgcagcctccagccagagtgccctcatgcctcctgctcccaccacccgttggtgcagccagccgccaactggcctggaccccagccccttgcacctccatgccaggctggcactgctgaggcacatggcagagcagcacctgcggtctgcggtggcacctggcagctggaccacagccaggagaagggtactattagccctgcttcaaacatgcagaaactgaggcccggggagattaaataacctgcctgaaatgacaccgtcctgggccgccggacaccccccctggggccgatgcccaacagtgacatcgacttgagcaacctggagcggctggagaagtaccggagcttcgaccgctaccggcgccgagcagagcaggaggcgcaggccccgcactggtggcggacctaccgagagtatttcggggagaagacagatcccaaagagaagattgatattgggctgcctccacccaaagtctcccggacccaacagctactggaacggaaacaggccatccaggagcttcgggccaatgtggaagaggagcgggctgcccgcctccgcacagtgtcccgctggatgccgtgcgggccgagtgggagaggacctgtggcccctaccacaagcagcgtctggctgagtattacggcctctaccgagacctgttccacggtgccacctttgtgccccgagtccccctgcacgtggcctacgctgtgggtgaggatgacctgatgcctgtgtactgtggcaatgaggtgactccaaccgaggctgcccaagcgccagaggtgacctatgaggcagaagagggctccttgtggacgttgctactcactagcttggatgggcacctgctggagccagatgctgagtacctccactggctgctaaccaacatcccgggtaaccgggtggctgaaggacaggtgacgtgtccctacctcccccccttccctgcccgaggctccggcatccaccgtcttgccttcctgctcttcaagcaggaccagccgattgacttctctgaggacgcacgcccctcaccctgctatcagctggcccagcggaccttccgcacttttgatttctacaagaaacaccaagaaaccatgactccagccggcttgtccttcttccagtgccgctgggatgactccgtcacctacatcttccaccagcttctggacatgcgggagccggtgtttgagttcgtgcggccgc

SEQ ID NO: 4966 - protein, 662 aa, Homo sapiens
MAPKTKKGCKVTLPEKPVKLASHTRDTTGVSQMFPSSKARTKSLLGDDVFSTMAGLEEADAEVSGISEADPQALLQAMKDLDGMDADILGLKKSNSAPSKKAAKDPGKGELPNHPKPAGGAIPTKKSLPSPSSSGHQNRRFSSEDLEDPLRGLLSYDEGGITKQPPVTQSKTASDKSPSTVRDQGPSIPLTPGDTPIRKKEELLFDDGDDIMATLGFGDSPKAEKRQIGDQEGPRPARSTLDELLGRGMATKLLARPGTGEHREFKLDKKYQRPQDSEDMWGDEDFTFGAYQPTVVSSEGRQSRRQSVSRFFADSGADPKGEPGSKQSPPMASSPIQPRKGGADWLGLKDEDLDLFPASPTREAHRESSVPVTPSVPPPASQHSTPAGLPPSRAKPPTEGAGSPAKASQASKLRASKEEKEDWLSHALSRKKSQGLAREQHAGTSEGLHLAGTAGHPPSGSQPLTSTQGLEHAAAGGSSGTTARERPCVRPGVSGSPVTQNHAASALPTGSPKRGTAPGDLSATEPATCFPSTQKPTEPSVPVQPLLPESLARSLLPSTEYQKQLLAAQVQLQCSPAELQAELLHSQARLAELEAQVRGSGAVGAGGRVATGGDTESGWKLPQEGGRAVGTGQRGVQPPPLPGCWPSCCLPGAEAGARTGPA

SEQ ID NO: 4967 - DNA, 1361 bp, Homo sapiens
cccgagcatcccgcgccgacggggctgtgccggagcagctgtgcagagctgcaggcgcgcgtcatggctgctttgagacagccccaggtcgcggagctgctggccgaggcccggcgagccttccgggaggagttcggggccgagcccgagctggccgtgtcagcgccgggccgcgtcaacctcatcggggaacacacggactacaaccagggcctggtgctgcctatggctctggagctcatgacggtgctggtgggcagcccccgcaaggatgggctggtgtctctcctcaccacctctgagggtgccgatgagccccagcggctgcagtttccactgcccacagcccagcgctcgctggagcctgggactcctcggtgggccaactatgtcaagggagtgattcagtactacccagctgcccccctccctggcttcagtgcagtggtggtcagctcagtgcccctggggggtggcctgtccagctcagcatccttggaagtggccacgtacaccttcctccagcagctctgtccagactcgggcacaatagctgcccgcgcccaggtgtgtcagcaggccgagcacagcttcgcagggatgccctgtggcatcatggaccagttcatctcacttatgggacagaaaggccacgcgctgctcattgactgcaggtccttggagaccagcctggtgccactctcggaccccaagctggccgtgctcatcaccaactctaatgtccgccactccctggcctccagcgagtaccctgtgcggcggcgccaatgtgaagaagtggcccgggcgctgggcaaggaaagcctccgggaggtacaactggaagagctagaggctgccagggacctggtgagcaaagagggcttccggcgggcccggcacgtggtgggggagattcggcgcacggcccaggcagcggccgccctgagacgtggcgactacagagcctttggccgcctcatggtggagagccaccgctcactcagagacgactatgaggtgagctgcccagagctggaccagctggtggaggctgcgcttgctgtgcctggggtttatggcagccgcatgacgggcggtggcttcggtggctgcacggtgacactgctggaggcctccgctgctccccacgccatgcggcacatccaggagcactacggcgggactgccaccttctacctctctcaagcagccgatggagccaaggtgctgtgcttgtgaggcacccccaggacagcacacggtgagggtgcggggcctgcaggccagtcccacggctctgtgcccggtgccatcttccatatccgggtgctcaataaacttgtgcctccaatgtggta

SEQ ID NO: 4968 - protein, 392 aa, Homo sapiens
MAALRQPQVAELLAEARRAFREEFGAEPELAVSAPGRVNLIGEHTDYNQGLVLPMALELMTVLVGSPRKDGLVSLLTTSEGADEPQRLQFPLPTAQRSLEPGTPRWANYVKGVIQYYPAAPLPGFSAVVVSSVPLGGGLSSSASLEVATYTFLQQLCPDSGTIAARAQVCQQAEHSFAGMPCGIMDQFISLMGQKGHALLIDCRSLETSLVPLSDPKLAVLITNSNVRHSLASSEYPVRRRQCEEVARALGKESLREVQLEELEAARDLVSKEGFRRARHVVGEIRRTAQAAAALRRGDYRAFGRLMVESHRSLRDDYEVSCPELDQLVEAALAVPGVYGSRMTGGGFGGCTVTLLEASAAPHAMRHIQEHYGGTATFYLSQAADGAKVLCL

SEQ ID NO: 4969 - DNA, 1662 bp, Rattus norvegicus
ggtcgttcgttgggcggtgctggtttttcgctcgtcgactgcggctcttcctcgggcagcggaagcggcgcggcggtcggagaagtggcctaaaacttcggcgttgggtgaaagaaaatggcccgaaccaagcagactgctcgtaagtccaccggtgggaaagccccccgcaaacagctggccacgaaagccgccaggaaaagcgctccctctaccggcggggtgaagaagcctcatcgctacaggcccgggaccgtggcgcttcgagagattcgtcgttatcagaagtcgaccgagctgctcatccggaagctgcccttccagaggttggtgagggagatcgcgcaggatttcaaaaccgacctgaggtttcagagcgcagccatcggtgcgctgcaggaggctagcgaagcgtacctggtgggtctgttcgaagataccaacctgtgtgccatccacgctaagagagtcaccatcatgcccaaagacatccagttggctcgccggatacggggagagagagcttaagtgaaggcagtttttatggcgttttgtagtaaattctgtaaaatactttggtttaatttgtgactttttttgtaagaaattgtttataatatgttgcatttgtacttaagtcattccatctttcactcaggatgaatgcgaaaagtgactgttcacagacctcagtgatgtgagcactgttgctcaggagtgacaagttgctaatatgcagaagggatgggtgatacttcttgcttctcatgatgcatgtttctgtatgttaatgacttgttgggtagctattaaggtactagagttgataaatgtgtacagggtccttttgcaataaaactggttatgacttgatccaagtgtttaacaattggggctgttaagtctgaccatacatcactgtgatagaatgtgggctttttcaagggtgaagatacaagtcttaaccacagtgtaacttacagtttcctttaaaaaaaaaaaaagtaaacctggcagctatagaatacactatgtgcatttataatagctattttatatattgtagtatcaacatttttaaattaaatgttttacattcacaagtggtggggagtcttgtcattaaggtgtgtgtaatttagagtccagttggttttcttctgactgcacttgttctcatagtagtaaaatgctatgcgcatttataccttgcataagtcctcattctaccacatgttaaccctctagctgataatgcaaacactaactgggggattttatttataagggctctagaaaaaacgagttattcacaccagcatcatcttaactaacattctgaactagttagtgcagcttttcattgtgttgtgtggttggtctcataactaggttgagtttttctcctctgctgaggaaacagtaccgaagttctttttcttgtggcatttgtattataaaaacttggtgtgggggaggagcacaaaactccagcccactgaacctctgccaattaagatggtgttgggttaggttacatctggttactgtcctgggaaaatcatttttatagagatggccttccaagtggttttaaaatttactgaagtttttaggtcaattatgtatgttgactaaatttacaaataaacttgtttatcc

SEQ ID NO: 4970 - protein, 136 aa, Rattus norvegicus; identical to SEQ ID NO: 902

SEQ ID NO: 4971 - DNA, 3839 bp, Homo sapiens
  unsure 1178: unknown base
  unsure 3019: unknown base
  unsure 3021: unknown base
gaagaggcaggaagacaagaccatgtcgaagggccccgggcccggcggctccgcagcttcctcggcgcccccggccgctaccgctcaggtgctgcaggcacagcccgagaaaccgcagcactacacgtacctgaaagaattccgcacagagcagtgcccactctttgtgcaacacaaatgcacgcagcatcggccctacacctgcttccactggcacttcgtgaaccagcggcgccgccggtccatccgccgtcgggacggcaccttcaattacagccctgacgtctactgcaccaagtacgacgaggctacaggcctctgcccggagggcgacgagtgcccattcctgcacagaaccacaggggacactgagcgcaggtaccaccttcgttactacaaaactggaatctgcatccacgagacagactcgaaaggcaactgcaccaaaaacggcctgcactgcgcttttgcccacgggccccatgacctccgctcccctgtctacgacatcagggagcttcaggccatggaggccttgcagaatggccagaccacggtagaggggagcatagagggccagtcggctggggctgcgagccatgccatgatagaaaagatcctcagcgaggagcctcggtggcaagagactgcttatgtgctggggaactataagacggagccttgcaagaagcccccgcggctgtgccgccaaggctatgcctgtccctactaccacaacagcaaggaccggcggcggagcccccggaagcacaaatacaggtcgtctccatgtccaaacgtcaagcacggggatgagtggggagaccctggcaagtgtgagaacggagacgcctgccagtactgccacacccgcaccgagcagcagttccaccccgagatctacaagtccaccaagtgcaacgacatgcagcagtcgggcagctgtccccgaggacccttctgcgcctttgcccacgtagaacagccacccctgagtgacgacctgcagccttcctcagctgtgtccagccccacccagccaggtcctgtcctgtacatgccatctgccgccggagactcggtgcctgtgagcccctccagcccgcatgcccctgacctcagtgccctcctctgtagaaacagcagcctaggcagcccgtctaacctctgcggctccnccaccgggctccatcaggaagcccccaaacctggagggcatcgtcttccctggggagtctggcctggcccctggcagctataagaaggctcccggcttcgagagggaagaccaggtgggagccgagtacctgaaaaatttcaaatgccaggccaaattaaaaccccactcattagagcccaggagtcaagagcagcctctgcttcagcccaaacaggacatgctgggcatcctccccgcaggcagccccctgacctcaagcatctcttctagtatcacctccagcctggcagctaccccccctagcccagtgggcaccagcagcgtccccggcatgaatgcaaacgctctgcccttctaccccaccagcgacacggtagagtcagtcatagagtctgctttggatgacctggacctgaatgagtttggcgtggccgccctggagaagactttcgataacagcacagtgccccacccaggaagcatcaccatcggcggcagcttgctgcagagctctgcacccgtgaacatccccggctccttgggcagctctgcctccttccactcagcatccccgtcccctcccgtcagcctctcctcgcatttcctgcagcagccccagggccacctgagtcagtcggaaaacacatttttgggaacctcagcatcacatggatctttgggtctgaacgggatgaacagcagcatctgggagcattttgcctctggaagcttctccccgggcacttcccccgctttcctatcagggccaggggctgccgagctggcccgacttcggcaagagctggatgaagccaacagcaccatcaagcagtgggaggagtcctggaagcaggccaagcaggcttgtgatgcctggaagaaagaggcggaggaggctggtgagcgggccagtgcggcgggcgccgagtgcgagctggcccgggagcagcgggatgcactggaggtgcaggtgaagaagctccaggaggagctggagcggctacacgcggggcctgagccccaggccctgcccgccttctccgacctggaggcgctctcactctccaccctctactccctccagaaacaactgcgggcccacctggaacaagtggacaaggccgtgttccacatgcagtcggtgaaatgccttaagtgtcaggaacagaagcgggcagtgctgccgtgccaacacgctgcgctgtgtgagctctgcgctgagggcagcgagtgccccatctgccagcctggccgggcccacaccctccagtcgtgaccctgcaggcctggcccagcctggcccagatcttctcacctaggactttttaaagtatatatatatatatgaatatatatatatatgtgtatgtatgtatgtatatgtatatgattatgtatatgtatacatttccgtatgtatgtatatgtatacatttccgtatgtgtgcaggtatgcgtggtggtgtggacagtgtctgtgtgtatatctgtacatagatatagacacacactttaaaagacttaccaagcactttttaaaagaagaaactattttgcagtcctcccctacccactccctgcccttcccactgcagagatgacatcccctcttctcccactggccttttggcagagaatctggttctgtctcttttttaatgtaggaactaactatttttaacttcttcctggggcctgagcagggaagggtgggactggaaggcactaaggggaagggagaagccctcagggcaggccctgctccccctacctccttgccagggcaagggtggagtgtggaagacgtgggtcccccagagcaggcctggcccccagctngntgagggcctcagggaggcccgagggggagtgctgggggtctcagctggcttagctcctaagtttaccaaatgttaatttagtcttggggagaacagcaagggctggaggccagtgctgcagggccagccccactcctgacacctgggcccttgaagctccttgaggggcaaggcccaggagttccagccctcaggttcctgagggtccaccctcagtccttccccccgccgcccctccccggactccccacaagagcctccctggccccagggccgcctaccaggctggtactcattctatgaccaccgcccccaaccagctgcccccagctctccctgccccctcccctctctggcagctagcagggcaattggcggggaggagtgcggactgaggactgaggaccaagggggcccaggccctgccctcctacccggaggggctccgtttgcattccttggtgctctctgagtgcagctggtgtcccgccctgttctgggcggacgcctgtgtgcgtgtgtgtgtgcctgtccagtgtatattgtgtcttagcttccattttaaaaattgttctgtacagagagagatgcagcaggggcgggagggcagagtgggcggaggggagcagccgcacccccagcaccgggtgtctgcggtaggaacaagagggctgagagggtctggtcctggcccaggctcccccttgggctcagcacgaaagggctttcaatgaattaagtgaaaactttttccttttttacaaaaatgcaaaaatcaacaaagctccaaacctattggaaataaaatatgaacttgc

SEQ ID NO: 4972 - protein, 412 aa, Homo sapiens
  unsure 386: unknown amino acid
MSKGPGPGGSAASSAPPAATAQVLQAQPEKPQHYTYLKEFRTEQCPLFVQHKCTQHRPYTCFHWHFVNQRRRRSIRRRDGTFNYSPDVYCTKYDEATGLCPEGDECPFLHRTTGDTERRYHLRYYKTGICIHETDSKGNCTKNGLHCAFAHGPHDLRSPVYDIRELQAMEALQNGQTTVEGSIEGQSAGAASHAMIEKILSEEPRWQETAYVLGNYKTEPCKKPPRLCRQGYACPYYHNSKDRRRSPRKHKYRSSPCPNVKHGDEWGDPGKCENGDACQYCHTRTEQQFHPEIYKSTKCNDMQQSGSCPRGPFCAFAHVEQPPLSDDLQPSSAVSSPTQPGPVLYMPSAAGDSVPVSPSSPHAPDLSALLCRNSSLGSPSNLCGSXTGLHQEAPKPGGHRLPWGVWPGPWQL

SEQ ID NO: 4973 - DNA, 1511 bp, Homo sapiens
tgcgttttgagtctcgggacccctgttggagagactatggcgctcaacaagaatcactcggagggcggcggagtgatcgtcaataacaccgagagcatcctaatgtcctatgatcacgtggaactcacattcaatgacatgaagaacgtgccagaagccttcaaagggaccaagaaaggcactgtctaccttaccccttaccgggtcatctttctgtccaagggcaaggatgccatgcagtccttcatgatgccattttatctcatgaaagactgtgagatcaagcagcccgtatttggtgcaaactacatcaagggaacagtgaaggcggaagcgggaggtggctgggaaggctctgcttcctacaagttgactttcacggcagggggcgccattgagttcggacagcggatgctccaggtggcatctcaagcctccagaggtgaagtccccagtggagcctatggctactcttacatgcccagcggggcctatgtctatcccccgccagtcgccaatggaatgtacccctgccctcctggctacccctatccaccgcccccacctgagttctatccaggaccccccatgatggacggggccatgggatacgtgcagcccccaccaccgccctaccctgggcccatggaacctccggtcagcggccccgatgtcccctccactcctgcagccgaagccaaggccgcagaagcagccgccagcgcctattacaacccaggcaatcctcacaacgtctacatgcccacgagccagccgccgccacctccctactacccaccggaagataagaagacccagtaggccctcctgcctccctgcctcccaccctcatctctctaccctacccctcccatcggggctgtgctggggcttggggaggggagggggcgccttgttctccctccaggtctgatcataaacaattaccaggaactagcattgtgggacattagggcccccggcctcgggagaggtgccgcccagcttcccatgccagcccggagcccacagtgctgcccagcgtacctccctcaccgtctggggctcttctgggagcacggagcatcccctgttcctgtttcactctcagcttctcccctcgaagggactctctggccacctcctccaccgcagtccagctccctcagtctggcacccactgctacactcagcctcatgagccacttcagaccagccagaaggagcttcctgactggaaccagagaatgcatgtctgtccacttggtggctgctgggtggggccgggaacaagggcccctgaccctgtgtgctggccgggacctgccaccagccccccagcctgcttcttccccttaagctttgtgcccctggatgcgctaacattcactcttgtttgtccctggactggccatgaagtgaggagatggttatttaaagagaattccctatttatttgacaaaaaatccagttaatatattaatgtgaaataaaccctgtttgcacctcg

SEQ ID NO: 4974 - protein, 261 aa, Homo sapiens
MALNKNHSEGGGVIVNNTESILMSYDHVELTFNDMKNVPEAFKGTKKGTVYLTPYRVIFLSKGKDAMQSFMMPFYLMKDCEIKQPVFGANYIKGTVKAEAGGGWEGSASYKLTFTAGGAIEFGQRMLQVASQASRGEVPSGAYGYSYMPSGAYVYPPPVANGMYPCPPGYPYPPPPPEFYPGPPMMDGAMGYVQPPPPPYPGPMEPPVSGPDVPSTPAAEAKAAEAAASAYYNPGNPHNVYMPTSQPPPPPYYPPEDKKTQ

SEQ ID NO: 4975 - DNA, 1728 bp, Homo sapiens
ggtgcgcaagggcacggacctcggagctctccccgttcccccgccggccatgaacgccgctcgcaccggctaccgagtcttcctcgccaactccacggccgcctgcacggagctggccaagcgcatcacagagcgccttggtgctgaattggggaagtctgttgtatatcaagagaccaatggagaaacaagagttgaaataaaagaatttgttcgtggccaagatattttcattatacagacaatacccagagatgtgaatacagctgtgatggagttgctcatcatggcttacgcactgaagactgcctgtgccaggaacattattggggtcatcccctacttcccctacagcaagcagagcaagatgaggaagaggggttccattgtgtgcaagctgctagcatccatgctggcgaaagcaggtttaactcacattatcactatggatcttcatcaaaaggaaatacaaggctttttcagctttcctgtggacaaccttagagcctcacctttcctgcttcagtatatccaggaagaaattccaaattacagaaatgcagtcattgtagctaagtctcctgatgctgcaaagagggcccagtcctatgcggagagactgcgtctgggtttggccgtcattcacggggaagctcagtgcacggaactggacatggacgatggtcgtcactccccgcctatggtcaaaaatgctactgtgcacccaggcctggagttgccattgatgatggccaaagagaagccaccgataactgtagttggagatgttggaggccgcatcgcaatcatcgtggatgacattattgacgatgtggagagttttgttgctgccgcggagatcctgaaagagagaggcgcctataagatctatgttatggccacccacggcatcctgtctgcagaggcccctcgcctgattgaggagtcctccgtagacgaggtggtggtgacgaatactgtccctcatgaggttcagaagctgcaatgtcccaagataaagactgtggatatcagtttgattctttctgaagccattcggagaatccacaatggagagtccatggcctaccttttccgaaacatcactgtggatgactagctttcacgagggtctcgaccctggacctcctgagggaaacatggaaaaagcagtgccatgagtgatacagtgtttccttgcaagggaggactcgaaacagcctggagttagatatcttcttttgcccggattgatggggaggagggattaaaagagtcaggaagaagacagagctaatggataaatatcataacatggccttacatgtctgctgtcatcagccctgttccttaaaagttctagctgctttcttaaaaataatctgaaaatcttattgatactaaagaggagttaaaggcacataaagtcttaactctataatgttcatttagttgtttcagctccagggaaatggaggtattgatgttgaacctggttagggaagctgagcgcctgtggccctattactatccagttggcctctcccaaatcaacttcaagtcttttatagagaatcgtatttttctttcagaaattgctatgcctacagccattgaaaaatgaagcattcatgttgttacatcttccaaggatgtcagattagaaaatagcatcccacctctgggtatctgagtggctctgaagttgcaaataaaataatttgttgt

SEQ ID NO: 4976 - protein, 356 aa, Homo sapiens
MNAARTGYRVFLANSTAACTELAKRITERLGAELGKSVVYQETNGETRVEIKEFVRGQDIFIIQTIPRDVNTAVMELLIMAYALKTACARNIIGVIPYFPYSKQSKMRKRGSIVCKLLASMLAKAGLTHIITMDLHQKEIQGFFSFPVDNLRASPFLLQYIQEEIPNYRNAVIVAKSPDAAKRAQSYAERLRLGLAVIHGEAQCTELDMDDGRHSPPMVKNATVHPGLELPLMMAKEKPPITVVGDVGGRIAIIVDDIIDDVESFVAAAEILKERGAYKIYVMATHGILSAEAPRLIEESSVDEVVVTNTVPHEVQKLQCPKIKTVDISLILSEAIRRIHNGESMAYLFRNITVDD

SEQ ID NO: 4977 - DNA, 5351 bp, Homo sapiens
  unsure 2416: unknown base
  unsure 2418: unknown base
  unsure 3920: unknown base
cgcctccccgcgcctcgttcgccgccgctgtcgccgccgccgcccgagactcgcgcagagcagttatggcggatcccgcagcccccacgcccgcagctcccgctccagcccaggccccggctccagccccggaggcagtcccggccccagccgcagcccccgtcccggcgccggcgcccgcctcggactcggcctccgggccgtcctcggactccggcccagaagccggctcgcagcgcctgctgttttctcacgacctggtgtcgggccgttaccgtggctccgtgcacttcgggctggtgcgcctcatccacggcgaggactcggactcggagggcgaggaggagggccgcgggagctcggggtgctccgaggccgggggcgcgggccacgaggagggccgggccagccccctgcgccgcggctacgtgcgcgtccagtggtacccggagggcgtcaagcagcatgtgaaggagaccaagctgaaactagaggaccgttctgtggtgccccgagatgtggtccggcacatgcgatccaccgacagtcagtgtggcacggtgatcgacgtcaacatcgactgtgccgtcaagctcatcggcaccaactgcatcatctatcccgtcaacagcaaggacctgcagcacatctggcccttcatgtatggggactacattgcctatgactgctggctggggaaggtctacgacttgaagaaccagatcatcctgaagctatccaacggcgccaggtgctccatgaacacggaagatggcgccaagctctacgacgtctgcccgcacgtcagcgactcgggtctcttcttcgatgattcctatggcttctacccaggccaggtgctcattggccctgccaagatcttctccagcgtccagtggctgtcaggtgtcaagcccgtgctcagcaccaagagcaagttccgagtggtggtggaagaggtgcaggttgtagagttgaaagttacatggattaccaagagtttctgtccagggggcacggacagcgtcagccccccaccctctgtcatcacccaggaaaacctaggcagggtgaagcgtctcggatgctttgaccatgctcagcggcagcttggggagcgctgtctgtatgtcttcccagccaaggtagagccagccaagattgcctgggaatgtccagaaaaaaactgcgcccagggggagggctctatggccaagaaggtgaagcgcctgttgaagaagcaggttgtgcggatcatgtcatgctccccagacacccagtgttcccgggaccattccatggaagacccagacaagaagggggaatccaaaaccaagagcgaagcggagtctgccagccctgaggagacgcccgatgctctgccagtccagtggagatgcaggacgagggtgcagaggagccccacgaggcaggagagcagctgcccccattcctgctaaaagaaggcagagatgacaggctgcactcggcagagcaggacgcagatgatgaggctgctgatgacacggacgacaccagttcggtgacctcctctgccagctccaccacttcctcccagagcggcagcggcacgagtcgcaaaaagagcatccccttgtccatcaagaacttaaagcgcaaacacaagaggaagaagaataaaatcactcgagacttcaagccaggggacagggtggcagtggaggtggtgaccacgatgacctcagccgacgtgatgtggcaggatggctccgtggaatgcaacatccgctccaacgacctcttccctggcaccacctgacaacaacgagttctgccctggagacttcgtggtagataagcgagtccagagctgtccagaccctgctgtctacggtgtggtacagtctggggaccacatcggccgtacctgcatggtgaagtggttcaagctgaggccgagtggggacgacgtggagctgattggagaagaggaagatgtgagtgtttacgacattgctgaccaccctgactttaggttccgtacaactgacatcgtcatccgcatcggcaatactgaggatggggctcctcacaaggaggatgagcagccatcggtgggccaggtggcccgtgtggacgtcagcagcaaggtggaggtggtgtgggctgacaactcaaagaccatcatcctgccccagcacttgtacaacatagagtctgagattgaggagtcagactacgattcggtagaaggcagcaccagcgggcatcctcggatgaatgggaagatgatagtgacagctgggagacggacaatgggctggtggaggacgagcaccccaagatagaggagccccccatcccacccctggagcagccggtggccctgaggacaagggagtggtgatcagtgaagaggcagccacagccgtancnctagggggctgtggccatggctgcccccatggccgggctgatggagaaggctggcaaggacgggccacccaagagcttccgggagttgaaagaggccatcaagatcctggagagcctcaagaacatgactgtggagcagctgctgacgggctcgcccacctctccgactgtggagcctgagaagccaactcgggagaagaagtttctggatgacatcaagaagctacaggaaaacctcaagaagaccctggacaatgtggccattgtagaggaggagaagatggaagcagtgcccgacgtagagcgcaaggaggacaagcccgagggcgagtcacctgtgaaggctgagtggcccagcgaaaccccggtgctgtgccagcagtgtggcggcaagctggcgtcaccttcaccagcgccaagggcgaggtcttctccgtactggagtttgcaccctcaaatcattcttttaagaaaattgagttccagcctccagaagccaagaagttcttcagcacagtgcggaaggagatggcgctgctggctacctcactgcctgagggcatcatggtcaagacttttgaagatagaatggacctcttctcagctctcatcaagggccccactcgaaccccctacgaggatggcctctacttgtttgacatccagctccccaacatctacccagccgtgcccccccacttctgctacctctcccaatgcagtggccgcctgaaccccaacctgtatgacaatgggaaggtgtgtgtcagcctcctgggcacctggattggaaaggggacagagaggtggacaagcaagtccagccttctccaggtgctcatctccatccaaggtctgatcctggtaaatgaaccatactacaacgaagccggcttcgacagtgaccgaggcctgcaggaaggctatgaaaacagtcgctgttacaatgagatggcgctgatccgcgtggtgcagtccatgacccagctggtgcggcggccccccgaggactttgagcaggagatcaggcaacactttagcactggtggctggcggctggtgaaccgtatcgagtcctggctggaaacccatgccctgctggagaaggcccaggcactgcccaacggggtgcccaaggccagcagctcgccagacgccccagctgtagccgagctgtcagactccggccaacaagaacctgaggatggagggccagccccaggagaggcctcccagggctcagactcagagggcggtgccagggcctggcctcagctagcagggaccacacagaccagacttcggagaccgcaccagacgcatcggtgccacccagtgtgaaaccaaagaagcggagaaagagctaccggagcttcttacctgagaagagtggctaccctgacatcggcttccccctcttcccactttccaagggtttcatcaagagcatccggggtgtctgacgcagttccgggctgccctgctagaggcaggcatgcggnagtgcacagaggacaagtagctgccaggcacagaggaaagagcatcaccgtgggagaggccagccgccgcctgctcactcccccccggaatcacccctcttcccatgcccctctgtccccactgcaaacccactgccctcttctccccaaggtgagtttgatgctgaagtgcaagaagtgtgttgagatgctgccgtttctattttgaagcgagctttcaacaggcgggtcccctgtggcaaagaaaatcggaaccctgttgccgattttccatttgtcaccccagcagaatgtccggcacttgctcccttgctgccccttctcaggtcagaggcgggtgttccagggcctgccgcggggctctctgggccggttccctgcagacccgcagacgagcacatgtgccttgcatgaagtgtgggttgcgccaacaattcccctggtccctttcaacctgtttagttcaactcaagcctccctgtgtcccagaccctcctgctgccaccaccacccaggtcctccctagtcctccagcgtcaacactatcccttggggagttgtagctgctgtcactgactcccggctatacatggcctgtcgaccacgttatagccctcaggcctgttgaacttgctctctaagagaggttgggaccaggctaggttccgggtgacgcccaggagaggtggtggccttcacacatgcacatggagttgaggaccagggagctgcagggaaagcaacagctataggtgccttgctcttctgtcggaggctgctgggggcaagagcagctgcacaaggccagggcaagtgctagggcccctcccccatcacatggtcacactgggacaggcgtgcagctcactgaactccaagcgagccagccctctcttggactagaaggcctactgtcagcccttcgcttacaaactgcaggctcaatccgaaggggacggccggcgggggctctcctagtgcccagagacaggcccagaggtttacaagttttctaagcttttgataatgtgaagctccaggccgagaggatgctgttgagcacattgcagctatgtaatttttggtgtatgtatgtaatatttaaggttggaaaaaaaactcaaaagcaaagatattaactcttattagaaaaaaagacaaaaaaaaagccaaagcatgatgcgtcttgtcagccttaagtgggctccacacctgtgctgtgctgtgaccgcccagccagcagagctgcgggaggatggagccggaccacacaccgtggcatttggaaccgagtcggtatcttgtttgagaaacacccggagtgactggtggggctgtgcttcccagtgcattgtacatgtggagatgtgaatgcctactgcttacgatatctgtataaagtgctgtgtgattaaacttttttttacttgc

SEQ ID NO: 4978 - DNA, 2073 bp, Homo sapiens
caggacgcacatgcagaacatcaaggacatttgggtcagcgtctccttcgtggtgtaccttgtgaagcgcctcaacgagggcagcagcgccatggccaacggcatggaggagaaggagccagaagccccggagatgtagacgccaccctgcccacccccgggatcctgcccccaagtcatttccgtccccccccaggccctcccaccaccccattttattttatatgattttctccatttgtcatcgttccccaccccttcgacatgctgccaggaaacaagggaaggggcctccctccgagtgagtcagtgatgaggccgcggcctccccgaggttgtggggaggctgcactggagccacaggcaggggtgagagcacccactgaattgacatgaccctctgtccccaggcctggctccccgagggctcagaagagcagcttcggtgtgcagatcatccgtctgtgtggggttctcagtgccggaggccttggggtgggggccaggcctcgcacttgcagaggagcccagtgggctgcacgctcccctccatccccatcggccctgtcccctggagtgtgtcagagcccaggggagaatgcagcccaccaggagcacctggaccccctgcccgccacatggtgtggccatcactcagcccctacccctgccctgctcctaagggtagaaaactccagggtcccctgccaccgactgcccagccactccaagccccctggcagctgcccctcctggagcagaaagtgcctttatctcagccatccgcagactgcttggccagatgcggggacaggctggaatgagggaggcgtcttcatctccctgccatccccctctcacgccacccccgcccccaccgggctgcaggtgctgctgatgcgctgggatctgattgaggataaaaaggaaggagagatgacccctaccccctcatcccccagttttgaaaaggtctaagcaagtgagtctggtggaggagctgagggagggagccatggaaggtgccagaaggaaggttggcgggggcacgtgtgggccgtggcttgggctggtcagagtggcgtgagctgcccggcgcctgccctgcccaagtgaccagggaagtgtgtgtgtgtccatgtgtatgcgtgtccgtctgtctgtctagtgtctgggtttggcccaagactgggctgtagttacattaatgcccagccagccacccctgccactcacccttcctggcccaggccttgctgactctctgagctggggaggtgggaggccaggcgagcctgactctgttgatctacccgtgcctgggcccctcccctcagagcccatggtaacgaacccctagaaaggagagaacgggcgtcaggggtgcacagtccacagctgaagagcaaggtttcgtggcagcacggcccggcccctcaccctctgtccccacgaggggacccatgggggctgtctttgcagggcacagatgaccaaagtcccttcctgcttcctgttacctgtcttgctcctggggagaaagaggggcctgatgagactccactcaggtgcacacatcaccaggtgcatctgcaggcaccgggctggctgcttgcagccaggagaaggtcagcgagaaggagtgtatgagtgtgagtgtgtgtgcatggaagttggggcactgggcgtctgactccctccccacccaagagaggaaggacccctcaccacccccactggtgagacagtttactttgccaacttgccatgtttttgccaaaaccaagattttgaaggaaatgagtggccagcgccagggcccaggccatgtggcctgcccagcctcaatgtcacttggtggcggggtggggtgggggtgggcagcagcatcccagccttgagatgcttcactttccttctctgtaaccagactttgaaaaattgttcgtttcatcaggctctgttcctcaatggccttttgctacgtgcctcccgagaaatttgtctttttgtataaatgacaaagtgttgaaaatgtatttcctgaaataaatgtttcaaatgcagaaaccc

SEQ ID NO: 4979 - protein, 569 aa, Homo sapiens
MGSFRTSSALKRSFEVEEVETPNSTPPRRVQTPLLRATVASSTQKFQDLGVKNSEPSARHVDSLSQRSPKASLRRVELSGPKAAEPVSRRTELSIDISSKQVENAGAIGPSRFGLKRAEVLGHKTPEPAPRRTEITIVKPQESAHRRMEPPASKVPEVPTAPATDAAPKRVEIQMPKPAEAPTAPSPAQTLENSEPAPVSQLQSRLEPKPQPPVAEATPRSQEATEAAPSCVGDMADTPRDAGLKQAPASRNEKAPVDFGYVGIDSILEQMRRKAMKQGFEFNIMVVGQSGLGKSTLINTLFKSKISRKSVQPTSEERIPKTIEIKSITHDIEEKGVRMKLTVIDTPGFGDHINNENCWQPIMKFINDQYEKYLQEEVNINRKKRIPDTRVHCCLYFIPATGHSLRPLDIEFMKRLSKVVNIVPVIAKADTLTLEERVHFKQRITADLLSNGIDVYPQKEFDEDSEDRLVNEKFREMIPFAVVGSDHEYQVNGKRILGRKTKWGTIEVENTTHCEFAYLRDLLIRTHMQNIKDITSSIHFEAYRVKRLNEGSSAMANGVEEKEPEAPEM

SEQ ID NO: 4980 - DNA, 1400 bp, Homo sapiens
cagatgtagttttttccgcacgtgcacgccttccctcctccccgccctcagggtccacggccaccatggcatattaggggcagcagtgcctgcggcagcattggcctttgcagcggcggcagcagcaccaggctctgcagcggcaccccccagcggcttaagccatggcgcttcccacggcattcagcagcagcattgctgtaaccgacaaagacaccttcgaattaagcacattactcgattccagcaaagcaccgcaacatgaccgaaatgagcttcctgagcaacgaggtgttggtgggggacttgatgtcccccttcgaccagtcgggtttgggggctgaagaaagcataggtctcttagatgactacgtggaggtggccaagcacttcaaacctcatgggttctccagcgacaaggctaaggcgggctcctccgaatggctgactgtggatgggttggtcagtccctccaacaacagcaaggaggatgccttctctgggacacattggatgttggagaaaatggatttgaaggagttcgactttggtgccctgttgggtatagatgacctggaaaccatgccagatgaccttttgaccacgttggatgacacttgtaatctctttgcccccctagtccaggagactaataaggtgcccccccagatggtgaacccaattggccatctcccagaaagtttaacaaaacccgaccaggttgcccccttcaccttcttgcaacttcttcccctttccccaggggtccagtcctccactccagatcattcctttagtttagagctgggcagtgaagtggatatcactgaagaagataggaagccggactccactgcttacgttgccatgatccctcagtgcataaaggaggaagacaccccttcagataatgatagtggcatctgtatgagcccagagtcctatctggggtctcctcagcatagcccctctaccaggggctctccaaataggagcctcccatctccaggtgttctctgtgggtctgcccaccccaaaccttacgatcctcctggagagaagatggtagcagcaaaagtaaagggtgagaaactggataagaagctgaaaaaaatggagcaaaacaagacagcagccactaggtaccgccagaagaagagggcggagcaggaggctctcactggcgagtgcaaagagctggaaaagaagaacgaggctctaaaagagagggcagattccctggccaaggagatccagtacctgaaagatttgatagaagaggtccgcaaggcaagggggaagaaaagggtcccctagttgagggtaggtcaggagtgtcaacgtgcttgtacatagagtgtctgctgtagctgtgtgttccaataaattattttgtaggg

SEQ ID NO: 4981 - protein, 351 aa, Homo sapiens [sequence omitted]

SEQ ID NO: 4982 - DNA, 1864 bp, Mus musculus
cgctagcctgcggagcccgtccgtgctgttctgcggcaaggcctttcccagtgtccccacgcggaaggcaactgcctgagaggcgcggcgtcgcaccgcccagagctgaggaagccggcgccagttcgcggggctccgggccgccactcagagctatgagctacggccgcccccctcccgatgtggagggtatgacctccctcaaggtggacaacctgacctaccgcacctcgcccgacacgctgaggcgcgtcttcgagaagtacgggcgcgtcggcgacgtgtacatcccgcgggatcgctacaccaaggagtcccgcggcttcgccttcgttcgctttcacgacaagcgcgacgctgaggacgctatggatgccatggacggggccgtgctggacggccgcgagctgcgggtgcaaatggcgcgctacggccgccccccggactcacaccacagccgccggggaccgccaccccgcaggtacgggggcggtggctacggacgccggagccgcagccctaggcggcgtcgccgcagccgatcccggagtcggagccgttccaggtctcgcagccgatctcgctacagccgctcgaagtctcggtcccgcactcgttctcgatctcggtcgacctccaagtccagatccgcacgaaggtccaagtccaagtcctcgtcggtctccagatctcgttcgcggtccaggtcccggtctcggtccaggagtcctcccccagtgtccaagagggaatccaaatccaggtcgcgatcgaagagtccccccaagtctcctgaagaggaaggagcggtgtcctcttaagaaaatgatgtatcggcaagcagtgtaaacggaggacttggggaaaaaggaccacatagtccatcgaagaagagtccttggaacaagcaactggctattgaaaaggttattttgtaacatttgtctaactttttacttgtttaagctttgcctcagttggcaaacttcattttatgtgccattttgttgctgttattcaaatttcttgtaatttagtgaggtgaacgacttcagatttcattattggatttggatatttgaggtaaaatttcattttgttatatagtgctgactttttttgtttgaaattaaacagattggtaacctaatttgtggcctcctgacttttaaggaaaacgtgtgcagccattacacacagcctaaagctgtcaagagattgactcggcattgccttcattccttaaaattaaaaacctacaaaagttggtgtaaatttgtatatgttatttaccttcagatctaaatggtaatctgaacccaaatttgtataaagacttttcaggtgaaaagacttgattttttgaaaggattgtttatcaaacacaattctaatctcttctcttatgtatttttgtgcactaggcgcagttgtgtagcagttgagtaatgctggttagctgttaaggtggcgtgttgcagtgcagagtgcttggctgtttcctgttttctcccgattgctcctgtgtaaagatgccttgtcgtgcagaaacaaatggctgtccagtttattaaaatgcctgacaactgcacttccagtcacccgggccttgcatataaataacggagcatacagtgagcacatctagctgatgataaatacacctttttttccctcttccccctaaaaatggtaaatctgatcatatctacatgtatgaacttaacatggaaaatgttaaggaagcaaatggttgtaactttgtaagtacttataacatggtgtatctttttgcttatgaatattctgtattataaccattgtttctgtagtttaattaaaacattttcttggtgttagcttt

SEQ ID NO: 4983 - protein, 221 aa, Mus musculus
MSYGRPPPDVEGMTSLKVDNLTYRTSPDTLRRVFEKYGRVGDVYIPRDRYTKESRGFAFVRFHDKRDAEDAMDAMDGAVLDGRELRVQMARYGRPPDSHHSRRGPPPRRYGGGGYGRRSRSPRRRRRSRSRSRSRSRSRSRSRYSRSKSRSRTRSRSRSTSKSRSARRSKSKSSSVSRSRSRSRSRSRSRSPPPVSKRESKSRSRSKSPPKSPEEEGAVSS

SEQ ID NO: 4984 - DNA, 2141 bp, Homo sapiens
  unsure 221: unknown base
  unsure 224: unknown base
  unsure 389: unknown base
  unsure 391: unknown base
  unsure 393: unknown base
  unsure 1309: unknown base
  unsure 1311: unknown base
  unsure 1638: unknown base
  unsure 1640: unknown base
  unsure 1643: unknown base
  unsure 1645: unknown base
  unsure 1647: unknown base
  unsure 1812: unknown base
cttggacttggaccttcgtgcggatctggacttggaggtcgaccgagatcgagaacgagtgcgggaccgagacttcgagcggctgtagcgagatcggctgcgagacctggaacggctccgactccgggatcggctgcggcgacgccgcctagggctgcgggcgggacgagcaagcacagcggggttaattccaggcagcggggccggccccgcccgcgcgnctncccgcccaggccgccattatctcgccgccagacgccatttccccagtcgcgaggcggggtcctccgccccgcgccgcccacaccccggccactcccgggtcgcagacggcggaagctcgcggggtggccggagggtcgcgagacgcggcgtgcacccccgccccngntnccgggcccgcaccacgtgcttcgccgcggacctttgtgaggtcgcccgggcctcccgcgcgccccgccccgcctcccgcggtcccctcagccccgtttacctgcggctccggcgtccgtagccaccgcccccgtacctgcggggtggcggtccccggcggctgtggtgtgagtccggggggcggccgtagcgcgccatttgcacccgcagctcgcggccgtccagcacggccccgtccatggcatccatagcgtcctcagcgtcgcgcttgtcgtgaaagcgaacgaaggcgaagccgcgggactccttggtgtagcgatcccgcgggatgtacacgtcgccgacgcgcccgtacttctcgaagacgcgcctcagcgtgtcgggcgaggtgcggtaggtcaggttgtccaccttgagggaggtcataccctccacatcgggaggggggcggccgtagctcatagctctgagtggcggcccggagccccgcgaactggcgccggcttcctcagctctgggcggtgcgacgccgcgcctctcaggcagttgccttccgcgtggggacactgggaaaggccttgccgcagaacagcacggacgggctccgcaggctagcgcacctgagtaacaactgggcgggcagccggcctctgcgcccgtttatatcgctcctcacaaaatggcgcccgcgccacccggaaatgaaaccttctgattggcccaccgcgccccgcttcgtaacgaccctgccgcgcgccccgcccctacccgaagcgcctgcgcacagcccggcgggcgggccaaaaagcgcggagtcacggctggagggagggggagcggaattagcgggcagttggaaagcccgcgaaacgctttttccgcctgggaggccggacgatcgcgattgggcaggagngnaagaggaggtgctccccatctgggcccccacctttttttcatgccaatactccaagttcacgccccttttttgctcagccgtcagccccgtctccgtctgaagagtgcttctgccctcatttgcctctccctgtgaccccggccccctcagactccgctgcgtcgtctctcggccccgtccagccgttcctgactgctcttcgccggagtccgcttcccaaccccctttcgccagagcccgagagctccgtcggctctgcgtcctggcggtggggactccccgccgagcgcttgcgcgtgccaggtcacccgggactacgtttcccnangcngngngccgagcggccggcgccgcggctgcggtcaggtgacccggtcgcctggccgcagtgagtcaggctgggagggcggggccgcgccggctgctgcggctggcacttggccctttaatccccttcgtgggcccctcaacctggagcggataaattcttggcgcttctnccgggggttgtgctcttccgtactcggatcgcttcttaggagtatcctaactgccggtggggagaacttcgccctaaacctggggttccgatccaggaactggaagttgacagcttggctgcctggctcctacatctgccttctccactcaccatctcatttctttctccaggattgtcagtggcttcgccccgaggagagctgactgccctgggctgctgcctccggcagagctgagccaaaatgtccccggaatctaaaaagcttttcaacatcattattttaggagttgcctttatgtttatgttcactgcctttcaaacttgtgg

SEQ ID NO: 4985 - DNA, 1619 bp, Homo sapiens
ccgccagatttgaatcgcgggacccgttggcagaggtggcggcggcggcatgggtgccccgacgttgccccctgcctggcagccctttctcaaggaccaccgcatctctacattcaagaactggcccttcttggagggctgcgcctgcaccccggagcggatggccgaggctggcttcatccactgccccactgagaacgagccagacttggcccagtgtttcttctgcttcaaggagctggaaggctgggagccagatgacgaccccatagaggaacataaaaagcattcgtccggttgcgctttcctttctgtcaagaagcagtttgaagaattaacccttggtgaatttttgaaactggacagagaaagagccaagaacaaaattgcaaaggaaaccaacaataagaagaaagaatttgaggaaactgcgaagaaagtgcgccgtgccatcgagcagctggctgccatggattgaggcctctggccggagctgcctggtcccagagtggctgcaccacttccagggtttattccctggtgccaccagccttcctgtgggccccttagcaatgtcttaggaaaggagatcaacattttcaaattagatgtttcaactgtgctcctgttttgtcttgaaagtggcaccagaggtgcttctgcctgtgcagcgggtgctgctggtaacagtggctgcttctctctctctctctcttttttgggggctcatttttgctgttttgattcccgggcttaccaggtgagaagtgagggaggaagaaggcagtgtcccttttgctagagctgacagctttgttcgcgtgggcagagccttccacagtgaatgtgtctggacctcatgttgttgaggctgtcacagtcctgagtgtggacttggcaggtgcctgttgaatctgagctgcaggttccttatctgtcacacctgtgcctcctcagaggacagtttttttgttgttgtgtttttttgttttttttttttggtagatgcatgacttgtgtgtgatgagagaatggagacagagtccctggctcctctactgtttaacaacatggctttcttattttgtttgaattgttaattcacagaatagcacaaactacaattaaaactaagcacaaagccattctaagtcattggggaaacggggtgaacttcaggtggatgaggagacagaatagagtgataggaagcgtctggcagatactccttttgccactgctgtgtgattagacaggcccagtgagccgcggggcacatgctggccgctcctccctcagaaaaaggcagtggcctaaatcctttttaaatgacttggctcgatgctgtgggggactggctgggctgctgcaggccgtgtgtctgtcagcccaaccttcacatctgtcacgttctccacacgggggagagacgcagtccgcccaggtccccgctttctttggaggcagcagctcccgcagggctgaagtctggcgtaagatgatggatttgattcgccctcctccctgtcatagagctgcagggtggattgttacagcttcgctggaaacctctggaggtcatctcggctgttcctgagaaataaaaagcctgtcatttc

SEQ ID NO: 4986 - protein, 142 aa, Homo sapiens
MGAPTLPPAWQPFLKDHRISTFKNWPFLEGCACTPERMAEAGFIHCPTENEPDLAQCFFCFKELEGWEPDDDPIEEHKKHSSGCAFLSVKKQFEELTLGEFLKLDRERAKNKIAKETNNKKKEFEETAKKVRRAIEQLAAMD

SEQ ID NO: 4987 - DNA, 879 bp, Homo sapiens
  unsure 385: unknown base
  unsure 542: unknown base
  unsure 558: unknown base
  unsure 560: unknown base
  unsure 567: unknown base
  unsure 688: unknown base
  unsure 840: unknown base
gcggcggcggcagcggcggcgacggcgacatggagagcggggcctacggcgcggccaaggcgggcggctccttcgacctgcggcgcttcctgacgcagccgcaggtggtggcgcgcgccgtgtgcttggtcttcgccttgatcgtgttctcctgcatctatggtgagggctacagcaatgcccacgagtctaagcagatgtactgcgtgttcaaccgcaacgaggatgcctgccgctatggcagtgccatcggggtgctggccttcctggcctcggccttcttcttggtggtcgacgcgtatttcccccagatcagcaacgccactgaccgcaagtacctggtcattggtgacctgctcttctcagctctctggaccttcctgtnggtttgttggtttctgcttcctcaccaaccagtgggcagtcaccaacccgaaggacgtgctggtgggggccgactctgtgagggcagccatcaccttcagcttcttttccatcttctcctgggtaggatggccaggggccggttcttgggtcaaggngtgtggaagggggggnancccccancccacctgtaccctgctgtgctccccctgcagggtgtgctggcctccctggcctaccagcgctacaaggctggcgtggacgacttcatccagaattacgttgaccccactccggaccccanacactgcctacgcctcctacccaggtgcatctgtggacaactaccaacagccacccttcacccagaacgcggagaccaccgagggctaccagccgccccctgtgtactgagcggcggttagcgtgggaagggggacagagagggccctcccnctctgccctggactttcccatgagcctcctggaactgcc

SEQ ID NO: 4988 - DNA, 1426 bp, Homo sapiens
  unsure 192: unknown base
  unsure 249: unknown base
  unsure 688: unknown base
  unsure 864: unknown base
  unsure 889: unknown base
  unsure 1297: unknown base
cttactgcgggacggccttggagagtactcgggttcgtgaacttcccggaggcgcaatgagctgcattaacctgcccactgtgctgcctggctcccccagcaagacccgggggcagatccaggtgattctcgggccgatgttctcaggaaaaagcacagagttgatgagacgcgtccgtcgcttccagattngctcagtacaagtgcctggtgatcaagtatgccaaagacactcgctacagcagcagncttctgcacacatgaccggaacaccatggaggcactgcccgcctgcctgctccgagacgtggcccaggaggccctgggcgtggctgtcataggcatcgacgaggggcagtttttccctgacatcgtggagttctgcgaggccatggccaacgccgggaagaccgtaattgtggctgcactggatgggaccttccagaggaagccatttggggccatcctgaacctggtgccgctggccgagagcgtggtgaagctgacggcggtgtgcatggagtgcttccgggaagccgcctataccaagaggctcggcacagagaaggaggtcgaggtgattgggggagcagacaagtaccactccgtgtgtcggctctgctacttcaagaaggcctcaggccagcctgccgggccggacaacaaagagaactgcccagtgccaggnaaagccaggggaagccgtggctgccaggaagctctttgccccacagcagattctgcaatgcagccctgccaactgagggacctgcgagggccgcccgctcccttcctgccactgccgcctactggacgctgccctgcatgctgcccagccactccaggaggaagtcgggaggcgtnggagggtgaccacaccttggccttnctgggaactctcctttgtgtggctgccccacctgccgcatgctccctcctctcctacccactggtctgcttaaagcttccctctcagctgctgggacgatcgcccaggctggagctggccccgcttggtggcctgggatctggcacactccctctccttggggtgagggacagagccccacgctgttgacatcagcctgcttcttcccctctgcggctttcactgctgagtttctgttctccctgggaagcctgtgccagcacctttgagccttggcccacactgaggcttaggcctctctgcctgggatgggctcccaccctcccctgaggatggcctggattcacgccctcttgtttccttttgggctcaaagcccttcctacctctggtgatggtttccacaggnaacaacagcatctttcaccaagatgggtggcaccaaccttgctgggacttggatcccaggggcttatctcttcaagtgtggagagggcagggtccacgcctctgctgtagcttatgaaattaactaatt

SEQ ID NO: 4989 - DNA, 2258 bp, Homo sapiens
aatcgaaagtagactcttttctgaagcatttcctgggatcagcctgaccacgctccatactgggagaggcttctgggtcaaaggaccagtctgcagagggatcctgtggctggaagcgaggaggctccacacggccgttgcagctaccgcagccaggatctgggcatccaggcacggccatgacccctccgaggctcttctgggtgtggctgctggttgcaggaacccaaggcgtgaacgatggtgacatgcggctggccgatgggggcgccaccaaccagggccgcgtggagatcttctacagaggccagtggggcactgtgtgtgacaacctgtgggacctgactgatgccagcgtcgtctgccgggccctgggcttcgagaacgccacccaggctctgggcagagctgccttcgggcaaggatcaggccccatcatgctggacgaggtccagtgcacgggaaccgaggcctcactggccgactgcaagtccctgggctggctgaagagcaactgcaggcacgagagagacgctggtgtggtctgcaccaatgaaaccaggagcacccacaccctggacctctccagggagctctcggaggcccttggccagatctttgacagccagcggggctgcgacctgtccatcagcgtgaatgtgcagggcgaggacgccctgggcttctgtggccacacggtcatcctgactgccaacctggaggcccaggccctgtggaaggagccgggcagcaatgtcaccatgagtgtggatgctgagtgtgtgcccatggtcagggaccttctcaggtacttctactcccgaaggattgacatcaccctgtcgtcagtcaagtgcttccacaagctggcctctgcctatggggccaggcagctgcagggctactgcgcaagcctctttgccatcctcctcccccaggacccctcgttccagatgcccctggacctgtatgcctatgcagtggccacaggggacgccctgctggagaagctctgcctacagttcctggcctggaacttcgaggccttgacgcaggccgaggcctggcccagtgtccccacagacctgctccaactgctgctgcccaggagcgacctggcggtgcccagcgagctggccctactgaaggccgtggacacctggagctggggggagcgtgcctcccatgaggaggtggagggcttggtggagaagatccgcttccccatgatgctccctgaggagctctttgagctgcagttcaacctgtccctgtactggagccacgaggccctgttccagaagaagactctgcaggccctggaattccacactgtgcccttccagttgctggcccggtacaaaggcctgaacctcaccgaggatacctacaagccccggatttacacctcgcccacctggagtgcctttgtgacagacagttcctggagtgcacggaagtcacaactggtctatcagtccagacgggggcctttggtcaaatattcttctgattacttccaagccccctctgactacagatactacccctaccagtccttccagactccacaacaccccagcttcctcttccaggacaagagggtgtcctggtccctggtctacctccccaccatccagagctgctggaactacggcttctcctgctcctcggacgagctccctgtcctgggcctcaccaagtctggcggctcagatcgcaccattgcctacgaaaacaaagccctgatgctctgcgaagggctcttcgtggcagacgtcaccgatttcgagggctggaaggctgcgattcccagtgccctggacaccaacagctcgaagagcacctcctccttcccctgcccggcagggcacttcaacggcttccgcacggtcatccgccccttctacctgaccaactcctcaggtgtggactagacggcgtggcccaagggtggtgagaaccggagaaccccaggacgccctcactgcaggctcccctcctcggcttccttcctctctgcaatgaccttcaacaaccggccaccagatgtcgccctactcacctgagcgctcagcttcaagaaattactggaaggcttccactagggtccaccaggagttctcccaccacctcaccagtttccaggtggtaagcaccaggacgccctcgaggttgctctgggatccccccacagcccctggtcagtctgcccttgtcactggtctgaggtcattaaaattacattgaggttccta

SEQ ID NO: 4990 - protein, 444 aa, Homo sapiens
  unsure 436: unknown amino acid
MTPPRLFWVWLLVAGTQGVNDGDMRLADGGATNQGRVEIFYRGQWGTVCDNLWDLTDASVVCRALGFENATQALGRAAFGQGSGPIMLDEVQCTGTEASLADCKSLGWLKSNCRHERDAGVVCTNETRSTHTLDLSRELSEALGQIFDSQRGCDLSISVNVQGEDALGFCGHTVILTANLEAQALWKEPGSNVTMSVDAECVPMVRDLLRYFYSRRIDITLSSVKCFHKLASAYGARQLQGYCASLFAILLPQDPSFQMPLDLYAYAVATGDALLEKLCLQFLAWNFEALTQAEAWPSVPTDLLQLLLPRSDLAVPSELALLKAVDTWSWGERASHEEVEGLVEKIRFPMMLPEELFELQFNLSLYWSHEALFQKKTLQALEFHTVPFQLLARYKGLNLTEDTYKPRIYTSPTWSAFVTDSSWSARKSQLVYQSRXGAFGQIFF

SEQ ID NO: 4991 - DNA, 798 bp, Homo sapiens
gtgcctcccatgaggaggtggagggcttggtggagaagatccgcttccccatgatgctccctgaggagctctttgagctgcagttcaacctgtccctgtactggagccacgaggccctgttccagaagaagactctgcaggccctggaattccacactgtgcccttccagttgctggcccggtacaaaggcctgaacctcaccgaggatacctacaagccacggaagtcacaactggtctatcagtccagacgggggcctttggtcaaatattcttctgattacttccaagccccctctgactacagatactacccctaccagtccttccagactccacaacaccccagcttcctcttccaggacaagagggtgtcctggtccctggtctacctccccaccatccagagctgctggaactacggcttctcctgctcctcggacgagctccctgtcctgggcctcaccaagtctggcggctcagatcgcaccattgcctacgaaaacaaagccctgatgctctgcgaagggctcttcgtggcagacgtcaccgatttcgagggctggaaggctgcgattcccagtgccctggacaccaacagctcgaagagcacctcctccttcccctgcccggcagggcacttcaacggcttccgcacggtcatccgccccttctacctgaccaactcctcaggtgtggactagacggcgtggcccaagggtggtgagaaccggagaaccccaggacgccctcactgcaggctcccctcctcggcttccttcctctctgcaatgacct

SEQ ID NO: 4992 - DNA, 4242 bp, Homo sapiens
tgctccctccaaatccaagtccagcagttcctcctcttcctccacgtcatcctcctcttcctcagatgaagaggatgacagtgacttagatgctaagaggggtccccggggccgcgagacccacccagtgccgcagaagaaggcccagatcctggtggccaaacccgagctgaaggatcccatccggaagaagcggggacgaaagcccctgcccccagagcaaaaggcaacccgaagacccgtgagcctggccaaggtgctgaagaccgcccggaaggatctgggggccccggccagcaagctgccccctccactcagcgcccccgttgcaggcctggcagctctgaaggcccacgccaaggaggcctgtggcggccccagtgccatggccaccccagagaacctggccagcctaatgaagggcatggccagtagccccggccggggtggcatcagctggcagagctccatcgtgcactacatgaaccggatgacccagagccaggcccaggctgccagcaggttggcgctgaaggcccaggccaccaacaagtgcggcctcgggctggacctgaaggtgaggacgcagaaaggggagctgggaatgagccctccaggaagcaaaatcccgaaggcccccagcggtggggctgtggagcagaaagtggggaacacagggggccccccgcacacccatggtgccagcagggtgcctgctgggtgcccaggcccccagccagcacccacccaggagctgagcctccaggtcttggacttgcagagtgtcaagaatggcatgcccggggtgggtctccttgcccgccacgccaccgccaccaagggtgtcccggccaccaacccagcccctgggaagggcactgggagtggcctcattggggccagcggggccaccatgcccaccgacacaagcaaaagtgagaagctggcttccagagcagtggcgccacccacccctgccagcaagagggactgtgtcaagggcagtgctacccccagtgggcaggagagccgcacagcccccggagaagcccgcaaggcggccacactgccagagatgagcgcaggtgaggagagtagcagctcggactccgaccccgactccgcctcgccgcccagcactggacagaacccgtcagtgtccgttcagaccagccaggactggaagcccacccgcagcctcatcgagcacgtatttgtcaccgacgtcactgccaacctcatcaccgtcacagtgaaggagtctcccaccagcgtgggcttcttcaacctgaggcattactgaagccccggcgccaccagctgcgcggtcttactccccttccctgcctatggtgtcgcttggctaagtgactcccagcccaagccccctcaagagtctgggtcgggggaggaggagtgggtggcctccttgatgggcaggcttggaagggacttctcccgcaccccactctgtcccaggacatagggcagggggcctcactgccttgttggtctccaccttgttcctacctctgcaggcctctttgctctcccctcttgcctcaggaaacccggtggcacctgtggctccaggtgactgtcttgaacagagcgggcttcttcatggctgcgttgttgctgagtttgaactgctcctccctggcctgcgtgactgaatcacagctttggtccctgtcttgcaggggctgaggtgtcaggaggggacttctggcccaccttgccttcagccctggagtgggcagagagtattgtggggaggcatggccagtgggactagtgttccctccatctggccacagcttttgggagatggggtgggcaggggtggtcctggctggcattgcctgagccggcagtgatgaagtggggagcttgcccttgacaggtgggggctggctggggccttaatgtgaaaagacagtggcaggcagctggagtagagcgagcccagcagccctaaaaggctgccttcatggccatctagccccagttcagggcagcatccatagcccacaagccagcgtgggtggggcgggggtggtcccacagctgggttccacctgaagagcctccgtgcctcggagcaggagaggcaggctatggctgccaccctccctcctgcctgtgtcccagtgagaactgacctgagtccccttccaaacccagacccacctcctgccccaggcccactgaagcatgttccatttctaaaaagcccagagttcagtgtgtcccaaggaaaacccaaagtggaggtgctcaggtccaggggagtccagtgggcaggacccttggcaggcaagcccctcccttcactcccaggacctaccttctgctagtaaaggactggcttcattctaattatggcccacagactgccccggagacctggaggacagcagtgctggcacttgggtgtccatgggcccgtctgccggctctgcctgtgctgcaagtgttggccgtgggtccagccaacaactccctacgtcctgtgtggggccctgcccaagtggatgaggcattccttgaggagtatcattttccctgacaatccccatcacctttaggggttccctgcttggctcctttccagctgaaaaactagacctgtgccattggggaagctggacaaagtctagggggcccgcctggtagagggtcccgggaagctggatctgtcagcctcggccctgaggcccctgttaactcaagactgtgagctgcctctaggtggtcacgtctgggagctagcttgtatggcttctgaccagtatcaggatttctgttctgagagcagcgtgggcagcaaggcagggcagcccagaggtggcagcggcaggcaatctggtcactaggtctttgtgatgccaaaaataaaagagggtggggtgggtgctttctgttcctctgattggatggagtccgccagcaggcatggggctacattccagtgcctgactatagggaggcactcctgattccatggagcagcccggactttgagaatgggctctggtttgcggggggcaggcgtaccagactgcaagaccccccagtacctcaccgtgccaaataggaagaggtggccttggtgtagccaaatggatctttttaacagtgtgcctttggggagggacccatgtccatggcttcgttgagggccatccatatgccagctgggggccagcccacagtggccatattggctgcagcaggaatggtgcccacctcggcgaattgaagggctaagagtcccagatagctaggccagagctggaagcagacagtaaggggaagagctgctcccacagaagagggagagattccagctcactgcgcagcctgggaggaggcgtggatcctggcacgctgagcctcaggcaccagcctccctgtgctcgacagcaaagtcttgactccttcctgctgagcactgtgctaccttcactgctccaaagccagactaacagctctccaagcccttggggtgactcggcttccaggagctgttggagaaatgaggatgtctgtccctgtctgcctgggcaggccagattcctccccagcagccgggtctctccagaccctgattcggtgcctttctgtttaccagctacttcaatcccaaagtttgaatctgcagataccttactcccagccactttgccttcttactgtgttgtgtgtttttcctggtgcttcaagagcgtgtgcagggcaagtgccgtcactgggaactgcaccagatgctcagacttggttgtcttatgtttaccaataaataaaagtagactttttctatttttatttgctgctatttgtgtgtgtgtttgtgtttgtgtagctaggtatctgcacttctgacgatgcattgttgcttttttcccgaagtcccgcaggaactgtggcaatggtgtgtgtgtgaaatggtgtgttaaccgcgttttgtttgctcctgtattgaataggaagcagtggccagtctgtcttccttagagatgttagcatatttttatatgtatatattttgtaccaaaaaagagtgttccttgttttggttacactcgaaattctgacctagctggagagggctctgggccgagagctttcactaaggggagacttcaggggaggatcaagctttgaaccaaagccaatcactggcttgatttgtgttttttaattaaaaaaaaaatcattcatgtatgccacttctaa

SEQ ID NO: 4993 - protein, 305 aa, Homo sapiens [sequence omitted]

SEQ ID NO: 4994 - DNA, 3847 bp, Homo sapiens
gcgcctgcgcgggaggccgcgtcacgtgacccaccgcggacccgccccgcgacgagctcccgccggtcacgtgacccgcctctgcgcgcccccgggcacgaccccggagtctccgcgggcggccagggcgcgcgtgcgcggaggtgagccgggccggggctgcggggcttccctgagcgcgggccgggtcggtggggcggtcggctgcccgcgcggcctctcagttgggaaagctgaggttgtcgccggggccgcgggtggaggtcggggatgaggcagcaggtaggacagtgacctcggtgacgcgaaggaccccggccacctctaggttctcctcgtccgcccgttgttcagcgagggaggctctgcgcgtgccgcagctgacggggaaactgaggcacggagcgggcctgtaggagctgtccaggccatctccaaccatgggagtgaggcacccgccctgctcccaccggctcctggccgtctgcgccctcgtgtccttggcaaccgctgcactcctggggcacatcctactccatgatttcctgctggttccccgagagctgagtggctcctccccagtcctggaggagactcacccagctcaccagcagggagccagcagaccagggccccgggatgcccaggcacaccccggccgtcccagagcagtgcccacacagtgcgacgtcccccccaacagccgcttcgattgcgcccctgacaaggccatcacccaggaacagtgcgaggcccgcggctgttgctacatccctgcaaagcaggggctgcagggagcccagatggggcagccctggtgcttcttcccacccagctaccccagctacaagctggagaacctgagctcctctgaaatgggctacacggccaccctgacccgtaccacccccaccttcttccccaaggacatcctgaccctgcggctggacgtgatgatggagactgagaaccgcctccacttcacgatcaaagatccagctaacaggcgctacgaggtgcccttggagaccccgcatgtccacagccgggcaccgtccccactctacagcgtggagttctccgaggagcccttcggggtgatcgtgcgccggcagctggacggccgcgtgctgctgaacacgacggtggcgcccctgttctttgcggaccagttccttcagctgtccacctcgctgccctcgcagtatatcacaggcctcgccgagcacctcagtcccctgatgctcagcaccagctggaccaggatcaccctgtggaaccgggaccttgcgcccacgcccggtgcgaacctctacgggtctcaccctttctacctggcgctggaggacggcgggtcggcacacggggtgttcctgctaaacagcaatgccatggatgtggtcctgcagccgagccctgcccttagctggaggtcgacaggtgggatcctggatgtctacatcttcctgggcccagagcccaagagcgtggtgcagcagtacctggacgttgtgggatacccgttcatgccgccatactggggcctgggcttccacctgtgccgctggggctactcctccaccgctatcacccgccaggtggtggagaacatgaccagggcccacttccccctggacgtccagtggaacgacctggactacatggactcccggagggacttcacgttcaacaaggatggcttccgggacttcccggccatggtgcaggagctgcaccagggcggccggcgctacatgatgatcgtggatcctgccatcagcagctcgggccctgccgggagctacaggccctacgacgagggtctgcggaggggggttttcatcaccaacgagaccggccagccgctgattgggaaggtatggcccgggtccactgccttccccgacttcaccaaccccacagccctggcctggtgggaggacatggtggctgagttccatgaccaggtgcccttcgacggcatgtggattgacatgaacgagccttccaacttcatcaggggctctgaggacggctgccccaacaatgagctggagaacccaccctacgtgcctggggtggttggggggaccctccaggcggccaccatctgtgcctccagccaccagtttctctccacacactacaacctgcacaacctctacggcctgaccgaagccatcgcctcccacagggcgctggtgaaggctcgggggacacgcccatttgtgatctcccgctcgacctttgctggccacggccgatacgccggccactggacgggggacgtgtggagctcctgggagcagctcgcctcctccgtgccagaaatcctgcagtttaacctgctgggggtgcctctggtcggggccgacgtctgcggcttcctgggcaacacctcagaggagctgtgtgtgcgctggacccagctgggggccttctaccccttcatgcggaaccacaacagcctgctcagtctgccccaggagccgtacagcttcagcgagccggcccagcaggccatgaggaaggccctcaccctgcgctacgcactcctcccccacctctacacactgttccaccaggcccacgtcgcgggggagaccgtggcccggcccctcttcctggagttccccaaggactctagcacctggactgtggaccaccagctcctgtggggggaggccctgctcatcaccccagtgctccaggccgggaaggccgaagtgactggctacttccccttgggcacatggtacgacctgcagacggtgccagtagaggcccttggcagcctcccacccccacctgcagctccccgtgagccagccatccacagcgaggggcagtgggtgacgctgccggcccccctggacaccatcaacgtccacctccgggctgggtacatcatccccctgcagggccctggcctcacaaccacagagtcccgccagcagcccatggccctggctgtggccctgaccaagggtggggaggcccgaggggagctgttctgggacgatggagagagcctggaagtgctggagcgaggggcctacacacaggtcatcttcctggccaggaataacacgatcgtgaatgagctggtacgtgtgaccagtgagggagctggcctgcagctgcagaaggtgactgtcctgggcgtggccacggcgccccagcaggtcctctccaacggtgtccctgtctccaacttcacctacagccccgacaccaaggtcctggacatctgtgtctcgctgttgatgggagagcagtttctcgtcagctggtgttagccgggcggagtgtgttagtctctccagagggaggctggttccccagggaagcagagcctgtgtgcgggcagcagctgtgtgcgggcctgggggttgcatgtgtcacctggagctgggcactaaccattccaagccgccgcatcgcttgtttccacctcctgggccggggctctggcccccaacgtgtctaggagagctttctccctagatcgcactgtgggccggggccctggagggctgctctgtgttaataagattgtaaggtttgccctcctcacctgttgccggcatgcgggtagtattagccacccccctccatctgttcccagcaccggagaagggggtgctcaggtggaggtgtggggtatgcacctgagctcctgcttcgcgcctgctgctctgccccaacgcgaccgctgcccggctgcccagagggctggatgcctgccggtccccgagcaagcctgggaactcaggaaaattcacaggacttgggagattctaaatcttaagtgcaattatttttaataaaaggggcatttggaatc

SEQ ID NO: 4995 - DNA, 1646 bp, Homo sapiens
tcggcagcggcacagcgaggtcggcagcggcacagcgaggtcggcagcggcacagcgaggtcggcagcggcacagcgaggtcggcagcggcagcgaggtcggcagcggcacagcgaggtcggcagcggcagcgaggtcggcagcggcgcgcgctgtgctcttccgcggactctgaatcatggcgaccacggccacgatggcgacctcgggctcggcgcgaaagcggctgctcaaagaggaagacatgactaaagtggaattcgagaccagcgaggaggtggatgtgacccccacgttcgacaccatgggcctgcgggaggacctgctgcggggcatctacgcttacggttttgaaaaaccatcagcaatccagcaacgagcaatcaagcagatcatcaaagggagagatgtcatcgcacagtctcagtccggcacaggaaaaacagccaccttcagtatctcagtcctccagtgtttggatattcaggttcgtgaaactcaagctttgatcttggctcccacaagagagttggctgtgcagatccagaaggggctgcttgctctcggtgactacatgaatgtccagtgccatgcctgcattggaggcaccaatgttggcgaggacatcaggaagctggattacggacagcatgttgtcgcgggcactccagggcgtgtttttgatatgattcgtcgcagaagcctaaggacacgtgctatcaaaatgttggttttggatgaagctgatgaaatgttgaataaaggtttcaaagagcagatttacgatgtatacaggtacctgcctccagccacacaggtggttctcatcagtgccacgctgccacacgagattctggagatgaccaacaagttcatgaccgacccaatccgcatcttggtgaaacgtgatgaattgactctggaaggcatcaagcaatttttcgtggcagtggagagggaagagtggaaatttgacactctgtgtgacctctacgacacactgaccatcactcaggcggtcatcttctgcaacaccaaaagaaaggtggactggctgacggagaaaatgagggaagccaacttcactgtatcctcaatgcatggagacatgccccagaaagagcgggagtccatcatgaaggagttccggtcgggcgccagccgagtgcttatttctacagatgtctgggccagggggttggatgtccctcaggtgtccctcatcattaactatgatctccctaataacagagaattgtacatacacagaattgggagatcaggtcgatacggccggaagggtgtggccattaactttgtaaagaatgacgacatccgcatcctcagagatatcgagcagtactattccactcagattgatgagatgccgatgaacgttgctgatcttatctgaagcagcagatcagtgggatgagggagactgttcacctgctgtgtactcctgtttggaagtatttagatccagattctacttaatggggtttatatggactttcttctcataaatggcctgccgtctcccttcctttgaagaggatatggggattctgctctcttttcttatttacatgtaaataatacattgttctaagtctttttcattaaaaatttaaaacttttcccat

SEQ ID NO: 4996 - DNA, 3670 bp, Homo sapiens
gacgggctggggaggtggtgccaggctggttgctagctgccgccgctgctcaccccggccgtccggccgcttcattgtcaccgggcctcggggcagtgttgggggtggcggggcgccaggtcgccgacccgaggtttgggcgcgactggttccgcatcccctccccgccggccgaatctgcaggccccgcgcgccaggcaggcttcgcggctgcgcccccggcccgcgcaggacctgccttgtccaccatgaaaggcacccgggccatcggcagcgtcccggagcgcacgccagcaggtgtggacctgagtctgacaggtctccctccgcctgtgtcccggcgtcctggcagtgcgccaccaccaagcccatcgtccgctctgtctccgtggtcacaggcagcgagcagaagaggaaggtgctggaggccacagggcctgggggctcccaggccatcaacaaccttaggagatccaacagcaccacgcaggtcagccagcctcggagcggctcccccaggccaacggagcccacagacttcctgatgctcttcgagggcagccccagtgggaaaaagaggcctgccagcctgagcacagcccccagcgagaagggagccacctggaacgtcctggatgaccagccccggggcttcaccttgccatccaatgcccggagttccagtgcccttgactcaccagcgggcccgcggaggaaagaatgcaccgtggccctggcccccaacttcactgctaacaacaggagcaacaagggagcagtgggcaactgcgtcaccaccatggtgcacaaccgctacaccccctcggagagggcgcctccgctcaagagctccaaccagactgccccctccctcaacaacatcatcaaggcagccacctgtgagggcagtgagagcagcggctttgggaagctgccgaagaatgtctccagtgccacccactcagcccggaacaatactgggggcagcacgggcttgcccaggcggaaggaggtgacggaggaggaggctgagaggtttatccaccaggtgaaccaggccactgtcaccatccagcgctggtaccggcaccaggtgcagcggcgcggagcaggagctgcccgcctggagcacttgcttcaggccaagcgggaggagcagcggcagcggtcaggcgaggggaccctcttggacctgcaccagcagaaagaggcagccaggaggaaggcccgggaggagaaggcacgccaagccaggcgagcagccattcaggagctgcaacagaaacgagccctgagagcccagaaggcgagcactgccgagcgtgggccacctgagaatcccagggagaccagagtgccaggaatgcggcagcctgctcaggagctgtcccccacaccaggcggcactgcccaccaggccctcaaggccaacaatactggtggtggcctccctgctgcaggccccggagaccgctgcctgcccacctccgactcatccccagaaccacagcagcctccagaggacaggacgcaggacgttcttgcccaggatgcagctggggacaacctggagatgatggccccgagcagggggagcgccaagtccagggggccactggaggagctgctgcacacactgcagctgctggagaaggagccggacgtgctgccccgccccaggacccatcacaggggcagatacgcctgggccagcgaggtgaccacggaggatgacgccagctctctgacagctgacaacttggagaaatttggaaaactcagtgcgttccccgaacctcctgaggatgggacgctgctatcggaggccaagctacaaagcatcatgagcttcttggacgagatggagaagtctgggcaggaccagctggactcccagcaggaggggtgggtgccggaggcggggccggggcccctggagctggggtccgaggtgagcacgtctgtgatgcggctgaagctggaggtggaggagaagaagcaggccatgctgctgctgcagagagcgctggcgcagcagcgagacctcacggcccggcgggtcaaggagacagagaaggcgctgagccggcagctgcagcggcagagggagcactacgaggccaccatccagcggcacttggccttcattgaccagctgattgaggacaagaaggtcctgagtgaaaagtgcgaggctgtggtggccgagctgaagcaggaggaccagagatgcaccgagcgtgtggcccaggcacaggcgcagcacgagctggagattaaaaaactcaaagaattaatgagcgccaccgagaaagcccgccgggagaagtggatcagtgagaaaaccaagaagatcaaggaggtcactgtccgaggtctggagcccgagatccagaagctgattgcaaggcacaagcaggaagtgcggaggctcaagagcctgcacgaggcggagctgctgcagtcggatgagcgggcctcgcagcgctgcctgcgccaggccgaggagctgcgggagcagctggagcgggagaaggaggcgctgggccagcaggagcgcgaacgtgctcggcagcggttccagcagcacctggagcaggagcagtgggcgctgcagcagcaacggcagcggctgtacagtgaggtggctgaggagagggagcggctgggccagcaggcagccaggcagcgggcggagctggaagagctgaggcagcagctggaggagagcagctctgcactgacccgagccctgagggctgagtttgagaagggcagggaggagcaggagcgccggcaccagatggagctgaataccctgaagcagcagctggagctggagaggcaggcgtgggaggccggccgcaccaggaaggaggaggcgtggctgctgaaccgggaacaggagctgagggaagaaatccggaaaggccgggacaaggagattgagctggtcattcaccggctggaggccgacatggcgctggccaaggaggagagtgagaaggctgccgagagccgcatcaagcgcttacgggacaagtacgaggccgagctctccgagctggagcagtcggagcggaagcttcaggagcggtgctcggagctgaagggccagcttggggaggccgagggcgagaatctgcgtctgcagggccttgtgcggcagaaggagcgggcgctggaggatgcgcaggcggtgaacgagcagctttctagcgagcgcagcaacctggcccaggtgatccgccaggagttcgaggaccggctggcagcctctgaggaggagacgcggcaggccaaggccgagctggccacgctgcaggcccgccagcagctggagctggaggaggtgcaccggagggtgaagacagccctcgcgaggaaggaggaggccgtgagcagcctccggacacaacatgaggctgcggtgaagcgggccgaccacctggaggagctgctggagcagcacaggaggcccacgccaagtaccaagtgaccagggatgccgggaacactgtcgaagaacggaaggcagaggacagaggctggacgtgggcccagaggcccacagggacgcccacctgccccccacagaggctggtggttgagatgcccacggctaagcacctgtggctgcattttaacagtaaaggaggccgttgttttc

SEQ ID NO: 4997 - protein, 1083 aa, Homo sapiens
MKGTRAIGSVPERSPAGVDLSLTGLPPPVSRRPGSAATTKPIVRSVSVVTGSEQKRKVLEATGPGGSQAINNLRRSNSTTQVSQPRSGSPRPTEPTDFLMLFEGSPSGKKRPASLSTAPSEKGATWNVLDDQPRGFTLPSNARSSSALDSPAGPRRKECTVALAPNFTANNRSNKGAVGNCVTTMVHNRYTPSERAPPLKSSNQTAPSLNNIIKAATCEGSESSGFGKLPKNVSSATHSARNNTGGSTGLPRRKEVTEEEAERFIHQVNQATVTIQRWYRHQVQRRGAGAARLEHLLQAKREEQRQRSGEGTLLDLHQQKEAARRKAREEKARQARRAAIQELQQKRALRAQKASTAERGPPENPRETRVPGMRQPAQELSPTPGGTAHQALKANNTGGGLPAAGPGDRCLPTSDSSPEPQQPPEDRTQDVLAQDAAGDNLEMMAPSRGSAKSRGPLEELLHTLQLLEKEPDVLPRPRTHHRGRYAWASEVTTEDDASSLTADNLEKFGKLSAFPEPPEDGTLLSEAKLQSIMSFLDEMEKSGQDQLDSQQEGWVPEAGPGPLELGSEVSTSVMRLKLEVEEKKQAMLLLQRALAQQRDLTARRVKETEKALSRQLQRQREHYEATIQRHLAFIDQLIEDKKVLSEKCEAVVAELKQEDQRCTERVAQAQAQHELEIKKLKELMSATEKARREKWISEKTKKIKEVTVRGLEPEIQKLIARHKQEVRRLKSLHEAELLQSDERASQRCLRQAEELREQLEREKEALGQQERERARQRFQQHLEQEQWALQQQRQRLYSEVAEERERLGQQAARQRAELEELRQQLEESSSALTRALRAEFEKGREEQERRHQMELNTLKQQLELERQAWEAGRTRKEEAWLLNREQELREEIRKGRDKEIELVIHRLEADMALAKEESEKAAESRIKRLRDKYEAELSELEQSERKLQERCSELKGQLGEAEGENLRLQGLVRQKERALEDAQAVNEQLSSERSNLAQVIRQEFEDRLAASEEETRQAKAELATLQARQQLELEEVHRRVKTALARKEEAVSSLRTQHEAAVKRADHLEELLEQHRRPTPSTK

SEQ ID NO: 4998 - DNA, 900 bp, Homo sapiens
caggtgaggcggaaccaaccctcctggccatgggaggggccgtggtggacgagggcccacaggcgtcaaggccctgacggcggctgggcgtgaggcgtgctcttcggctgtttcgtcatcactggcttctcctacgccttccccaaggccgtcagtgtcttcttcaaggagctcatacaggagtttgggatcggctacagcgacacagcctggatctcctccatcctgctggccatgctctacgggacaggtccgctctgcagtgtgtgcgtgaaccgctttggctgccggcccgtcatgcttgtggggggtctctttgcgtcgctgggcatggtggctgcgtccttttgccggagcatcatccaggtctacctcaccactggggtcatcacggggttgggtttggcactcaacttccagccctcgctcatcatgctgaaccgctacttcagcaagcggcgccccatggccaacgggctggcggcagcaggtagccctgtcttcctgtgtgccctgagcccgctggggcagctgctgcaggaccgctacggctggcggggcggcttcctcatcctgggcggcctgctgctcaactgctgcgtgtgtgccgcactcatgaggcccctggtggtcacggcccagccggctcggggcagccgcgaccctcccggcgcctgctagacctgagcgtcttccgggaccgcggctttgtgctttacgccgtggccgcctcggtcatggtgctggggctcttcgtcccgcccgtgttcgtggtgatgacgccaaggacctggcgtgcccgacaccaaggcgccttcctgctcaccatcctgggcttcattgacatacttacgcccgcgcgggcttcgtgcggggcttgggaaggtgcggccctatccg

SEQ ID NO: 4999 - DNA, 1831 bp, Homo sapiens
gcgggcggcggcgctcggagtcgccgggagctgccaggctgctccgcgcgccgctgcggggccatgatccggaacgggcgcggggctgcaggcggcgcagagcagccgggcccggggggcaggcgcgccgtgagggtgtggtgcgatggctgctatgacatggtgcattacggccactccaaccagctgcgccaggcacgggccatgggtgactacctcatcgtaggcgtgcacaccgatgaggagatcgccaagcacaaggggcccccggtgttcactcaggaggagagatacaagatggtgcaggccatcaaatgggtggacgaggtggtgccagcggctccctacgtcactacactagagaccctggacaaatacaactgtgacttctgtgttcacggcaatgacatcaccctgactgtagatggccgggacacctatgaggaagtaaagcaggctgggaggtacagagaatgcaagcgcacgcaaggggtgtccaccacagacctcgtgggccgcatgctgctggtaaccaaagcccatcacagcagccaggagatgtcctctgagtaccgggagtatgcagacagttttggcaagtgccctggtgggcggaacccctggaccggggtatcccagttcctgcagacatctcagaagatcatccagtttgcttctgggaaggagccccagccaggggagacagtcatctatgtggctggtgccttcgacctgttccacatcgggcatgtggacttcctggagaaggtgcacaggctggcagagaggccctacatcatcgcgggcttacactttgaccaggaggtcaatcactacaaggggaagaactaccccatcatgaatctgcatgaacggactctgagcgtgctggcctgccggtacgtgtcagaagtggtgattggagccccgtacgcggtcacagcagagctcctaagtcacttcaaggtggacctggtgtgtcacggcaagacagaaattatccctgacagggatggctccgacccataccaggagcccaagagaaggggcatcttccgtcagattgacagtggcagcaaccatcaccaaagactcatcgtcagcggattatcacaaacagaggcgctaaacgagaagaaggaagccaaggagctcgccttcctggaggtgccaggcagcaggcgcacagccctggggagcgcgatggtacttctaacctggcagagccctgccggccctccccctgctctgcttctgcgccttctgcgtttggacataggactctgcagggccgccctctctaactggcctggctctggaagggctggtgaggactctgcctccttgcctgcctacaaggtgcctggtttgcagcaggctctccgctctttccagcaaagctgctcagagagggtgtccagcacagtggagaggccggaagtgagacgggcagacggcacctgcagcctgaaacgcaccgctcctgcgtgcgcccccacctggtccccggatgcccccaccacctggacagaggccacactgactgcccacccagctgtggcgggaggtgcagagcagagggctttagggagcagtgactgcggtcacccctttagttctctgggtgtagaccacaccacctcccactgggcaccccccaacacggtgtcctgccacccagcgcctggctccaggaaaacacgcttgccttccttcccggcagcttcgccactctccttatggactctgttctgtttgtacatggctgacggaaatctctttggtacaaccgaataaagcctggtggcagtgctgcgcggggctcccagcc

SEQ ID NO: 5000 - DNA, 389 bp, Homo sapiens
tgacctgacctctctcctctcccctcaccctcctgcccctggccactgcaggatcaggaggggagaagaaggagcctctgctgcctcccaggctgctgggactgggctggttttgtccttgaagtggtcaggatacaggacaagggcagccccaccccatccagcctgggctccccgcagacccttgctgctcccgtggcctggacacgctggggagcttctcacacctaccccaggctgaccctgaggtgctgctgctgggtctgtcttggctctggggtgtgctgggagggtcaccaggtcccttttccttcctgtgccctctgaaagctaagtgtctgtgtggctgtggagctcgagggtctgtgaataaaggcggcggcactggg

SEQ ID NO: 5001 - DNA, 541 bp, Homo sapiens
cccctacacaccgtccgttcacccccgtctcttccttctgcttttcggtttttggaaagggatccatctccaggcagcccaccctggtggggcttgtttcctgaaaccatgatgtactttttcatacatgagtctgtccagagtgcttgctaccgtgttcggagtctcgctgcctccctcccgcgggaggtttctcctctttttgaaaattccgtctgtgggatttttagacatttttcgacatcaggggtgtcccccatgcctggaagaggagctggtggctgccagccctggggcccggcacaggcctgggccttccccttccctcaagccagggctcctcctcctgtcgtgggctcattgtgaccactggcctctctacagcacggcctgtggcctgttcaaggcagaaccacgacccttgactcccgggtggggaggtggccaaggatgctggagctgaatcagacgctgacagttcttcaggcatttctatttcacaatcgaattgaacacattggccaaataaagttgaaatttt

SEQ ID NO: 5002 - DNA, 1921 bp, Homo sapiens
ggcacgagggggcggccgacgacgttcgtcatttagtgcgggagggatcctgaaccgcgcggccgaaccctccggtgtcccgacccaggctaagcttgagcatggctgagcaggagcccacagccgagcagctggcccagattgcagcggagaacgaggaggatgagcactcggtcaactacaagcccccggcccagaagagcatccaggagatccaggagctggacaaggacgacgagagcctgcgaaagtacaaggaggccctgctgggccgcgtggccgtttccgcagaccccaacgtccccaacgtcgtggtgactggcctgaccctggtgtgcagctcggccccgggccccctggagctggacctgacgggcgacctggagagcttcaagaagcagtcgtttgtgctgaaggagggtgtggagtaccggataaaaatctctttccgggttaaccgagagatagtgtccggcatgaagtacatccagcatacgtacaggaaaggcgtcaagattgacaagactgactacatggtaggcagctatgggccccgggccgaggagtacgagttcctgacccccgtggaggaggcacccaagggtatgctggcccggggcagctacagcatcaagtcccgcttcacagacgacgacaagaccgaccacctgtcctgggagtggaatctcaccatcaagaaggactggaaggactgagcccagccagaggcgggcagggcagactgacggacggacgacggacaggcggatgtgtcccccccagcccctcccctccccataccaaagtgctgacaggccctccgtgcccctcccaccctggtccgcctccctggcctggctcaaccgagtgcctccgacccccctcctcagccctcccccacccacaggcccagcctcctcggtctcctgtctcgttgctgcttctgcctgtgctgtgggggagagaggccgcagccaggcctctgctgccctttctgtgccccccaggttctatctccccgtcacacccgaggcctggcttcaggagggagcggagcagccattctccaggccccgtggttgcccctggacgtgtgcgtctgctgctccggggtggagctggggtgtgggatgcacggcctcgtgggggccgggccgtcctccagccccgctgctccctggccagcccccttgtcgctgtcggtcccgtctaaccatgatgccttaacatgtggagtgtaccgtggggcctcactagcctctaactccctgtgtctgcatgagcatgtggcctccccgtcccttccccggtggcgaacccagtgacccagggacacgtggggtgtgctgctgctgctccccagcccaccagtgcctggccagcctgcccccttccctggacagggctgtggagatggctccggcggcttggggaaagccaaattgccaaaactcaagtcacctcagtaccatccaggaggctgggtattgtcctgcctctgccttttctgtctcagcgggcagtgcccagagcccacacccccccaagagccctcgatggacagcctcacccaccccacctgggcccagccaggagccccgcctggccatcagtatttattgcctccgtccgtgccgtccctgggccactggcctggcgcctgttcccccaggctctcagtgccaccacccccggcaggccttccctgacccagccaggaacaaacaagggaccaagtgcacacattgctgagagccgtctcctgtgcctcccccgccccatccccggtcttcgtgttgtgtctgccaggctcaggcagaggcgcctgtccctgcttcttttctgaccgggaaataaatgcccctgaaggaaaaaaaaaaaaaaaaaaaaaaaaaaaaaaaaaaaaaaaaaaaaaaaaaaa

SEQ ID NO: 5003 - protein, 204 aa, Homo sapiens
MAEQEPTAEQLAQIAAENEEDEHSVNYKPPAQKSIQEIQELDKDDESLRKYKEALLGRVAVSADPNVPNVVVTGLTLVCSSAPGPLELDLTGDLESFKKQSFVLKEGVEYRIKISFRVNREIVSGMKYIQHTYRKGVKIDKTDYMVGSYGPRAEEYEFLTPVEEAPKGMLARGSYSIKSRFTDDDKTDHLSWEWNLTIKKDWKD

SEQ ID NO: 5004 - DNA, 1791 bp, Homo sapiens
ctccggacagcatgagcgtgggcttcatcggcgctggccagctggcttttgccctggccaaggctttcacagcagcaggcgtcttggctgcccacaagataatggctagctccccagacatggacctggccacagtttctgctctcaggaagatgggggtgaagttgacaccccacaacaaggagacggtgcagcacagtgatgtgctcttcctggctgtgaagccacacatcatccccttcatcctggatgaaataggcgccgacattgaggacagacacattgtggtgtcctgcgcggccggcgtcaccatcagctccattgagaagaagctgtcagcgtttcggccagcccccagggtcatccgctgcatgaccaacactccagtcgtggtgcgggagggggccaccgtgtatgccacaggacgcacgcccaggtggaggacgggaggctcatggagcagctgctgagcagcgtgggcttctgcacggaggtggaagaggacctgattgatgccgtcacggggctcagtggcagcggccccgcctacgcattcacagccctggatgccctggctgatgggggtgtgaagatgggacttccaaggcgcctggcagtccgcctcggggcccaggccctcctgggggctgccaagatgctgctgcactcagaacagcacccaggccagctcaaggacaacgtcagctctcctggtggggccaccatccatgccttgcatgtgctggagagtgggggcttccgctccctgctcatcaacgctgtggaggcctcctgcatccgcacacgggagctgcagtccatggctgaccaggagcaggtgtcaccagccgccatcaagaagaccatcctggacaaggtgaagctggactcccctgcagggaccgctctgtcaccttctggccacaccaagctgctcccccgcagcctggccccagcgggcaaggattgacacgtcctgcctgaccaccatcctgccaccaccttctcttctcttgtcactagggggactagggggtccccaaagtggcccactttctgtggctctgatcagcgcaggggccagccagggacatagccagggaggggccacatcacttcccactggaaatctctgtggtctgcaagtgcttcccagcccagaacaggggtggattccccaacctcaacctcctttcttctctgctcccaaaccatgtcaggaccaccttcctctagagctcgggagcccggagggtcttcacccactcctactccagtatcagctggcacgggctccttcctgagagcaaaggtcaaggaccccctctgtgaaggctcagcagaggtgggatcccacgccccctcccggcccctccctgccctccattcagggagaaacctctccttcccgtgtgagaagggccagagggtccaggcatcccaagtccagcgtgaagggccacagcccctcttggctgccaagcacgcagatcccatggacatttggggaaagggctccttgggctgctggtgaacttctgtggccaccacctcctgctcctgacctccctgggagggtgctatcagttctgtcctggccctttcagttttataagttggtttccagcccccagtgtcctgacttctgtctgccacatgaggagggaggccctgcctgtgtgggagggtggttactgtgggtggaatagtggaggccttcaactgattagacaaggcccgcccacatcttggagggcatctgccttactgattaaaatgtcaatgtaatct

SEQ ID NO: 5005 - protein, 171 aa, Homo sapiens
MEQLLSSVGFCTEVEEDLIDAVTGLSGSGPAYAFTALDALADGGVKMGLPRRLAVRLGAQALLGAAKMLLHSEQHPGQLKDNVSSPGGATIHALHVLESGGFRSLLINAVEASCIRTRELQSMADQEQVSPAAIKKTILDKVKLDSPAGTALSPSGHTKLLPRSLAPAGKD

SEQ ID NO: 5006 - DNA, 848 bp, Homo sapiens
gacatggagctgttcctcgcgggccgccgggtgctggtcaccggggcaggcaaaggtatagggcgcggcacggtccaggcgctgcacgcgacgggcgcgcgggtggtggctgtgagccggactcaggcggatcttgacagccttgtccgcgagtgcccggggatagaacccgtgtgcgtggacctgggtgactgggaggccaccgagcgggcgctgggcagcgtgggccccgtggacctgctggtgaacaacgccgctgtcgccctgctgcagcccttcctggaggtcaccaaggaggcctttgacagatcctttgaggtgaacctgcgtgcggtcatccaggtgtcgcagattgtggccaggggcttaatagcccggggagtcccaggggccatcgtgaatgtctccagccagtgctcccagcgggcagtaactaaccatagcgtctactgctccaccaagggtgccctggacatgctgaccaaggtgatggccctagagctcgggccccacaagatccgagtgaatgcagtaaaccccacagtggtgatgacgtccatgggccaggccacctggagtgacccccacaaggccaagactatgctgaaccgaatcccacttggcaagtttgctgaggtagagcacgtggtgaacgccatcctctttctgctgagtgaccgaagtggcatgaccacgggttccactttgccggtggaagggggcttctgggcctgctgagctccctccacacacctcaagccccatgccgtgctcatcctacccccaatccctccaataaacctgattctgctgcccaaaaaaaaaaaaaaaaaaaaaaaaaaaaaaaa

SEQ ID NO: 5007 - protein, 244 aa, Homo sapiens
MELFLAGRRVLVTGAGKGIGRGTVQALHATGARVVAVSRTQADLDSLVRECPGIEPVCVDLGDWEATERALGSVGPVDLLVNNAAVALLQPFLEVTKEAFDRSFEVNLRAVIQVSQIVARGLIARGVPGAIVNVSSQCSQRAVTNHSVYCSTKGALDMLTKVMALELGPHKIRVNAVNPTVVMTSMGQATWSDPHKAKTMLNRIPLGKFAEVEHVVNAILFLLSDRSGMTTGSTLPVEGGFWAC

SEQ ID NO: 5008 - DNA, 1866 bp, Homo sapiens
tctctgaagttccagaatcgatggaagtggacggcacgccgcggcggggtgggtgcaagatgccgctgccggttcaggtgtttaacttgcagggggccgtggagcccatgcagatcgacgtggacccccaggaagacccgcagaatgcacctgacgtcaactacgtggtggagaaccccagcctggatctggaacagtacgcggccagctacagcggcctgatgcgcatcgaacggctgcagttcattgctgatcactgccccacgctgcgggtggaggccctgaagatggccctctccttcgtgcagagaacctttaacgtggacatgtacgaggagatccaccgcaagctctcagaggccaccagggagctgcagaacgcacccgacgccatccctgagagcggcgtggagcccccagccctggacacggcctgggtggaggccacgcggaagaaggcgctgctgaagctggagaagctggacacagacctgaagaactacaagggcaactccatcaaagagagcatccggcgcggccacgacgacctgggcgaccactacctggactgtggggacctcagcaacgccctcaagtgctattcccgggcccgggactactgcaccagcgccaaacacgtcatcaacatgtgcctcaatgtcatcaaggtcagcgtctacttgcagaattggtctcatgtgctcagctacgtcagcaaggctgagtccaccccagagattgccgagcagcgaggagagcgtgacagccagacccaggccatcctcaccaagctcaagtgtgccgcaggcttggcagagctggccgccaggaagtacaagcaggctgccaagtgcctcctgctggcttcctttgatcactgtgacttccctgagctgctgtcccccagcaacgtggccatctacggtggcctgtgcgccttggctacctttgaccggcaggagctgcagcgcaatgtcatctccagcagctccttcaagttgttcttggagctggagccacaggtccgagacatcatcttcaaattctacgagtccaagtacgcctcatgtctcaagatgctggacgagatgaaggacaacctgctcctggacatgtatctggccccccatgtcaggaccctgtacacccagattcgcaaccgtgccctcatccagtatttcagcccctacgtgtcagccgacatgcataggatggcggcagccttcaataccacggtggccgccctggaggacgagctgacgcagctaatcctggaggggctgatcagtgcccgtgtggactcacacagcaagatcctatacgcccgggacgtggatcagcgcagcaccacctttgagaagtctctgttgatgggcaaggagttccagcgccgcgccaaggccatgatgctgcgggcagctgtgctccgcaaccagatccatgtcaagtccccgcccagagaagggagccagggggagctgactccagccaacagccagtcccggatgagcaccaacatgtgaggggtgaaccttggcctccaggacatctgcaccccctccccacctccacggacctcggacctccaggcggctcagtgctgcctgcggcccagctaaggggcctggccactgggtgccacccagcctgtgtgccctccctggggctgaggaggcaggcggctgctagttgtggcccttcctggaaggagaggcctgcagggctcgaccctgtgggtttctgtccccagggagcagactgtgcggcacccaggcccagtggcaccatttcccagacccctcctgttcccgcctcagtcaggtgcagacaagtgggcggtgtccattaaagagcagactcagcgtt

SEQ ID NO: 5009 - protein, 500 aa, Homo sapiens
MEVDGTPRRGGCKMPLPVQVFNLQGAVEPMQIDVDPQEDPQNAPDVNYVVENPSLDLEQYAASYSGLMRIERLQFIADHCPTLRVEALKMALSFVQRTFNVDMYEEIHRKLSEATRELQNAPDAIPESGVEPPALDTAWVEATRKKALLKLEKLDTDLKNYKGNSIKESIRRGHDDLGDHYLDCGDLSNALKCYSRARDYCTSAKHVINMCLNVIKVSVYLQNWSHVLSYVSKAESTPEIAEQRGERDSQTQAILTKLKCAAGLAELAARKYKQAAKCLLLASFDHCDFPELLSPSNVAIYGGLCALATFDRQELQRNVISSSSFKLFLELEPQVRDIIFKFYESKYASCLKMLDEMKDNLLLDMYLAPHVRTLYTQIRNRALIQYFSPYVSADMHRMAAAFNTTVAALEDELTQLILEGLISARVDSHSKILYARDVDQRSTTFEKSLLMGKEFQRRAKAMMLRAAVLRNQIHVKSPPREGSQGELTPANSQSRMSTNM

SEQ ID NO: 5010 - DNA, 8450 bp, Homo sapiens
acggcagcggccccggcctccctctccgccgcgcttcagcctcccgctccgccgcgctccagcctcgctctccgccgcccgcaccgccgcccgcgccctcaccagagcagccatggaggaggtggtgattgccggcatgtccgggaagctgccagagtcggagaacttgcaggagttctgggacaacctcatcggcggtgtggacatggtcacggacgatgaccgtcgctggaaggcggctctacggcctgccccggcggtccggcaagctgaaggacctgtctaggtttgatgcctccttcttcggagtccaccccaagcaggcacacacgatggaccctcagctgcggctgctgctggaagtcacctatgaagccatcgtggacggaggcatcaacccagattcactccgaggaacacacactggcgtctgggtgggcgtgagcggctctgagacctcggaggccctgagccgagaccccgagacactcgtgggctacagcatggtgggctgccagcgagcgatgatggccaaccggctctccttcttcttcgacttcagagggcccagcatcgcactggacacagcctgctcctccagcctgatggccctgcagaacgcctaccaggccatccacagcgggcagtgccctgccgccatcgtggggggcatcaatgtcctgctgaagcccaacacctccgtgcagttcttgaggctggggatgctcagccccgagggcacctgcaaggccttcgacacagcggggaatgggtactgccgctcggagggtgtggtggccgtcctgctgaccaagaagtccctggcccggcgggtgtacgccaccatcctgaacgccggcaccaatacagatggcttcaaggagcaaggcgtgaccttcccctcaggggatatccaggagcagctcatccgctcgttgtaccagtcggccggagtggcccctgagtcatttgaatacatcgaagcccacggcacaggcaccaaggtgggcgacccccaggagctgaatggcatcacccgagccctgtgcgccacccgccaggagccgctgctcatcggctccaccaagtccaacatggggcacccggagccagcctcggggctggcagccctggccaaggtgctgctgtccctggagcacgggctctgggcccccaacctgcacttccatagccccaaccctgagatcccagcgctgttggatgggcggctgcaggtggtggaccagcccctgcccgtccgtggcggcaacgtgggcatcaactcctttggcttcgggggctccaacgtgcacatcatcctgaggcccaacacgcagccgccccccgcacccgccccacatgccaccctgccccgtctgctgcgggccagcggacgcacccctgaggccgtgcagaagctgctggagcagggcctccggcacagccaggacctggctttcctgagcatgctgaacgacatcgcggctgtccccgccaccgccatgcccttccgtggctacgctgtgctgggtggtgagcgcggtggcccagaggtgcagcaggtgcccgctggcgagcgcccgctctggttcatctgctctgggatgggcacacagtggcgcgggatggggctgagcctcatgcgcctggaccgcttccgagattccatcctacgctccgatgaggctgtgaagccattcggcctgaaggtgtcacagctgctgctgagcacagacgagagcacctttgatgacatcgtccattcgtttgtgagcctgactgccatccagataggcctcatagacctgctgagctgcatggggctgaggccagatggcatcgtcggccactccctgggggaggtggcctgtggctacgccgacggctgcctgtcccaggaggaggccgtcctcgctgcctactggaggggacagtgcatcaaagaagcccatctcccgccgggcgccatggcagccgtgggcttgtcctgggaggagtgtaaacagcgctgccccccgggcgtggtgcccgcctgccacaactccaaggacacagtcaccatctcgggacctcaggccccggtgtttgagttcgtggagcagctgaggaaggagggtgtgtttgccaaggaggtgcggaccggcggtatggccttccactcctacttcatggaggccatcgcacccccactgctgcaggagctcaagaaggtgatccgggagccgaagccacgttcagcccgctggctcagcacctctatccccgaggcccagtggcacagcagcctggcacgcacgtcctccgccgagtacaatgtcaacaacctggtgagccctgtgctgttccaggaggccctgtggcacgtgcctgagcacgcggtggtgctggagatcgcgccccacgccctgctgcaggctgtcctgaagcgtggcctgaagccgagctgcaccatcatccccctgatgaagaaggatcacagggacaacctggagttcttcctggccggcatcggcaggctgcacctctcaggcatcgacgccaaccccaatgccttgttcccacctgtggagttcccagctccccgaggaactcccctcatctccccactcatcaagtgggaccacagcctggcctgggacgtgccggccgccgaggacttccccaacggttcaggttccccctcagccgccatctacaacatcgacaccagctccgagtctcctgaccactacctggtggaccacaccctcgacggtcgcgtcctcttccccgccactggctacctgagcatagtgtggaagacgctggcccgcgccctgggcctgggcgtcgagcagctgcctgtggtgtttgaggatgtggtgctgcaccaggccaccatcctgcccaagactgggacagtgtccctggaggtacggctcctggaggcctcccgtgccttcgaggtgtcagagaacggcaacctggtagtgagtgggaaggtgtaccagtgggatgaccctgaccccaggctcttcgaccacccggaaagccccacccccaaccccacggagcccctcttcctggcccaggctgaagtttacaaggagctgcgtctgcgtggctacgactacggccctcatttccagggcatcctggaggccagcctggaaggtgactcggggaggctgctgtggaaggataactgggtgagcttcatggacaccatgctgcagatgtccatcctgggctcggccaagcacggcctgtacctgcccacccgtgtcaccgccatccacatcgaccctgccacccacaggcagaagctgtacacactgcaggacaaggcccaagtggctgacgtggtggtgagcaggtggctgagggtcacagtggccggaggcgtccacatctccgggctccacactgagtcggccccgcggcggcagcaggagcagcaggtgcccatcctggagaagttttgcttcactccccacacggaggaggggtgcctgtctgagcgcgctgccctgcaggaggagctgcaactgtgcaaggggctggtgcaggcactgcagaccaaggtgacccagcaggggctgaagatggtggtgcccggactggatggggcccagatcccccgggacccctcacagcaggaactgccccggctgttgtcggctgcctgcaggcttcagctcaacgggaacctgcagctggagctggcgcaggtgctggcccaggagaggcccaagctgccagaggaccctctgctcagcggcctcctggactccccggcactcaaggcctgcctggacactgccgtggagaacatgcccagcctgaagatgaaggtggtggaggtgctggctggccacggtcacctgtattcccgcatcccaggcctgctcagcccccatcccctgctgcagctgagctacacggccaccgaccgccacccccaggccctggaggctgcccaggccgagctgcagcagcacgacgttgcccagggccagtgggatcccgcagaccctgcccccagcgccctgggcagcgccgacctcctggtgtgcaactgtgctgtggctgccctcggggacccggcctcagctctcagcaacatggtggctgccctgagagaagggggctttctgctcctgcacacactgctccgggggcaccccctcggggacatcgtggccttcctcacctccactgagccgcagtatggccagggcatcctgagccaggacgcgtgggagagcctcttctccagggtgtcgctgcgcctggtgggcctgaagaagtccttctacggctccacgctcttcctgtgccgccggcccaccccgcaggacagccccatcttcctgccggtggacgataccagcttccgctgggtggagtctctgaagggcatcctggctgacgaagactcttcccggcctgtgtggctgaaggccatcaactgtgccacctcgggcgtggtgggcttggtgaactgtctccgccgagagcccggcgggaaccgcctccggtgtgtgctgctctccaacctcagcagcacctcccacgtcccggaggtggacccgggctccgcagaactgcagaaggtgttgcagggagacctggtgatgaacgtctaccgcgacggggcctggggggctttccgccacttcctgctggaggaggacaagcctgaggagccgacggcacatgcctttgtgagcaccctcacccggggggacctgtcctccatccgctgggtctgctcctcgctgcgccatgcccagcccacctgccctggcgcccagctctgcacggtctactacgcctccctcaacttccgcgacatcatgctggccactggcaagctgtcccctgatgccatcccagggaagtggacctcccaggacagcctgctaggtatggagttctcgggccgagacgccagcggcaagcgtgtgatgggactggtgcctgccaagggcctggccacctctgtcctgctgtcaccggacttcctctgggatgtgccttccaactggacgctggaggaggcggcctcggtgcctgtcgtctacagcacggcctactacgcgctggtggtgcgtgggcgggtgcgccccggggagacgctgctcatccactcgggctcgggcggcgtgggccaggccgccatcgccatcgccctcagtctgggctgccgcgtcttcaccaccgtggggtcggctgagaagcgggcgtacctccaggccaggttcccccagctcgacagcaccagcttcgccaactcccgggacacatccttcgagcagcatgtgctgtggcacacgggcgggaagggcgttgacctggtcttgaactccttggcggaagagaagctgcaggccagcgtgaggtgcttggctacgcacggtcgcttcctggaaattggcaaattcgacctttctcagaaccacccgctcggcatggctatcttcctgaagaacgtgacattccacggggtcctactggatgcgttcttcaacgagagcagtgctgactggcgggaggtgtgggcgcttgtgcaggccggcatccgggatggggtggtacggcccctcaagtgcacggtgttccatggggcccaggtggaggacgccttccgctacatggcccaagggaagcacattggcaaagtcgtcgtgcaggtgcttgcggaggagccggaggcagtgctgaagggggccaaacccaagctgatgtcggccatctccaagaccttctgcccggcccacaagagctacatcatcgctggtggtctgggtggcttcggcctggagttggcgcagtggctgatacagcgtggggtgcagaagctcgtgttgacttctcgctccgggatccggacaggctaccaggccaagcaggtccgccggtggaggcgccagggcgtacaggtgcaggtgtccaccagcaacatcagctcactggagggggcccggggcctcattgccgaggcggcgcagcttgggcccgtgggcggcgtcttcaacctggccgtggtcttgagagatggcttgctggagaaccagaccccagagttcttccaggacgtctgcaagcccaagtacagcggcaccctgaacctggacagggtgacccgagaggcgtgccctgagctggactactttgtggtcttctcctctgtgagctgcgggcgtggcaatgcgggacagagcaactacggctttgccaattccgccatggagcgtatctgtgagaaacgccggcacgaaggcctcccaggcctggccgtgcagtggggcgccatcggcgacgtgggcattttggtggagacgatgagcaccaacgacacgatcgtcagtggcacgctgccccagcgcatggcgtcctgcctggaggtgctggacctcttcctgaaccagccccacatggtcctgagcagctttgtgctggctgagaaggctgcggcctatagggacagggacagccagcgggacctggtggaggccgtggcacacatcctgggcatccgcgacttggctgctgtcaacctggacagctcactggcggacctgggcctggactcgctcatgagcgtggaggtgcgccagacgctggagcgtgagctcaacctggtgctgtccgtgcgcgaggtgcggcaactcacgctccggaaactgcaggagctgtcctcaaaggcggatgaggccagcgagctggcatgccccacgcccaaggaggatggtctggcccagcagcagactcagctgaacctgcgctccctgctggtgaacccggagggccccaccctgatgcggctcaactccgtgcagagctcggagcggcccctgttcctggtgcacccaatcgagggctccaccaccgtgttccacagcctggcctcccggctcagcatccccacctatggcctgcagtgcacccgagctgcgccccttgacagcatccacagcctggctgcctactacatcgactgcatcaggcaggtgcagcccgagggcccctaccgcgtggccggctactcctacggggcctgcgtggcctttgaaatgtgctcccagctgcaggcccagcagagcccagcccccacccacaacagcctcttcctgttcgacggctcgcccacctacgtactggcctacacccagagctaccgggcaaagctgaccccaggctgtgaggctgaggctgagacggaggccatatgcttcttcgtgcagcagttcacggacatggagcacaacagggtgctggaggcgctgctgccgctgaagggcctagaggagcgtgtggcagccgccgtggacctgatcatcaagagccaccagggcctggaccgccaggagctgagctttgcggcccggtccttctactacaagctgcgtgccgctgagcagtacacacccaaggccaagtaccatggcaacgtgatgctactgcgcgccaagacgggtggcgcctacggcgaggacctgggcgcggactacaacctctcccaggtatgcgacgggaaagtatccgtccacgtcatcgagggtgaccaccgcacgctgctggagggcagcggcctggagtccatcatcagcatcatccacagctccctggctgagccacgcgtgagcgtgcgggagggctaggcccgtgcccccgcctgccaccggaggtcactccaccatccccaccccaccccaccccacccccgccatgcaacgggattgaagggtcctgccggtgggaccctgtccggcccagtgccactgccccccgaggctgctagatgtaggtgttaggcatgtcccacccacccgccgcctcccacggcacctcggggacaccagagctgccgacttggagactcctggtctgtgaagagccggtggtgcccgtgcccgcaggaactgggctgggcctcgtgcgcccgtggggtctgcgcttggtctttctgtgcttggatttgcatatttattgcattgctggtagagacccccaggcctgtccaccctgccaagactcctcaggcagcgtgtgggtcccgcactctgcccccatttccccgatgtcccctgcgggcgcgggcagccacccaagcctgctggctgcggccccctctcggccaggcattggctcagcccgctgagtggggggtcgtgggccagtccccgaggagctgggcccctgcacaggcacacagggcccggccacacccagcggccccccgcacagccacccgtggggtgctgcccttatgcccggcgccgggcaccaactccatgtttggtgtttgtctgtgtttgtttttcaagaaatgattcaaattgctgcttggattttgaaatttactgtaactgtcagtgtacacgtctggaccccgtttcatttttacaccaatttggtaaaaatgctgctctcagcctcccacaattaaaccgcatgtgatctcc

SEQ ID NO: 5011 - DNA, 1374 bp, Homo sapiens
cagggagtgcctgcagcaccccggcggggccaccccagtctgcgtgtacacgagggatgaggtgacgggtgaagctgccctgcggggcacgacgctgcagtcgctgggcctgaccgggggcagcgccaccatcaggtttgtcatgaagtgctacgaccccgtgggcaagaccccaggaagcctgggctcgtcagcgtcggctggccaggcagccgccagcgctccacttcccttggaatctggggagctcagccgcggcgacttgagccgtccggaggacgcggacacctcagggccctgctgcgagcacactcaggagaagcagagcacaagggcacccgcagctgccccctttgttcctttctcgggtgggggacagagactggggggccctcctgggcccacgaggcctctgacatcatcttcagctaagttgccgaagtccctctccagccctggaggcccctccaagccaaagaagtccaagtcgggccaggatccccagcaggagcaggagcaggagcgggagcgggatccccagcaggagcaggagcgggagcggcccgtggaccgggagcccgtggaccgggagccggtggtgtgccaccccgacctggaggagcggctgcaggcctggccagcggagctgcctgatgagttctttgagctgacggtggacgacgtgagaagacgcttggcccagctcaagagtgagcggaagcgcctggaagaagcccccttggtgaccaaggccttcagggaggcgcagataaaggagaagctggagcgctacccaaaggtggctctgagggtcctgttccccgaccgctacgtcctacagggcttcttccgccccagcgagacaggtgggggacttgcgagacttcgtgaggagccacctggggaaccccgagctgtcattttacctgttcatcacccctccaaaaacagtcctggacgaccacacgcagaccctctttcaggcgaacctcttcccggccgctctggtgcacttgggagccgaagagccggcaggtgtctacctggagcctggcctgctggagcatgccatctccccatctgcggccgatgtgctggtggccaggtacatgtccagggccgccgggtccccttccccattgccagcccctgaccctgcacctaagtctgagccagctgctgaggagggggcgctggtcccccctgagcccatcccagggacggcccagcccgtgaagaggagcctgggcaaggtgcccaagtggctgaagctgccggccagcaagaggtgagagctgccagcctgaggtgcccactccgccagccacaggaccacctcctctgccagcaggaataaagacttgtgcatccctc

SEQ ID NO: 5012 - protein, 336 aa, Homo sapiens
MKCYDPVGKTPGSLGSSASAGQAAASAPLPLESGELSRGDLSRPEDADTSGPCCEHTQEKQSTRAPAAAPFVPFSGGGQRLGGPPGPTRPLTSSSAKLPKSLSSPGGPSKPKKSKSGQDPQQEQEQERERDPQQEQERERPVDREPVDREPVVCHPDLEERLQAWPAELPDEFFELTVDDVRRRLAQLKSERKRLEEAPLVTKAFREAQIKEKLERYPKVALRVLFPDRYVLQGFFRPSETGGGLARLREEPPGEPRAVILPVHHPSKNSPGRPHADPLSGEPLPGRSGALGSRRAGRCLPGAWPAGACHLPICGRCAGGQVHVQGRRVPFPIASP

SEQ ID NO: 5013 - DNA, 1960 bp, Homo sapiens
gacccctcctcctgtagagagtggtgctgccctctcgggatgtacctgcaggtggagacccgcaccagctcccgcctccatctgaagagggctccaggcatccggtcctggtccctgctggttggaatcttgtcgattggcctggctgctgcctactacagcggagatagcctgggctggaagctcttctacgtcacaggctgcctgtttgtggctgtgcagaacttggaggactgggaggaagccatcttcgacaagagcacagggaaggttgttttgaagacgttcagcctctacaagaagctgctgactcttttcagagctggccacgaccaggtggtggtcctgctccatgatgtccgtgatgtgagcgtggaggaggagaaggtccggtacttcgggaaaggctacatggtggtgctccggcttgcgacgggcttctcccaccccctcacgcagagtgcagtcatgggccaccgcagtgatgtggaagcatcgccaagctcatcaccagcttcctggagctgcactgccttgagagccccacagagctgtctcagagcagcgacagtgaggccggtgaccctgcaagccagagctgacagccccactgtgcctgagcccgtgcaccgcccacaggacccatggcacattcccggtgtgcctgagcccgtgcaccgcccacaggacccgtggcacattcccggtgtgcctgagcccgtgcaccgcccacaggacccgtggcacattcccggtgtgcctgagcccgtgcaccgcccacaggacccgtggcacattcccggtgtgcctgagcccgtgcaccgcccacaggacccgtggccttggcttcagttggtgcctccagccgagttggcctattgcctgctcatgctgctgcttgcacactgcatgaaacagcaggccagaccaggacatccagactttctccatcgtgaggcctgggcctgcctttctgcagccggaggtctcgccagccctggactcctgctttgggccacagcaagacctcgggcgagtggagaggcggggccaggccgggcccttgtgggtgctgatgctgcatgttgtccccgacacagcgtcctctccctggtggacatccccagcggtcaggtgcttccccaagggcagtgaggggtgaacatccagggcctacctggctgtgcacgctgcagccacactgtggaagctgcccctccccgaggacccgcctcccttgctgatgccaggatctcagcgcatagaccactctgccccagcggtcgtcacagaaaggtctctctgttcctcacactcagcttcagcataagctgtgaggccagaaaaaaggtcagctcttctagtatcgtgcagtgcttaaaaaccgggagctccagccgggcgcagtggttcatgccagtaatcccagcactttcggaggccgaggtgggaggattgcttgaggccaggagttcaagaccagcctgggcaacacagcaagatcctgtctttgtaaaaaaactaaccaaacaggaaaaactgggagattttctgcagaaattgagttccagcctctctcgaacctgggaagacctggcaggagggggctgggctctcggctacagacttctccccaccccgtaggagctgaacgccaaccatcctgacccgccagtgctcttggtctcctgagtgtacccaggtcctcccaggtgcggtgtgcaccgagcgcgcctggcctgatgccctggcctgtgagctggggactcctgggccctgtgagcccctaggcgcaggcccaggaatggctgggtaggacagggaacacctttgccccacgtctggctgtgacctcggtgaaagccgacaggagagagatggaccctcctcctcagtagtggctgccagtccctcgttgcaggacagggtcatcataaccataaataacccttcacgtgtc

SEQ ID NO: 5014 - DNA, 1760 bp, Homo sapiens
gcgtcgggggaggacaacaaagggccgcgggcggcgggcagtggtgtcccagtctcccggtgcttccctgaggctgaggcgcccggcctcccgcccgccgcgctccagatgaagtgtgagcactgcacgcgcaaggaatgtagtaagaaaacaaaaactgatgaccaagagaatgtgtcagccgatgcaccgagtccagcccaggaaaatggagagaagggagaattccacaagttggctgatgccaagatatttttgagcgactgcctggcatgtgacagctgtatgactgcagaggaaggagtccaactttcccagcaaaatgccaaggacttcttccgcgttctgaaccttaacaagaaatgtgatacctcaaagcacaaagtgctggtagtgtctgtgtgtcctcaatctttgccttattttgctgctaaattcaacctcagtgtaactgatgcatccagaagactctgtggtttcctcaaaagtcttggggtgcactatgtatttgatacgacgatagctgcggattttagtatcctggagagtcaaaaagaattcgtgcgtcgctatcgccagcacagtgaggaggaacgcaccctgcccatgctgacctctgcctgtcctggctgggtccgatacgccgagcgggtgctgggtcgccccatcactgcccacctctgcaccgccaagtccccccagcaggtcatgggctctttggtgaaggattatttcgccagacagcagaacctgtctccagagaagattttccacgtcattgtggccccttgttatgacaagaagctggaggctcttcaggaaagccttccccctgctttgcatggctcccggggcgctgactgcgtgttaacatcagaaattagccaggcgtggtggtgcacacctgtgatcacagctactcgggaggctgcggcaagagaatcacttgaacccgggaggcagaggttacagcgagacaagattgcaccactggactccagcctgggcggcggaggtgaaattgctcaaataatggagcaaggtgacctctcagtgagagatgctgccgtcgacactctgtttggagacttgaaggaggacaaagtgacgcgtcatgatggagccagctcagacgggcacctggcacacatcttcagacatgcggccaaggagctgttcaacgaggatgtggaggaggtcacttaccgagccctgagaaacaaagacttccaagaggtcacccttgagaagaacggagaggtggtgttacgctttgctgcagcctatggctttcgaaacatccagaacatgatcctgaagcttaagaagggcaagttcccattccactttgtggaggtcctcgcctgtgctggaggatgcttaaatggcagaggccaagcccagactccagacggacatgcggataaggccctgctgcggcagatggaaggcatttacgctgacatccctgtgcggcgtccggagtccagtgcacacgtgcaggagctgtaccaggagtggctggaggggatcaactcccccaaggcccgagaggtgctgcataccacgtaccagagccaggagcgtggcacacacagcctggacatcaagtggtgaagtcaggccagggccttccagctgctcttggggccagagccaagagcctctcagtagagggaggggctgccctgagtggagtattaaagacacttaagaaaaccgctcaaaaaaaaaaaaaaaaaaaaaaaaaaaaaaaaaaa

SEQ ID NO: 5015 - protein, 502 aa, Homo sapiens
MKCEHCTRKECSKKTKTDDQENVSADAPSPAQENGEKGEFHKLADAKIFLSDCLACDSCMTAEEGVQLSQQNAKDFFRVLNLNKKCDTSKHKVLVVSVCPQSLPYFAAKFNLSVTDASRRLCGFLKSLGVHYVFDTTIAADFSILESQKEFVRRYRQHSEEERTLPMLTSACPGWVRYAERVLGRPITAHLCTAKSPQQVMGSLVKDYFARQQNLSPEKIFHVIVAPCYDKKLEALQESLPPALHGSRGADCVLTSEISQAWWCTPVITATREAAARESLEPGRQRLQRDKIAPLDSSLGGGGEIAQIMEQGDLSVRDAAVDTLFGDLKEDKVTRHDGASSDGHLAHIFRHAAKELFNEDVEEVTYRALRNKDFQEVTLEKNGEVVLRFAAAYGFRNIQNMILKLKKGKFPFHFVEVLACAGGCLNGRGQAQTPDGHADKALLRQMEGIYADIPVRRPESSAHVQELYQEWLEGINSPKAREVLHTTYQSQERGTHSLDIKW

SEQ ID NO: 5016 - DNA, 988 bp, Homo sapiens
cgtcaagcttggcacgaggccatggagcagctgctgcgcgccgagctgcgcaccgcgaccctgcgggccttcggcggccccggcgccggctgcatcagcgagggccgagcctacgacacggacgcaggcccagtgttcgtcaaagtcaaccgcaggacgcaggcccggcagatgtttgagggggaggtggccagcctggaggccctccggagcacgggcctggtgcgggtgccgaggcccatgaaggtcatcgacctgccgggaggtggggccgcctttgtgatggagcatttgaagatgaagagcttgagcagtcaagcatcaaaacttggagagcagatggcagatttgcatctttacaaccagaagctcagggagaagttgaaggaggaggagaacacagtgggccgaagaggtgagggtgctgagcctcagtatgtggacaagttcggcttccacacggtgacgtgctgcggcttcatcccgcaggtgaatgagtggcaggatgactggccgacctttttcgcccggcaccggctccaggcgcagctggacctcattgagaaggactatgctgaccgagaggcacgagaactctggtcccggctacaggtgaagatcccggatctgttttgtggcctagagattgtccccgcgttgctccacggggatctctggtcgggaaacgtggctgaggacgacgtggggcccattatttacgacccggcttccttctatggccattccgagtttgaactggcaatcgccttgatgtttggggggttccccagatccttcttcaccgcctaccaccggaagatccccaaggctccgggcttcgaccagcggctgctgctctaccagctgtttaactacctgaaccactggaaccacttcgggcgggagtacaggagcccttccttgggcaccatgcgaaggctgctcaagtagcggcccctgccctcccttcccctgtccccgtccccgt

SEQ ID NO: 5017 - protein, 309 aa, Homo sapiens
MEQLLRAELRTATLRAFGGPGAGCISEGRAYDTDAGPVFVKVNRRTQARQMFEGEVASLEALRSTGLVRVPRPMKVIDLPGGGAAFVMEHLKMKSLSSQASKLGEQMADLHLYNQKLREKLKEEENTVGRRGEGAEPQYVDKFGFHTVTCCGFIPQVNEWQDDWPTFFARHRLQAQLDLIEKDYADREARELWSRLQVKIPDLFCGLEIVPALLHGDLWSGNVAEDDVGPIIYDPASFYGHSEFELAIALMFGGFPRSFFTAYHRKIPKAPGFDQRLLLYQLFNYLNHWNHFGREYRSPSLGTMRRLLK

SEQ ID NO: 5018 - DNA, 1502 bp, Homo sapiens
gacactatccgtgcggccaggcggagacccggaggaccgaagcttccggacgacgaggaaccgcccaacatggcctcggagagtgggaagctttggggtggccggtttgtgggtgcagtggaccccatcatggagaagttcaacgcgtccattgcctacgaccggcacctttgggaggtggatgttcaaggcagcaaagcctacagcaggggcctggagaaggcagggctcctcaccaaggccgagatggaccagatactccatggcctagacaaggtggctgaggagtgggcccagggcaccttcaaactgaactccaatgatgaggacatccacacagccaatgagcgccgcctgaaggagctcattggtgcaacggcagggaagctgcacacgggacggagccggaatgaccaggtggtcacagacctcaggctgtggatgcggcagacctgctccacgctctcgggcctcctctgggagctcattaggaccatggtggatcgggcagaggcgaacgtgatgttctcttcccggggtacacccatttgcagagggcccagcccatccgctggagccactggattctgagccacgccgtggcactgacccgagactctgagcggctgctggaggtgcggaagcggatcaatgtcctgcccctggggaggtggggccattgcaggcaatcccctgggtgtggaccgagagctgctccgagcagaactcaactttggggccatcactctcaacagcatggatgccactagtgagcgggactttgtggccgagttcctgttctgggcttcgctgtgcatgacccatctcagcaggatggccgaggacctcatcctctactgcaccaaggaattcagcttcgtgcagctctcagatgcctacagcacgggaagcagcctgatgccccagaagaaaaaccccgacagtttggagctgatccggagcaaggctgggcgtgtgtttgggcggtgtgccgggctcctgatgaccctcaagggacttcccagcacctacaacaaagacttacaggaggacaaggaagctgtgtttgaagtgtcagacactatgagtgccgtgctccaggtggccactggcgtcatctctacgctgcagattcaccaagagaacatgggacaggctctcagccccgacatgctggccactgaccttgcctattacctggtccgcaaagggatgccattccgccaggcccacgaggcctccgggaaagctgtgttcatggccgagaccaagggggtcgccctcaaccagctgtcactgcaggagctgcagaccatcagccccctgttctcgggcgacgtgatctgcgtgtgggactacgggcacagtgtggagcagtatggtgccctgggcggcactgcgcgctccagcgtcgactggcagatccgccaggtgcgggcgctactgcaggcacagcaggcctaggtcctcccacacctgccccctaataaagtgggcgcgag

SEQ ID NO: 5019 - DNA, 1522 bp, Homo sapiens
gcggaccccagagagccctgagcagccccgccgctgccggcctagttaccgtcataccacgggaggagccgcagctgccgcagccggccccagtctccatcaccgcaaccaatgagcagcaaggccgagacccagcagccacccgccgcccccgcctttccccccaccgcccccctcccgtccccccgccgcccccgccctcagcgccgccgacaccaagcccggcactacgggcagctgcgcagggagcggtggtccgggcggcctcacatcggcggcgcctgccagcgtggacaagaaggtcatcgcagtgaaggttttgggaacagtaaaatggttcaatgtaaggaacggatatggtttcatcaacaggaatgacaccaaggaagatgtatttgtacaccagactgccataaagaataaccccaggaagtaccttcgcagtgtaggagatgaagagactgtggagtttgatgttgttgaaggagaagagggtgcggaggcagcaaatgttacagatcctggtggtgttccagttcaaggcagtaaatatgcagcagatcgtaaccattatagacgctatccacgtcataggggtcctccacgcaattaccagcaaaattaccagaacagtgagagtggggaaaagaccgagggatcggagaatgctcccgaaggccaggcccaacaatgccggccctaccgcaggcaaaggttcccaccttactacatgtggagaccctgtgggtgtcgaccacagtattccagccctcctgtgcagggagaagtgatggagggtgctgacaaccagggtgcaggagaacaaggtagaccagtgaggcagaatatgtatcggggatatagaccacgattccgcaggggccctccttgccaaagacagcctagagagtacggcaatgaagaagataaaatcaaggagatgagacccagggtcagcagccacctcaacgtcggtaccgcagcaacttcaattaccaacgcagatgcccagaaaaccctaaatcacaagatggcaaagagacaaaatcagccaatccaccagctgagaattcgtctgctcccgaggctgagcagggcggggctgagtaaatgccggcttaccatctctaccatcatccggtttagtcatccaacaagaagaaatatgaaattccagcaataagaaatgaacaaaagattggagctgaagaccttaagtgcttgctttttgcccgttgaccagataaatagaactatctgcattatctatgcagcatggggtttttattatttttacctaaatatgtctctttttggtaataacaaacgtgttttttttaaaaagccttgtttttctcaatacgcctttaaaggtttttaaattgtttcatatctggtcaagatgagatttttaagcactttatttttaatttgtaataaaagtttacaacttgattttttcaaaaaagtcaacaaactgcaagcacctgttaataaaggtcttaaataataataataaaaa

SEQ ID NO: 5020 - DNA, 1506 bp, Homo sapiens
ccgcgccacttggcctgcctccgtcccgccgcgccacttcgcctgcctccgtcccccgcccgccgcgccatgcctgtggccggctcggagctgccgcgccggcccttgccccccgccgcacaggagcgggacgccgagccgcgtccgccgcacggggagctgcagtacctggggcagatccaacacatcctccgctgcggcgtcaggaaggacgaccgcacgggcaccggcaccctgtcggtattcggcatgcaggcgcgctacagcctgagagatgaattccctctgctgacaaccaaacgtgtgttctggaagggtgttttggaggagttgctgtggtttatcaagggatccacaaatgctaaagagctgtcttccaagggagtgaaaatctgggatgccaatggatcccgagactttttggacagcctgggattctccaccagagaagaaggggacttgggcccagtttatggcttccagtggaggcattttggggcagaatacagagatatggaatcagattattcaggacagggagttgaccaactgcaaagagtgattgacaccatcaaaaccaaccctgacgacagaagaatcatcatgtgcgcttggaatccaagagatcttcctctgatggcgctgcctccatgccatgccctctgccagttctatgtggtgaacagtgagctgtcctgccagctgtaccagagatcgggagacatgggcctcggtgtgcctttcaacatcgccagctacgccctgctcacgtacatgattgcgcacatcacgggcctgaagccaggtgactttatacacactttgggagatgcacatatttacctgaatcacatcgagccactgaaaattcagcttcagcgagaacccagacctttcccaaagctcaggattcttcgaaaagttgagaaaattgatgacttcaaagctgaagactttcagattgaagggtacaatccgcatccaactattaaaatggaaatggctgtttagggtgctttcaaaggagctcgaaggatattgtcagtctttaggggttgggctggatgccgaggtaaaagttctttttgctctaaaagaaaaaggaactaggtcaaaaatctgtccgtgacctatcagttattaatttttaaggatgttgccactggcaaatgtaactgtgccagttctttccataataaaaggctttgagttaactcactgagggtatctgacaatgctgaggttatgaacaaagtgaggagaatgaaatgtatgtgctcttagcaaaaacatgtatgtgcatttcaatcccacgtacttataaagaaggttggtgaatttcacaagctatttttggaatatttttagaatattttaagaatttcacaagctattccctcaaatctgagggagctgagtaacaccatcgatcatgatgtagagtgtggttatgaactttaaagttatagttgttttatatgttgctataataaagaagtgttctgc

SEQ ID NO: 5021 - DNA, 2204 bp, Homo sapiens
taaaaacagggaatgactctactaatgatggggtcagcagatgctcttccagaagaaccctcagccaaaactgtcttcgtagaagacatgacagaagaacagttagcatctgctatggagttaccatgtggattgacaaaccttggtaacacttgttacatgaatgccacagttcagtgtattcgttctgtgcctgaactcaaagatgcccttaaaaggtatgcaggtgccttgagagcttcaggggaaatggcttcagcgcagtatattactgcagcccttagagatttgtttgattccatggataaaacttcttccagtattccacctattattctactgcagtttttgcacatggctttcccacagtttgccgagaaaggtgaacaaggacagtatcttcaacaggatgctaatgaatgttggatacaaatgatgcgagtattgcaacagaaattggaagcaatagaggatgattctgttaaagagacagactcctcatctgcatcggcagcgacaccttctaaaaagaaaagtttaatcgatcagttcttcggtgttgagtttgaaactaccatgaaatgtacagaatctgaagaagaagaagtcaccaaaggaaaggaaaatcaacttcagcttagctgttttatcaatcaggaagtcaagtatctttttacaggacttaaattgcgacttcaggaagaaatcaccaaacagtctccaacgttgcaaagaaatgccttgtatatcaaatcttccaagatcagccggctgcctgcttacttgaccattcagatggttcgatttttttataaagagaaggaatctgtgaatgccaaagttcttaaggatgttaaatttcctcttatgttggatatgtatgaactgtgtacaccagaacttcaagagaaaatggtgtcttttcgatccaaattcaaggatctagaagataaaaaagtgaatcagcagccaaatacaagtgacaaaaagagtagtccccagaaagaagttaagtatgaacccttttcttttgctgatgatattggctccaataattgtggatactatgacttacaagcagtactaacacaccagggaaggtctagttcttcaggtcattatgtatcatgggtgaaaaggaaacaagatgaatggattaagtttgatgatgacaaagtcagcatcgtaacaccagaagatatcttacggctttctggtggtggagactggcatatcgcttacgttctactctatgggcctcgcagagttgaaataatggaagaggaaagtgaacagtaatcttcattttagtatttatgcttagatgtgaaaataaatgttatttgttgatcatttctataatccagagctttagaggaagacacataggtgggtttatgtttcacctcatttggaacaaaagaggacagaagcagaccactctgtgcaccaacctaaaaaattacagagaagagaaaattatctttggattgtgctgccctatataaaggtggcagaaagacatttttaaaaagcttattatttcttgcattattttaaaaagttcagagttgaaatgcctttcaaccatttccttctgtggtcatttttcttgctgcctttttcacccaagattcagcagtcagatgtttactgcacacctattacctattatttgctgttcttgcatggttcaaaccaccattctgtagccacccatcctttgccttatctaacaaacatttttccaggaaggtggaaaaggaagtgttgctctcattgtgtgactcagtgctgctgtccatcccatggaaacatgggcacaatcaagtatttgtccagcctattgcaggcttttcctgactttaaaataaattgtgatcaataatagtacctttgattatacatttattattgtgtctctctctgatgtactgtggattgtacatttaactttggaatggctttgtaataatcagtcttaagaaaatgttgacaagctctggttgcttatttttagaaaatgaggacatttaataataataaaaaaaaagggattaatagcttttgacctcaagtcttttgtcttctgagtgttggagcttggctgaagacatgtttaatactgtacaatttctgaagatggttattaacactgtgctgttaagcatccatttaaaaatatgttatcttctttgcctgcc

SEQ ID NO: 5022 - DNA, 2859 bp, Homo sapiens
ggtattcaggaaggaacacaatgtaccaaatgtaaaaataactgggcactgaagttttctatcatattattatacattttgtgtgccttgctaacaatcacagtagccattttgggatataaagttgtagagaaaatggacaatgtcacaggtggcatggaaacatctcgccaaacctatgatgacaagctcacagcagtggaaagtgacctgaaaaaattaggtgaccaaactgggaagaaagctatcagcaccaactcagaactctccaccttcagatcagacattctagatctccgtcagcaacttcgtgagattacagaaaaaaccagcaagaacaaggatacgctggagaagttacaggcgagcggggatgctctggtggacaggcagagtcaattgaaagaaactttggagaataactctttcctcatcaccactgtaaacaaaaccctccaggcgtataatggctatgtcacgaatctgcagcaagataccagcgtgctccagggcaatctgcagaaccaaatgtattctcataatgtggtcatcatgaacctcaacaacctgaacctgacccaggtgcagcagaggaacctcatcacgaatctgcagcggtctgtggatgacacaagccaggctatccagcgaatcaagaacgactttcaaaatctgcagcaggtttttcttcaagccaagaaggacacggattggctgaaggagaaagtgcagagcttgcagacgctggctgccaacaactctgcgttggccaaagccaacaacgacaccctggaggatatgaacagccagctcaactcattcacaggtcagatggagaacatcaccactatctctcaagccaacgagcagaacctgaaagacctgcaggacttacacaaagatgcagagaatagaacagccatcaagttcaaccaactggaggaacgcttccagctctttgagacggatattgtgaacatcattagcaatatcagttacacagcccaccacctgcggacgctgaccagcaatctaaatgaagtcaggaccacttgcacagatacccttaccaaacacacagatgatctgacctccttgaataataccctggccaacatccgtttggattctgtttctctcaggatgcaacaagatttgatgaggtcgaggttagacactgaagtagccaacttatcagtgattatggaagaaatgaagctagtagactccaagcatggtcagctcatcaagaattttacaatactacaaggtccaccgggccccaggggtccaagaggtgacagaggatcccagggaccccctggcccaactggcaacaagggacagaaaggagagaagggggagcctggaccacctggccctgcgggtgagagaggcccaattggaccagctggtccccccggagagcgtggcggcaaaggatctaaaggctcccagggccccaaaggctcccgtggttcccctgggaagcccggccctcagggctccagtggggacccaggccccccgggcccaccaggcaaagagggactccccggccctcagggccctcctggcttccagggacttcagggcaccgttggggagcctggggtgcctggacctcggggactgccaggcttgcctggggtaccaggcatgccaggccccaagggcccccccggccctcctggcccatcaggagcggtggtgccctgggcctgcagaatgagcaaccccagcaccggaggacaatggctgcccgcctcactggaagaacttcacagacaaatgctactatttttcagttgagaaagaaatttttgaggatgcaaagcttttctgtgaagacaagtcttcacatcttgttttcataaacactagagaggaacagcaatggataaaaaaacagatggtagggagagagagccactggatcggcctcacagactcagagcgtgaaaatgaatggaagtggctggatgggacatctccagactacaaaaattggaaagctggacagccggataactggggtcatggccatgggccaggagaagactgtgctgggttgatttatgctgggcagtggaacgatttccaatgtgaagacgtcaataacttcatttgcgaaaaagacagggagacagtactgtcatctgcattataacggactgtgatgggatcacatgagcaaattttcagctctcaaaggcaaaggacactcctttctaattgcatcaccttctcatcagattgaaaaaaaaaaagcactgaaaaccaattactgaaaaaaaattgacagctagtgttttttaccatccgtcattacccaaagacttgggaactaaaatgttccccagggtgatatgctgattttcattgtgcacatggactgaatcacatagattctcctccgtcagtaaccgtgcgattatacaaattatgtcttccaaagtatggaacactccaatcagaaaaaggttatcattggtcgttgagttatgggaagaacttaagcatatactgtgtaaacagtgccatacatttctaaaatcccaagtgtaggaaaaatatgcagacatacagatatataggccaactattagtaataatatgaaatatacttaaagagcttttaaaactttgtatttttgtacaaaatatttgtcttttacaatttttttcctttttttttttttgtcattttaccgacataatacatggagccaaagaaaacaataatggtactaataaaaactcctagggtttcctgtcagatttaattctacccagtggcaaagaattttttcaattgtggctttaaaaaaataattaaatatacatgtatatatatat

SEQ ID NO: 5023 - DNA, 2150 bp, Homo sapiens
ctcgagccacgaaggccccgctgtcctgtctagcagatacttgcacggtttacagaaattcggtccctgggtcgtgtcaggaaactggaaaaaaggtcataagcatgaagcgcagttcagtttccagcggtggtgctggccgcctctccatgcaggagttaagatcccaggatgtaaataaacaaggcctctatacccctcaaaccaaagagaaaccaacctttggaaagttgagtataaacaaaccgacatctgaaagaaaagtctcgctatttggcaaaagaactagtggacatggatcccggaatagtcaacttggtatattttccagttctgagaaaatcaaggacccgagaccacttaatgacaaagcattcattcagcagtgtattcgacaactctgtgagtttcttacagaaaatggttatgcacataatgtgtccatgaaatctctacaagctccctctgttaaagacttcctgaagatcttcacatttctttatggcttcctgtgcccctcatacgaacttcctgacacaaagtttgaagaagaggttccaagaatctttaaagaccttgggtatccttttgcactatccaaaagctccatgtacacagtgggggctcctcatacatggcctcacattgtggcagccttagtttggctaatagactgcatcaagatacatactgccatgaaagaaagctcacctttatttgatgatgggcagccttggggagaagaaactgaagatggaattatgcataataagttgtttttggactacaccataaaatgctatgagagttttatgagtggtgccgacagctttgatgagatgaatgcagagctgcagtcaaaactgaaggatttatttaatgtggatgcttttaagctggaatcattagaagcaaaaaacagagcattgaatgaacagattgcaagattggaacaagaaagagaaaaagaaccgaatcgtctagagtcgttgagaaaactgaaggcttccttacaaggagatgttcaaaagtatcaggcatacatgagcaatttggagtctcattcagccattcttgaccagaaattaaatggtctcaatgaggaaattgctagagtagaactagaatgtgaaacaataaaacaggagaacactcgactacagaatatcattgacaaccagaagtactcagttgcagacattgagcgaataaatcatgaaagaaatgaattgcagcagactattaataaattaaccaaggacctggaagctgaacaacagaagttgtggaatgaggagttaaaatatgccagaggcaaagaagcgattgaaacacaattagcagagtatcacaaattggctagaaaattaaaacttattcctaaaggtgctgagaattccaaaggttatgactttgaaattaagtttaatcccgaggctggtgccaactgccttgtcaaatacagggctcaagtttatgtacctcttaaggaactcctgaatgaaactgaagaagaaattaataaagccctaaataaaaaaatgggtttggaggatactttagaacaattgaatgcaatgataacagaaagcaagagaagtgtgagaactctgaaagaagaagttcaaaagctggatgatctttaccaacaaaaaattaaggaagcagaggaagaggatgaaaaatgtgccagtgagcttgagtccttggagaaacacaagcacctgctagaaagtactgttaaccaggggctcagtgaagctatgaatgaattagatgctgttcagcgggaataccaactagttgtgcaaaccacgactgaagaaagacgaaaagtgggaaataacttgcaacgtctgttagagatggttgctacacatgttgggtctgtagagaaacatcttgaggagcagattgctaaagttgatagagaatatgaagaatgcatgtcagaagatctctcggaaaatattaaagagattagagataagtatgagaagaaagctactctaattaagtcttctgaagaatgaagataaaatgttgatcatgtatatatatccatagtgaataaaattgtctcagtaaaaaaaaaaaaaaaaaaaaaaaaaaaaaaaaaaaaaaaaaaaaaaaaaaaaaaaaaaaaaaaa

SEQ ID NO: 5024 - protein, 642 aa, Homo sapiens
MKRSSVSSGGAGRLSMQELRSQDVNKQGLYTPQTKEKPTFGKLSINKPTSERKVSLFGKRTSGHGSRNSQLGIFSSSEKIKDPRPLNDKAFIQQCIRQLCEFLTENGYAHNVSMKSLQAPSVKDFLKIFTFLYGFLCPSYELPDTKFEEEVPRIFKDLGYPFALSKSSMYTVGAPHTWPHIVAALVWLIDCIKIHTAMKESSPLFDDGQPWGEETEDGIMHNKLFLDYTIKCYESFMSGADSFDEMNAELQSKLKDLFNVDAFKLESLEAKNRALNEQIARLEQEREKEPNRLESLRKLKASLQGDVQKYQAYMSNLESHSAILDQKLNGLNEEIARVELECETIKQENTRLQNIIDNQKYSVADIERINHERNELQQTINKLTKDLEAEQQKLWNEELKYARGKEAIETQLAEYHKLARKLKLIPKGAENSKGYDFEIKFNPEAGANCLVKYRAQVYVPLKELLNETEEEINKALNKKMGLEDTLEQLNAMITESKRSVRTLKEEVQKLDDLYQQKIKEAEEEDEKCASELESLEKHKHLLESTVNQGLSEAMNELDAVQREYQLVVQTTTEERRKVGNNLQRLLEMVATHVGSVEKHLEEQIAKVDREYEECMSEDLSENIKEIRDKYEKKATLIKSSEE

SEQ ID NO: 5025 - DNA, 6222 bp, Homo sapiens
gagaagaagtggcaggtgatgctgaagcgggggagaagcggcagagccggccacacagtgcaggggatggagacaggtgctgggctggtcctcctgcagcatcctcagttgttggagggcagtcatcctcaggccgtacccagccagagaagaaaaagaacagtgtgaagccacgtgtgatagccgtccaacatcggctcttccctccaattacattgtagttgattgtagtctcaaaccatgaattatgtgggacagctggctgggcaggtgattgtcactgtgaaggaactctacaagggcattaaccaggccaccctctctgggtgcattgatgtcatcgtggtacagcagcaggatggcagctatcagtgttcaccttttcacgttcggtttggaaagctgggagtcctgagatccaaagagaaagtgattgatatagaaatcaacggcagtgcagtggatcttcacatgaagttgggtgataacggagaagctttctttgttgaggagactgaagaagaatatgaaaagcttcctgcttaccttgccacctcaccaattcctactgaagatcagttctttaaagatattgacacccctttggtgaaatcgggtggagatgaaacaccatctcagagttcagacatctcacacgtcttggaaacagagacaatttttactccaagttctgtgaaaaagaaaaaacgaaggagaaagaaatacaaacaggacagtaagaaggaagagcaggccgcatctgctgctgcagaagacacatgtgatgtaggcgtgagctccgatgatgacaagggggcccaggcagcacgaggatcttcaaatgcttccttgaaagaagaagaatgtaaagagcctttgctcttccattctggggatcattaccccttatctgatggagattggtcccctttagagaccacctatccccagacagcgtgtcctaagagtgattcagagctggaggtgaaacctgcggagagcctgctcagatcagagtctcacatggagtggacgtggggcggattcccagagtccaccaaggtcagcaaaagagaacgatctgaccatcatcctaggacagctacaattacaccatcagaaaatactcattttcgggtaattcccagtgaggacaacctcatcagtgaagttgagaaggatgcttccatggaagacactgtctgtaccatagtgaagcccaaacccagagccctgggtacacagatgagcgacccaacatctgtggcagagcttctcgaacctcctcttgagagtactcagatttcatctatgttagatgctgaccaccttcccaacgcagccttagcggaggcgccctcagaatccaaaccggcagctaaagtagactcgccgtcaaagaagaaaggtgttcacaaaagaagccaacaccagggacctgatgatatttaccttgatgacttaaagggtctagaacctgaagttgcagctctttatttccctaaaagtgaatcggagcccggttccaggcagtggcccgagtctgacacactctctggctcccagtccccacagtccgtgggaagcgcagctgcagatagcggcaccgagtgcctctcagattctgccatggacttgcctgacgttaccctctccctttgcgggggcctcagtgaaaatggagaaatttcaaaagaaaaattcatggagcatatcattacttatcacgaatttgcagaaaaccctggacttatagacaatcctaaccttgtaataaggatatataatcgttactataactgggctttggcagctcccatgatccttagcttgcaagtattccagaagagcttgcctaaggccacagttgagtcctgggtgaaagacaagatgccaaagaaatctggtcgctggtggttttggcgaaagagagaaagcatgaccaaacagctgccagaatccaaggagggaaaatctgaggcaccgccagccagtgacctgccatccagctccaaggagccggccggtgccaggccggccgagaatgactcctcgagtgacgagggatcacaggagctcgaagaatccatcacagtggaccccatccccacagagcccctgagccacggcagcacaacttcatataagaagtctctccgcctctcctcagaccagatcgcaaaactgaagctccacgatggcccaaatgatgttgtgtttagtattacaacccagtatcaaggcacctgtcgctgtgcagggaccatttacctgtggaactggaatgacaagatcatcatttctgatattgatgggacaataaccaagtcggatgctttgggacagattctcccacagctgggcaaagactggacccaccagggtatagcaaagctctaccattccatcaatgagaatggctacaagtttctgtactgctcggctcgtgccatcggcatggccgacatgacccgtggctacctgcactgggtcaatgacaagggcacaatcttgccccggggccccctgatgctgtcccccagcagcttgttctccgccttccacagagaagtgatagaaaagaaaccagagaagttcaaaattgagtgtctaaatgatatcaagaatctgtttgccccgtctaagcagcccttctatgctgcctttggaaaccgtccaaatgatgtctatgcctacacacaagttggagttccagactgtagaatattcaccgtgaaccccaagggtgaattaatacaagaaagaaccaaaggaaacaagtcatcgtatcacaggctgagtgagctcgtggagcatgtgttcccccttctcagtaaggagcagaattccgcttttccctgcccggagttcagctccttctgctactggcgagacccgatccctgaagtggacctggatgacctgtcttgaggcggcacctcagtgggtgggcagggcttggtccccctccccacagcaagggaaggcagctggctcttctgctgacctcagataccagccttccccagcggggacgggtgcttctggagctggtcccgccatcctcctttgccttcccaggccagctgctcaggctcggcaggtctgcagctcagctcctggaaggagaagggaggaactgggcctggggctggaggcctgggatccctcctttgtgggtcgcacacatgtttcctgctgtgagctggggcctccttccattgcatcattttaaaggaagaaaaaagcagctaaaaaagagtggaccaaaacactgcacacagtgaagtgttccagtttccactgggcagttgaggtggcttctgtaaccagggctgtcttcagatgtcagggtccctgaactgctgcgggcccagtcagtgatgctggctgaagctgcctgtgcacgtttcttctctggtcgcctcatttcctgctacactgaaggggtcagctgctccagtgggccaagttgggcaggacccccgcccctgcagggcccatgcaccagagccactgagcccagtcccataaacctggccctctttggggaaagatccccacagagcatcctcctctcatctgtgacaactccacgagcccttaatttcttagtcctcaccagaagaacaggtctcacaagtatatatttgatgtctgtaataaaagtgggaaggtgggtcttaaaacagaccaaaccccgccccgcccccaacaactctgcttttagggaggcctccgaaatgcagataggcggttgagtggggtcctgggaagagcgctgaatccctctgcttgctgcctggtgtgggcctttggaaagcatcttgccttgggacaggatttctaaaattctgtgattcagatttgtcagggaagcacagtgaagcttgcttaaaggcactggccagcagtgtgtgactttggcttttgggatcacaccctgtaatcgggcccgtggaagcagcgtcaaagaggggtcttggagctcctatggagcagactgccccccgagcagtgtccccagcctagccctgtgagaccccatggggacacgggtgcctatgtattttcactaaaatatacatggtagctccatttactgatgcggttgtaatgagctcacatcgtgtctgaagagatggcaccagggaaaggtgtgccataagctgctccagagcttttggtatgctgagtgttgacagagctgcactcttaacatcaagagaactgtcaggagcccagaaccaaccccaggtcttggtctccattggcgagaacacaggacgtggtggttcctgagcagagagggatctgcagatacaggcttggcgctcggggtggtctcgtggccaactcttcatgcccctgccgttgtagtggaacctctacatgttttagtttgcttcacctaaaataatgctgatctagagatagagaaataggggtggttatttttccagattggagagttgaaagtccctgactgatttcagccattttcctagtgcttgtcggatgcagagacaatgttgaaatcccctaaacacagttctcagtggcaaaacctaggaaggctcatgttcccagagaagggaccacatgagccttctcccatgcaaagcttcccccagcttaaatagttgataaggactaattgtttaatgagtttatttatctacagtaggttagggatcctgggttctgtttatatgaagttcttcccagtttgtgaattctagtacagcagccatgcagccaccttatttcatagatgccatctgtgtgtcctcttgactaccttctatttagaggaagaatgagagctttgtgtgtttaactgagcttatagtaggacttctttgcatatgtatggtactgaaaaatcttaatatacatctttaatcctttttaggttgtcctttaaagagtttttgactagtttctttttcttgacagctcttctctttggacacatgggccttcttagagggttcagtctaggacccggctctcctggccctgtgttgagggtagctggtccctctgtccctgtgtctgctagcactagactttgttgctgcagattgatccagtgggtacataggctaattaatgtgagtctttttccttgtttaaaggagtccctcttgctgaaagtagatgattactattgctgtagtgttaggaaagtattaagtttgtgctgaaaatccattgccatttggtacaaatgacatttgttctttctgtgaaagagatgccctcgagtgtgtttgtacacaaacccttaggatggtgagttgaagcatcaccctcgcgctatcttcagtgacgggtgacggctcagggagatggcaggcagattgggctctaagtcattattctctcagttactccattggtgaaatggccctttccctctttgcagttcagtctaagtctcgtatttgctttgctgtctgtgtgctgaagctcgtcccgtgtgagttgctgtctgccccttgtcaggctgtgaggtgctcgtgtagacctggagcatgcaggctgcctccgtttttgggtactgtgttgtgttttgctctgtctaaaaacatctgcatagttttcaactggaaaaagaaaaaacttaaaaatgggatgtcctaaaatgaaagctgctcaaagtcacagaacaaccgagggacaaaggagattggatgactgggaagcgctggcccggaacagcccctgcaactgtggggcctgcacacagcccttccacagttggcactgcaggtgcaggccaaccctttaaagaataaacaaggaagtcagctctttcactttttacaagttggcaaaaacagacttccggggaatttcgatgttttcccgtgttgtagagcttccagggtttaataaaactggttaaaaattgagtctttccctgaagtaagtgctctttccagatgaaaactactcttttggttttgtttgaaagtaagaaagggaggggaaactttgctcttttaataattatgttcagcctatgatgaagtatttgattattagacagcaatgtcactaataagttttaagttgtccaaagttaattgtaaacatcatcagtacagtactcttagttacagtaaagcaattgttgcaagatgaatggctaatattttggtgcagtgtttgatgttcaaaacaaaatgttacaacaataaacgaacataacat

SEQ ID NO: 5026 - DNA, 880 bp, Homo sapiens
gaattaaacaaccaccatgtcgagcaaaaaggcaaagaccaagaccaccaagaagcgccctcagcgtgcaacatccaatgtgtttgccatgtttgaccagtcacagattcaggagttcaaagaggccttcaacatgattgatcagaacagagatggcttcatcgacaaggaagatttgcatgatatgcttgcttctctagggaagaatcccactgatgcataccttgatgccatgatgaatgaggccccagggcccatcaatttcaccatgttcctgaccatgtttggtgagaagttaaatggcacagatcctgaagatgtcatcagaaacgcctttgcttgctttgatgaagaagcaacaggcaccattcaggaagattacctaagagagctgctgacaaccatgggggatcggtttacagatgaggaagtggatgagctgtacagagaagcacctattgacaaaaaggggaatttcaattacatcgagttcacacgcatcctgaaacatggagccaaagacaaagatgactgaaagaactttagctaaaatcttccagttacattgtcttactctcttttacttctcagacacttcccccaccctcatagaacctgttgcatgcaacttagtttcacagctttgcctcttctttttgatgtatttattccagacctttctgccacttagcacttgtataatcagactggaaatggggatgagggtgtaaattgtattgaaaaagatcgcgaataaaaatcaacaaatgtgaaagcccagaaaaatatattcgtatttctggttttgctggatttttacatttttatataataaaaatgttattttgaaataaagattatgctgactcaaatgcaatgt

SEQ ID NO: 5027 - DNA, 543 bp, Homo sapiens
gaattaaacaaccaccatgtcgagcaaaaaggcaaagaccaagaccaccaagaagcgccctcagcgtgcaacatccaatgtgtttgccatgtttgaccagtcacagattcaggagttcaaagaggccttcaacatgattgatcagaacagagatggcttcatcgacaaggaagatttgcatgatatgcttgcttctctagggaagaatcccactgatgcataccttgatgccatgatgaatgaggccccagggcccatcaatttcaccatgttcctgaccatgtttggtgagaagttaaatggcacagatcctgaagatgtcatcagaaacgcctttgcttgctttgatgaagaagcaacaggcaccattcaggaagattacctaagagagctgctgacaaccatgggggatcggtttacagatgaggaagtggatgagctgtacagagaagcacctattgacaaaaaggggaatttcaattacatcgagttcacacgcatcctgaaacatggagccaaagacaaagatgactgaaagaactt

SEQ ID NO: 5028 - DNA, 844 bp, Homo sapiens
aaccaccaccatgtcgagcaaaagaacaaagaccaagaccaagaagcgccctcagcgtgcaacatccaatgtgtttgctatgtttgaccagtcacagattcaggagttcaaagaggccttcaacatgattgatcagaacagagatggtttcatcgacaaggaagatttgcatgatatgcttgcttctttagggaagaatccaactgatgagtatctagatgccatgatgaatgaggctccaggccccatcaatttcaccatgttcctcaccatgtttggtgagaagttaaatggcacagatcctgaagatgtcatcagaaatgcctttgcttgctttgatgaagaagcaactggcaccatacaggaagattacttgagagagctgctgacaaccatgggggatcggtttacagatgaggaagtggatgagctgtacagagaagcacctattgataaaaaggggaatttcaattacatcgagttcacacgcatcctgaaacatggagccaaagacaaagatgactgaaataacttcaaattccagccaaacgttccttgttgccactttgggtattctgagattttctcttgcatgcccttagctttacagcttttgcatttcctgttgtatttattctcagccattttgggcatatgtatctttataatcagactggaaacgggactttctattaatatcattttcagaataaaaaatagggtaatttaacctaccagcccttctcccccaataactgtggtctatacagagtcaatatattttttcagagaaagttattcgctcgattttttctgaatcataattaaactttatgataaaata

SEQ ID NO: 5029 - protein, 171 aa, Homo sapiens
MSSKRTKTKTKKRPQRATSNVFAMFDQSQIQEFKEAFNMIDQNRDGFIDKEDLHDMLASLGKNPTDEYLDAMMNEAPGPINFTMFLTMFGEKLNGTDPEDVIRNAFACFDEEATGTIQEDYLRELLTTMGDRFTDEEVDELYREAPIDKKGNFNYIEFTRILKHGAKDKDD

SEQ ID NO: 5030 - DNA, 1587 bp, Homo sapiens
atgcacgcacacacgcatacagacaccacacacgagagagagagatacaaaagcagaccagaggcaccttttagactgacacatgagtggattcggagtctgcaggttgcagcagaggaaactgtgagctggagaggcaacctcatttctagcagcggcagagttttggggcctctttggagacagggacgtgggcacagggatctaatggagacagcccatcagcctgcagaaggaaccaggtcattggccctggcagatccttctgcccatagcctgctattgggttctgataacatccaggactcaggactcagctttgactttgcttttggctgcccgtattcagacatgaacttgaaaaaggaggcaacacttcacgatcgtttgagagaacaaacacaggcaaatttggaatcagactcttcacattcaaaatcaaaaagcctctgtagtttgaacttcaatggaaaacatgaaaaggtgaacagtcagcccaggcaaaaggcaatcatgttcaagaccttgagcaccctagaccctgactgtgcaagatttgaagggacgactgcttctcctaagcctcagagccttgctctttgcattcagcaggataatgaatctagattttatttctgttctttgcccagacttgtacagcaggcaaagtgtttgaaaatcaaaggaaaagaagatattgacttggataatctcttcagagaggccatggagggaaaccaggagtgtctcactgaacttgtgaagaagccacagccaagccctggggcccagtcatcctgcagcagtgaccactccccggcagggagtgcagccaatacagacagtggtgtggaaatgactggcaatgcagggggcagcactgaagacctctccagcttggacgagggaccttgcattgctggcactggtctgtccactcttcgccgccttgagaacctcaggctggaccagctacatcaactccggccaatagggacccggggtctcaaactgcccagcttgtcccacaccggtgagacctgggtgtgggagtgcttgccaaagttgcggactgccaaccacagctggtactgtccagggcctgccctgagcacactgacatctgcccgtgctgaagatgcaaagcctgttgcagcaggagctgctggcaccagccctgatcattccctccttttgcaatgcctcagctcttttatttccatctgttgttctatgataggctgctctccccacgtttctgataattatggggtaaaaccgggaaggctgcagacatcagaggagagctctatattctcctactttaaaatgttgcctaagacaagcaacaaactcaatgtactttgccctctgagagagctcagaatccttgtcctcaggaatcatgcgatcaatgcaaaggagctcgccatgatcgccaccggcggcctgctaaggatttccgccagaaagcaggatccactccgccccccaagccagatacccaagcgcaagcggaaagccaagaagaggcgcaagaacgacgtggtggtggttaatgtgtttggagcactaaatacgacttga

SEQ ID NO: 5031 - DNA, 2338 bp, Homo sapiens
agagcttctttgaagggcagtctgcaccatgggactcggctaagaaagatgagaacagaatgaagaacagatacgggaatatcattgcatacgatcattcccgagtgaggctgcagacaatagaaggagacacaaactcagactatatcaatggcaattatatcgatggttatcatcgacccaatcattacattgctacccaagggccaatgcaggaaaccatctatgacttctggaggatggtgtggcacgaaaacactgcaagtatcatcatggtgaccaatcttgtggaagtgggaagggtcaaatgctgcaaatactggccagatgacacagagatatataaagacattaaagttaccctaatagaaacagaactactggcagaatatgtgataagaacatttgctgttgaaaagagaggtgtgcatgaaatccgagagatcagacagtttcacttcactggctggccggatcatggggtcccctaccatgccaccggcctgctgggattcgtgcggcaagtcaagtccaagagcccgcccagtgcaggcccactggtggtgcactgcagtgctggtgcagggaggactggctgtttcatcgtcattgatatcatgttggacatggccgaaagggaaggggtcgtagacatctacaactgcgtcagggagctgcggtcacggagggtgaacatggtgcaaacagaggagcagtatgtgtttatccacgatgcgatcctggaagcctgtctttgtggggacacctctgtgcctgcttcccaagttaggtctctgtattatgacatgaacaaactggatccacagacaaactcaagccagattaaagaggaattccggacgctaaacatggtgacaccaacgctgcgagtagaggactgcagcatcgcactgttgccccggaaccatgagaaaaaccggtgcatggacatcctgcccccagaccgctgcctgcccttcctcatcaccatcgatggggagagcagcaactacatcaatgctgccctcatggacagctataaacagccttcagcttttatagtcacccagcatcctttgccaaacacagtgaaagacttttggagactggtcctggattatcactgcacatccgtagttatgctaaatgatgtggatcctgcccagttgtgtccacagtactggccagaaaacggagtacacagacacggccccatccaggtggaatttgtctctgctgacctggaagaggacatcatcagcaggatattccgcatttacaatgccgccagaccccaagatggatatcggatggtgcagcaattccagttcctgggctggccgatgtacagggacacaccagtgtctaagcgctccttcttgaagctcattcgccaggtggacaagtggcaagaggagtacaatggcggggaaggccgcacggttgtgcactgcttgaacgggggaggccgcagtgggacgttctgcgccatcagcatcgtatgtgagatgctccggcaccagagaaccgtggatgtctttcacgctgtgaagacactgaggaacaacaagcccaacatggtcgacctcctggatcagtacaagttctgctacgaggtggccctggaatacttgaattctggctgatggtgtaaacagctctgcaaacaatccctttcataccacaaagccaagacgttccatggtatttgtgcaaaagagatgaagacttctcaatatgcttattttgctttgcataattggctctttttaagagcccaagaaagtgtttctaaaattgcttgcactgcccaatcccagtaatgctgctgcctgacagaaacacacacacagccacagttgccaaatcccgtactccttgccaccggcttcctagagcagcgtagacagctggtaaactgaagagcacaactatattcttatgaaggaatttgtacctttggggtattattttgtggcccgtgaccctcgttattgttacagctgagtgtatgtttttgttctgtggagaatgctatctggcattatggtaatatattattttaggtaatatttgtactttaacatgttgcataatatatgcttatgtagctttccaggactaacagataaatgtgtaatgaacaaagatatgttgtatgagtcgtcgtttctgtcagatttgtattgtttccaagggaaaagcttgggggaggactcagttcacaaaatgcaaaactcaacgatcagattcacggacccagagcttttccatgtgtttatattgtaaatatttttgatttcatcaaattatttattcattaaaagaaatttttgtg

SEQ ID NO: 5032 - DNA, 1500 bp, Homo sapiens
cggagggtggggagcggaaagcaggacgcacggctcccgcggcccgctggctgcccttcccgccagcgcaggtgtgggacgggcggcggactaggcacagagctgcgggagcaggcacagggagtgtggagcctggcggcgggacggcgggatccggtgggagccggagtcccgccgaggggggctggaggtggaggggcccggcgaggccgcgatgaagccgagcggcgaggaccaggcggcgctggcggccggcccctgggaggagtgcttccaggcggccgtgcagctggcgctgcgggcaggacagatcatcagaaaagcccttactgaggaaaaacgtgtctcaacaaaaacatcagctgcagatcttgtgacagaaacagatcaccttgtggaagatttaattatttctgagttgcgagagaggtttccttcacacaggttcattgcagaagaggccgcggcttctggggccaagtgtgtgctcacccacagcccgacgtggatcatcgaccccatcgacggcacctgcaattttgtgcacagattcccgactgtggcggttagcattggatttgctgttcgacaagagcttgaattcggagtgatttaccactgcacagaggagcggctgtacacgggccggcggggtcggggcgccttctgcaatggccagcggctccgggtctccggggagacagatctctcaaaggccttggttctgacagaaattggccccaaacgtgaccctgcgaccctgaagctgttcctgagtaacatggagcggctgctgcatgccaaggcgcatggggtccgagtgattggaagctccacattggcactctgccacctggcctcaggggccgcggatgcctattaccagtttggcctgcactgctgggatctggcggctgccacagtcatcatcagagaagcaggcggcatcgtgatagacacttcgggtggacccctcgacctcatggcttgcagagtggttgcggccagcacccgggagatggcgatgctcatagctcaggccttacagacgattaactatgggcgggatgatgagaagtgactgcggctgaggcaaagctgctcccaaggcctccctgggctgctgtgggctcctggggaggtggccctcgtggcccacgctccatgccagtggctcacgctctgctcctggctaccccagagggagttgtcacgctacagtgagtggctggccttttaaatcgacgtctctctcaccaggatttggtgtttagctgtttctctctttaatctcacgtagcctttttcaggttagtacgtgttcttctgtcagggccaaaactcaaatctcctgtgaaatacgtattgataatccaatcttgatttttccccccagaatataaatctcaggtaataaggctttagaactgctgataaagcggatcgttctcaggccctccccccggagtacttcagaatgcaataaatcaaaataatggc

SEQ ID NO: 5033 - protein, 288 aa, Homo sapiens
MKPSGEDQAALAAGPWEECFQAAVQLALRAGQIIRKALTEEKRVSTKTSAADLVTETDHLVEDLIISELRERFPSHRFIAEEAAASGAKCVLTHSPTWIIDPIDGTCNFVHRFPTVAVSIGFAVRQELEFGVIYHCTEERLYTGRRGRGAFCNGQRLRVSGETDLSKALVLTEIGPKRDPATLKLFLSNMERLLHAKAHGVRVIGSSTLALCHLASGAADAYYQFGLHCWDLAAATVIIREAGGIVIDTSGGPLDLMACRVVAASTREMAMLIAQALQTINYGRDDEK

SEQ ID NO: 5034 - DNA, 4548 bp, Homo sapiens
ggcacgattctgggtacaggtgatgagggatttgaggaatggggtaaaacttaagaaggtccaagagcggcagtacaaccctttgcccattgaatatcagctcaccccttatgagatgttaatggatgacattcgctgcaaaagatacaccttgcgaaaagtgatggtgaatggtgatattccccctcggttaaaaaagagtgctcatgaaatcatcctcgacttcatcagatccagacctcctttaaatccagtctcagccagaaaactgaaaccaactccaccacggccacggagcctccatgaaagaatattagaagaaattaaagcagaaagaaagctgcggcctgtatcaccagaggagattagacgtagcagattagatgtgactacccctgaatctacaaagaatcttgtggagtcatctatggtgaatggaggtttgacatcacaaacaaaagaaaacgggttaagtacctcacagcaggtgcctgcacagcggaagaagctcctcagagccccaactctggccgaactggacagctctgagtctgaggaagaaacgctgcacaagtcgaccagcagcagcagcgtgtctccctctttccctgaagagccagtcctggaggccgtgtccacaaggaagaagcctccaaaattcctgcccatatcatcaacaccccagccagagagacggcagccaccccagagacgacattccattgaaaaggaaacgcctactaacgtgaggcagttcctgccgccttccaggcagagttcccgctctcttgaggaattctgctacccagtggaatgcctcgctcttactgtggaagaagtgatgcatattcgccaggtcctggtgaaggcagagctggaaaaataccaacagtataaagacatctacaccgccttgaaaaaaggaaagctctgcttttgttgccgaaccaggaggttttccttcttcacttggtcttatacctgtcagttctgtaagaggccggtgtgctcacagtgttgcaaaaagatgcggctgccctccaaaccatactccactcttcctatcttttcattgggaccttctgctctgcaaagaggggaaagtagtatgaggtcagaaaaaccctccactgcccatcatcggccacttcggagcattgccaggttctcctcaaaatctaagtctatggacaaatcagatgaagaactccagtttcccaaagagttgatggaggactggagcaccatggaggtgtgtgtggactgcaagaagttcatttcggaaatcatcagttcaagccggcgcagtctggtgttggccaacaaaagggcccgattgaaaaggaaaacgcagtctttctacatgtcctcgccaggcccctcggagtactgcccttcagagaggacgatcagtgagatctgagcctcgtgcctttcagctgcttttgtgctacgagtcagcgtccgtgcgcgaggacactgagccgggctggctctcctttctgtggttttatttaatgggcttgaatttgcattagatcagatttttgccgcatcacattgttccacagactgaatgctgtgttcgtatcgattgatgaaacgtgacaggtccgccaattgctcgtttgcactgagagaggacaacagtttgaaacttacttttgtgtgtgtgtggctttggaagccagtagctacttccttagttcagttctttactgttcctcgaataatctcctgactaaggcaaaaaaaaaaagcttctcctacgagaatcagtctaacagagatgccgatgtcagcacagccctaagcagtaagtcatattggcatttccacgtgactgtgtttctatcccgtgtacagagagatccagagccctacactccacgacctgggggctcacagcacagaacctagaagcacctgctgacactcttcaactgatttttaaatgttgttgcttggagataaaaattacataagggactttttgcctgcattctagtgcaaaacatctgaagagctgtacacccacaagggtgactatttcccctgagtggccgtgttgtcccagtgccctggttcagtgtctcctgagtggatgacaggtcttcattctctatcttgaatgtattatggttactaatagttttataatggaggtctaagaattaaagttgtgtgggagtttcaggacaaaggaaggctaaaagtttgtcaagacgttgagcgtattttggttacctatgagaagggttgtgacagtgtacagtggcagctgttggccacgctgcagaaatgagctggagctcatgggttttcagctacatttttcataactttgtagtacatccatcttgagtaaattaagccacaatttggtacctagggtctcaaactaaaatttatttttataaatgaattttaaaagaaaaaatatctacttcttttaaagttagaagaaaattaacctgctgacaggcaacatttttggggtgctttctgcactagttttccttgtaaatgatttgagtgagtaggtttggtttctgacgaaagtagactggagggtagcattgtatgcctcaaatgtctcagtgtgtttggctcatacgtgggctatactgtattattttggtatgcttacaaatgactaaccaatcaaattgtcattaatgtttggaaaatctgttaatgcacatgcacaataatttcctgaaagccataggacatgtctgtagtcagcaccacgatagcaccgtttcatgaaaggcatggcggctgcatttcataccacatcaaaatacagtaacatttctatactaaattaacagtaatacctcaaaactgctccggtagtagtttttaatggattgaaatttacagtttagtaaaaggcttaaaattacttatacttatgaaataaactttaccagttgactaaaataatgcatgttaacagttggtctgtatttgcatgtaaaagtgggccaccagagaacccttattgattacttaagtgtttacattattttaaagactcctgtttaagagctttcagaattgtactgggtgaatctcatttataaaacttcctaagagactatctgaactctatactccagacagttaggtgggagtataaatctaccccttttgatgaccccaggcttgagtttttaaaatgactacccagaagggcacaagggggaaggaaatggtatttgtatatgtatataaatatgcacctaggagaatgtgctttttaaaataatgactactgtttttattaaaacataagaaactacacccccaaaataagactttcattcacattcacaaagcaaacatctagtacatgtctttcacttcactttatgatagtgtattggatgatttgggcattacgatcacctcttaccacagcacagaacatacattcttcaacagcattaacggagtttgccaagtgcattaaagaggtcacgtggagggtacgttcatatgaaacaatctgcagaaagtggggtaagaaagggcacatggcacagttaaagttgtagaaatcaaattactatcattttttgttgccaaaacaaagtcttacatttaacccccctttctaccacccccctccacacttcacgtcagctacatagtttccacagggtaattcactaagagcttgtggagcttggttttaaaatccttagcctggtctgactttaggcatagcttccagttcttccttccgtgtcctggtttcttgttcagttttacttctaatccaacaacaaaagaaatgtctggctggtctcagctagagtctgatgtgtcttagagcatgtgtgcgtatctgaaccatcatccctgctctcatctcagctccctccaggcctgagcaccggttccttttgtcccatacgtcatgaagtcacactattgggaaacctgtgcttccctctccatggcttaactccctgtcagtgtcggagtgtataagaatgcttgtaaatactgtaatatatttattaatatttgaaaggcattcattcagtggacagtgggaattaactctcccaaggcaagtgaaaatgaatgattgacgtacgttgatttaacaatcttactagattttaattcttaaggatttcaaatgaaaccagaaggtggttatgtaagaggcttaaaatgatcttatgtttaaagagattctgttattagcaccatgaactcgtactatgaaatttttaagccttttatttttctaactatattactgtaggactggatattaggtgtcatataggaaacacaaaagtttattgctgtttgctaaagcaaaatagcagaaaattttgtatatgcaaaactgttgaaggaccatagagaaatgtgtactactgacggggcttttactaggcttcctgcgtgtgtaaaagtcgaggtattgctggcattcagggtgacatgatggtactaaatgttttccattaaagtcttctattttaaaatttagagaaaaataaaatggctttccatcag

SEQ ID NO: 5035 - protein, 480 aa, Homo sapiens
MRDLRNGVKLKKVQERQYNPLPIEYQLTPYEMLMDDIRCKRYTLRKVMVNGDIPPRLKKSAHEIILDFIRSRPPLNPVSARKLKPTPPRPRSLHERILEEIKAERKLRPVSPEEIRRSRLAMRPLSMSYSFDLSDVTTPESTKNLVESSMVNGGLTSQTKENGLSTSQQVPAQRKKLLRAPTLAELDSSESEEETLHKSTSSSSVSPSFPEEPVLEAVSTRKKPPKFLPISSTPQPERRQPPQRRHSIEKETPTNVRQFLPPSRQSSRSLEEFCYPVECLALTVEEVMHIRQVLVKAELEKYQQYKDIYTALKKGKLCFCCRTRRFSFFTWSYTCQFCKRPVCSQCCKKMRLPSKPYSTLPIFSLGPSALQRGESSMRSEKPSTAHHRPLRSIARFSSKSKSMDKSDEELQFPKELMEDWSTMEVCVDCKKFISEIISSSRRSLVLANKRARLKRKTQSFYMSSPGPSEYCPSERTISEI

SEQ ID NO: 5036 - DNA, 386 bp, Homo sapiens
ttctttcttgccgtgccgatagcgctcacgcaagcatggttaacgtccctaaaacccaccagactttctgtaagaagtgtggcaagcaccaaccccacaaagtgacacagtacaagaagggcaaggattctctgtatgcccagggaaagtggcgttataacaggaagcagagtggctatggtgggcagactaagccgattttccagaaaaaggctaaaactacaaagaatactgtgctaaggcttgagtgcgttgagcccaactgcagatccaagagaatgctggctattaaaagatgcaagcattttgaactgggaggagataagaagagaaagggccaagtgatcccgttctaagtgtcatcttttattatgaagacaataaaa

SEQ ID NO: 5037 - DNA, 2261 bp, Homo sapiens
ggcacgaggcagaccatgaggtttaactgagtgaacaccgctgttccggggctctgcctctcgctgaacgctcctgctgggctggggcctcccgagtagctggaagtacagataatcacagctggcttatcaatattgctgtttgatgcgatcctgaccagtgcaaccacgggatgcctcctgctcggtgcgcttggagaggccttgctggttttctcagagcggaagagctcctgaacaagacggtcaagagaaagactcacaggctgctgcgggagaacagcttgtacacctgtgtacgagcccctggtctcatagctccctgttggatgtgtcagaaagaggaatgcaaggacagtgaggccaggtgggcagtgccatcaccctcacccaagtgaatgtggtggtggctgatgaggccgaggccctggtgcttcaaggagcaccctttctgggggtctgcaggtcactgcagaggagcggtctgttacatcttcccatttggagaacctctctcaaccgtgctgtagctggttctgcagaaacaggaagtacaggatttcatgggctggctctgctcgcctcgactgagcttcacacctctggatgccacatgctctctcccaaacactgctttcagtgcaaggtagtgggcctaaggggttttggttgtcttttttttttttcatttttaaaattttaaatttttatttattattattttttagagacaaggcctcgctctatcgcctaggctgaagcacagtggtgcgatcacagctcgctgcagccttgacctcctaggatcaagccatcctcctgcctcagcatccacagtagctgatgtgcaccaccagacccgtctcattttttctatttttattattttagagatggggatctcactgtgttggccaggctggtctcaaactcctgggctcaagcaatcctcccaccttggcctcaaagtattgagattacaggcatgagccactgcacccggcctttctcatttttatttttaaattgacagacgtaacagtgcgcatttatcacgcacaacacaatgctttgggaatggttaaatctagctcacaaatgcattacctcacacggttgtcatttttgtggtgaggcttggttgtatgttttgtttcattcatgtttttacatccttggagtctcctctgggtccgtcctttctttgctgtcatgctggcttgcctaaggcccaccgccacctgcgtacgagcattttaaactctagagtgagtgacagcctttttatggttggtgttactatttatttcctgcctctaaacttctcgtggtccttataaacttgtcaggatgtgtgttgcgttgaattctgcatgtcctttttttgcccaccctcaggttaagctggtactaacttatccccagaggaaacagggtttatgagcactgacagatgtcttccctgggcaaaaaaaaaaaaaaaatagtatatgtatacacacacacatacacatttatatttatatttcttaaagcttttaatccctttcattccctgatatctcagagatttcaaatcattgaacactgaagtatatttttcaggccagatgaaaaattgtattaaaaccctattcctggtcaggcgcagtggctcacgcctataatcccagcactttgggaggccgaagtaagcagatcacctgaggtcgggagttcaagacaaacctggccaacatggtgaaaccctgtctctactaaaactacaaaaaaattagcctgatgtggtgttgtgtgcctgtagtcccagctacttaggaggctgaggtaggagaattgcttgaacctgggaggcggaggttgcagtgagccaaaattacgccactgcactccagcctgggcaacagagcgagacagtctcaaaaacaacaacaacaacaaaaaccctattccttgcctttgtaggagtcaaaataaatgaacttcttttttcttttttttattattatactttaagttctggggtacacgtgcagaatgtgcaggtttgttacataggtatgcacgtgccatggtggtttgctgcacccatcaacctgtcacctacattaggtatttcccctaatgttatccctcccctagccctccatcccctgacaggccctggtgtgtgatgttcccctccctatgtccatgtgttctcattgctccaaaataaatgaatttacacaaaaaaaaaaaaaaaaaaaaaaaaaaaaaaa

SEQ ID NO: 5038 - protein, 74 aa, Homo sapiens
MPPARCAWRGLAGFLRAEELLNKTVKRKTHRLLRENSLYTCVRAPGLIAPCWMCQKEECKDSEARWAVPSPSPK

SEQ ID NO: 5039 - DNA, 1633 bp, Homo sapiens
gaattccccccccccccccagtgctccgcgcgctcttgacgtccggagcccctggagtaggcgcttccggccattcatactgcagtcggtcagtgttcggttgaaggattctgtgtgctgtcggacccagagggtgacggcgccgctaggatgaagctcgtgagatttttgatgaaattgagtcatgaaactgtaaccattgaattgaagaacggaacacaggtccatggaacaatcacaggtgtggatgtcagcatgaatacacatcttaaagctgtgaaaatgaccctgaagaacagagaacctgtacagctggaaacgctgagtattcgaggaaataacattcggtattttattctaccagacagtttacctctggatacactacttgtggatgttgaacctaaggtgaaatctaagaaaagggaagctgttgcaggaagaggcagaggaagaggaagaggaagaggacgtggccgtggcagaggaagagggggtcctaggcgataatgtctctcaagatttcaaagtcatatgagatttgggatattttttgtacaggttgtgtttgtttatgtcagtttttaataaacataaatgtgggacagagctgtctatttagtatatcaaagttttagtagtttcctccacattcacgaaattaccacagtgagagctaagcatttctactgggcagtttcatttttagttgatcaggttttaagtttttgaactaaaatttttctttttctttttatgatgaataaggttaaaataaaagccttagacaaattaaatttggcagagtttaattgagcaaaggacaattcacaaatcaggtagcccctgaaccataataggctcagaggcttcagcccagctgcatagttgaagatttatggacagaaggaaagtgatgtatggaaaatggaagtgagatacagcaacagccggattagttacagttcagcgtttgccttatttgaatatggtttgaacagttcgctgtctttggttggctgaaacttagtgattgccacaagagtagggtaccgtctgtttacacgtccagttaggctacagttctatgtactgagaaacctttaagctgaacttgagatatgtaaagagactttaggctaaacttaacaatatatataggaatatatcccttctacttcacatgcactgaatatgcattttattgctttactcttcattctgtggcacctacccacaggggaagtaagaagtttgttttggtatttcggaaactaaagtccttatgggatggggtctagaattgattctcctttcctgagttttactccacggagtcttaggtacctggtaaaaagttgtcttctaaattaagggtcattgctttgttgtctagctgctaatgtcttacttttgtttcttttgctttttaatcagttcttaataggatatagttttatgttttccaagttataacttggagttaatggtcactagattatcagttatgagcagtgttaaaatctcctattaatgtgtaatgtacctgtcagtgcctcctttattaaggggttctttgagaataaaagagaaaagacctactttatttgacagcaaaaaaaaaaaggaattc

SEQ ID NO: 5040 - DNA, 5433 bp, Homo sapiens
atgggatggctgtggatctttggggcagccctggggcagtgtctgggctacagttcacagcagcaaagggtgccatttcttcagcctcccggtcaaagtcaactgcaagcgagttatgtggagtttagacccagccagggttgtagccctggatactatcgggatcataaaggcttgtataccggacggtgtgttccctgcaattgcaacggacattcaaatcaatgccaggatggctcaggcatatgtgttaactgtcagcacaacaccgcgggagagcactgtgaacgctgccaggagggctactatggcaacgccgtccacggatcctgcagggcctgcccatgtcctcacactaacagctttgccactggctgtgtggtgaatgggggagacgtgcggtgctcctgcaaagctgggtacacaggaacacagtgtgaaaggtgtgcaccgggatatttcgggaatccccagaaattcggaggtagctgccaaccatgcagttgtaacagcaatggccagctgggcagctgtcatcccctgactggagactgcataaaccaagaacccaaagatagcagccctgcagaagaatgtgatgattgcgacagctgtgtgatgaccctcctgaacgacctggccaccatgggcgagcagctccgcctggtcaagtctcagctgcagggcctgagtgccagcgcagggcttctggagcagatgaggcacatggagacccaggccaaggacctgaggaatcagttgctcaactaccgttctgccatttcaaatcatggatcaaaaatagaaggcctggaaagagaactgactgatttgaatcaagaatttgagactttgcaagaaaaggctcaagtaaattccagaaaagcacaaacattaaacaacaatgttaatcgggcaacacaaagcgcaaaagaactggatgtgaagattaaaaatgtcatccggaatgtgcacattcttttaaagcagatctctgggacagatggagagggaaacaacgtgccttcaggtgacttttccagagagtgggctgaagcccagcgcatgatgagggaactgcggaacaggaactttggaaagcacctcagagaagcagaagctgataaaagggagtcgcagctcttgctgaaccggataaggacctggcagaaaacccaccagggggagaacaatgggcttgctaacagtatccgggattctttaaatgaatacgaagccaaactcagtgaccttcgtgctcggctgcaggaggcagctgcccaagccaagcaggcaaatggcttgaaccaagaaaacgagagagctttgggagccattcagagacaagtgaaagaaataaattccctgcagagtgatttcaccaagtatctaaccactgcagactcatctttgttgcaaaccaacattgcgctgcagctgatggagaaaagccagaaggaatatgaaaaattagctgccagtttaaatgaagcaagacaagaactaagtgacaaagtaagagaactttccagatctgctggcaaaacatcccttgtggaggaggcagaaaagcacgcgcggtccttacaagagctggcaaagcagctggaagagatcaagagaaacgccagcggggatgagctggtgcgctgtgctgtggatgccgccaccgcctacgagaacatcctcaatgccatcaaagcggccgaggacgcagccaacagggctgccagtgcatctgaatctgccctccagacagtgataaaggaagatctgccaagaaaagctaaaaccctgagttccaacagtgataaactgttaaatgaagccaagatgacacaaaagaagctaaagcaagaagtcagtccagctctcaacaacctacagcaaaccctgaatattgtgacagttcagaaagaagtgatagacaccaatctcacaactctccgagatggtcttcatgggatacagagaggtgatattgatgctatgatcagtagtgcaaagagcatggtcagaaaggccaacgacatcacagatgaggttctggatgggctcaaccccatccagacagatgtggaaagaattaaggacacctatgggaggacacagaacgaagacttcaaaaaggctctgactgatgcagataactcggtgaataagttaaccaacaaactacctgatctttggcgcaagattgaaagtatcaaccaacagctgttgcccttgggaaacatctctgacaacatggacagaatacgagaactaattcagcaggccagagatgctgccagtaaggttgctgtccccatgaggttcaatggtaaatctggagtcgaagtccgactgccaaatgacctggaagatttgaaaggatatacatctctgtccttgtttctccaaaggcccaactcaagagaaaatgggggtactgagaatatgtttgtgatgtaccttggaaataaagatgcctcccgggactacatcggcatggcagttgtggatggccagctcacctgtgtctacaacctgggggaccgtgaggctgaactccaagtggaccagatcttgaccaagagtgagactaaggaggcagttatggatcgggtgaaatttcagagaatttatcagtttgcaaggcttaattacaccaaaggagccacatccagtaaaccagaaacacccggagtctatgacatggatggtagaaatagcaatacactccttaatttggatcctgaaaatgttgtattttatgttggaggttacccacctgattttaaacttcccagtcgactaagtttccctccatacaaaggttgtattgaattagatgacctcaatgaaaatgttctgagcttgtacaacttcaaaaaaacattcaatctcaacacaactgaagtggagccttgtagaaggaggaaggaagagtcagacaaaaattattttgaaggtacgggctatgctcgagttccaactcaaccacatgctcccatcccaacctttggacagacaattcagaccaccgtggatagaggcttgctgttctttgcagaaaacggggatcgcttcatatctctaaatatagaagatggcaagctcatggtgagatacaaactgaattcagagctaccaaaagagagaggagttggagacgccataaacaacggcagagaccattcgattcagatcaaaattggaaaactccaaaagcgtatgtggataaatgtggacgttcaaaacactataattgatggtgaagtatttgatttcagcacatattatctgggaggaattccaattgcaatcagggaaagatttaacatttctacgcctgctttccgaggctgcatgaaaaatttgaagaaaaccagtggtgtcgttagattgaatgatactgtgggagtaaccaaaaagtgctcggaagactggaagcttgtgcgatctgcctcattctccagaggaggacaattgagtttcactgatttgggcttaccacctactgaccacctccaggcctcatttggatttcagacctttcaacccagtggcatattattagatcatcagacatggacaaggaacctgcaggtcactctggaagatggttacattgaattgagcaccagcgatagcggcggcccaatttttaaatctccacagacgtatatggatggtttactgcattatgtatctgtaataagcgacaactctggactacggcttctcatcgatgaccagcttctgagaaatagcaaaaggctaaaacacatttcaagttcccggcagtctctgcgtctgggcgggagcaattttgagggttgtattagcaatgtttttgtccagaggttatcactgagtcctgaagtcctagatttgaccagtaactctctcaagagagatgtgtccctgggaggctgcagtttaaacaaaccaccttttctaatgttgcttaaaggttctaccaggtttaacaagaccaagacttttcgtatcaaccagctgttgcaggacacaccagtggcctccccaaggagcgtgaaggtgtggcaagatgcttgctcaccacttcccaagacccaggccaatcatggagccctccagtttggggacattcccaccagccacttgctattcaagcttcctcaggagctgctgaaacccaggtcacagtttgctgtggacatgcagacaacatcctccagaggactggtgtttcacacgggcactaagaactcctttatggctctttatctttcaaaaggacgtctggtctttgcactggggacagatgggaaaaaattgaggatcaaaagcaaggagaaatgcaatgatgggaaatggcacacggtggtgtttggccatgatggggaaaaggggcgcttggttgtggatggactgagggcccgggagggaagtttgcctggaaactccaccatcagcatcagagcgccagtttacctgggatcacctccatcagggaaaccaaagagcctccccacaaacagctttgtgggatgcctgaagaactttcagctggattcaaaacccttgtataccccttcttcaagcttcggggtgtcttcctgcttgggtggtcctttggagaaaggcatttatttctctgaagaaggaggtcatgtcgtcttggctcactctgtattgttggggccagaatttaagcttgttttcagcatccgcccaagaagtctcactgggatcctaatacacatcggaagtcagcccgggaagcacttatgtgtttacctggaggcaggaaaggtcacggcctctatggacagtggggcaggtgggacctcaacgtcggtcacaccaaagcagtctctgtgtgatggacagtggcactcggtggcagtcaccataaaacaacacatcctgcacctggaactggacacagacagtagctacacagctggacagatccccttcccacctgccagcactcaagagccactacaccttggaggtgctccagccaatttgacgacactgaggatccctgtgtggaaatcattctttggctgtctgaggaatattcatgtcaatcacatccctgtccctgtcactgaagccttggaagtccaggggcctgtcagtctgaatggttgtcctgaccagtaacccaagcctatttcacagcaaggaaattcaccttcaaaagcactgattacccaatgcacctccctccccagctcgagatcattcttcaattaggacacaaaccagacaggtttaatagcgaatctaattttgaattctgaccatggatacccatcactttggcattcagtgctacatgtgtattttatataaaaatcccatttcttgaagataaaaaaattgttattcaaattgttatgcacagaatgtttttggtaatattaatttccactaaaaaattaaatgtctttt

SEQ ID NO: 5041 - protein, 1713 aa, Homo sapiens
MGWLWIFGAALGQCLGYSSQQQRVPFLQPPGQSQLQASYVEFRPSQGCSPGYYRDHKGLYTGRCVPCNCNGHSNQCQDGSGICVNCQHNTAGEHCERCQEGYYGNAVHGSCRACPCPHTNSFATGCVVNGGDVRCSCKAGYTGTQCERCAPGYFGNPQKFGGSCQPCSCNSNGQLGSCHPLTGDCINQEPKDSSPAEECDDCDSCVMTLLNDLATMGEQLRLVKSQLQGLSASAGLLEQMRHMETQAKDLRNQLLNYRSAISNHGSKIEGLERELTDLNQEFETLQEKAQVNSRKAQTLNNNVNRATQSAKELDVKIKNVIRNVHILLKQISGTDGEGNNVPSGDFSREWAEAQRMMRELRNRNFGKHLREAEADKRESQLLLNRIRTWQKTHQGENNGLANSIRDSLNEYEAKLSDLRARLQEAAAQAKQANGLNQENERALGAIQRQVKEINSLQSDFTKYLTTADSSLLQTNIALQLMEKSQKEYEKLAASLNEARQELSDKVRELSRSAGKTSLVEEAEKHARSLQELAKQLEEIKRNASGDELVRCAVDAATAYENILNAIKAAEDAANRAASASESALQTVIKEDLPRKAKTLSSNSDKLLNEAKMTQKKLKQEVSPALNNLQQTLNIVTVQKEVIDTNLTTLRDGLHGIQRGDIDAMISSAKSMVRKANDITDEVLDGLNPIQTDVERIKDTYGRTQNEDFKKALTDADNSVNKLTNKLPDLWRKIESINQQLLPLGNISDNMDRIRELIQQARDAASKVAVPMRFNGKSGVEVRLPNDLEDLKGYTSLSLFLQRPNSRENGGTENMFVMYLGNKDASRDYIGMAVVDGQLTCVYNLGDREAELQVDQILTKSETKEAVMDRVKFQRIYQFARLNYTKGATSSKPETPGVYDMDGRNSNTLLNLDPENVVFYVGGYPPDFKLPSRLSFPPYKGCIELDDLNENVLSLYNFKKTFNLNTTEVEPCRRRKEESDKNYFEGTGYARVPTQPHAPIPTFGQTIQTTVDRGLLFFAENGDRFISLNIEDGKLMVRYKLNSELPKERGVGDAINNGRDHSIQIKIGKLQKRMWINVDVQNTIIDGEVFDFSTYYLGGIPIAIRERFNISTPAFRGCMKNLKKTSGVVRLNDTVGVTKKCSEDWKLVRSASFSRGGQLSFTDLGLPPTDHLQASFGFQTFQPSGILLDHQTWTRNLQVTLEDGYIELSTSDSGGPIFKSPQTYMDGLLHYVSVISDNSGLRLLIDDQLLRNSKRLKHISSSRQSLRLGGSNFEGCISNVFVQRLSLSPEVLDLTSNSLKRDVSLGGCSLNKPPFLMLLKGSTRFNKTKTFRINQLLQDTPVASPRSVKVWQDACSPLPKTQANHGALQFGDIPTSHLLFKLPQELLKPRSQFAVDMQTTSSRGLVFHTGTKNSFMALYLSKGRLVFALGTDGKKLRIKSKEKCNDGKWHTVVFGHDGEKGRLVVDGLRAREGSLPGNSTISIRAPVYLGSPPSGKPKSLPTNSFVGCLKNFQLDSKPLYTPSSSFGVSSCLGGPLEKGIYFSEEGGHVVLAHSVLLGPEFKLVFSIRPRSLTGILIHIGSQPGKHLCVYLEAGKVTASMDSGAGGTSTSVTPKQSLCDGQWHSVAVTIKQHILHLELDTDSSYTAGQIPFPPASTQEPLHLGGAPANLTTLRIPVWKSFFGCLRNIHVNHIPVPVTEALEVQGPVSLNGCPDQ

SEQ ID NO: 5042 - DNA, 750 bp, Homo sapiens
cctttctgcccgtggacgccgccgaagaagcatcgttaaagtctctcttcaccctgccgtcatgtctaagtcagagtctcctaaagagcccgaacagctgaggaagctcttcattggagggttgagctttgaaacaactgatgagagcctgaggagccattttgagcaatggggaacgctcacggactgtgtggtaatgagagatccaaacaccaagcgctccaggggctttgggtttgtcacatatgccactgtggaggaggtggatgcagctatgaatgcaaggccacacaaggtggtggaagctacaatgattttggcaattacaacaatcagtcttcaaattttggacccatgaagggaggaaattttggaggcagaaactctggcccctatggcggtggaggccagtactttgcaaaaccacgaaaccaaggtggctatggcggttccagcagcagcagtagctgtgtcagtggcagaagattttaattaggaaacaaagcttagcaggagaggagagccagagaagtgacagggaagccacaggttacaacagatttgtgaactcagccaagcacagtggtggcagggcctagctgctacaaagaagacatgttttagacaaatactcatgtgtatgggcaaaaaactcgaggactgtgtttgtgactaattgtataacaggttattttagtttctgttctgtggaaagtgtaaagcattccaacaaagcgttttaatgtagat

SEQ ID NO: 5043 - DNA, 775 bp, Homo sapiens
cctttctgcccgtggacgccgccgaagaagcatcgttaaagtctctcttcaccctgccgtcatgtctaagtcagagtctcctaaagagcccgaacagctgaggaagctcttcattggagggttgagctttgaaacaactgatgagagcctgaggagccattttgagcaatggggaacgctcacggactgtgtggtaatgagagatccaaacaccaagcgctccaggggctttgggtttgtcacatatgccactgtggaggaggtggatgcagctatgaatgcaaggccacacaaggtggatggaagagttgtggaaccaaagagagctgtctccagagaagattctcaaagaccaggtgcccacttaactgtgaaaaagatatttgttggtggcattaaagaagacactgaagaacatcacctaagagattattttgaacagtatggtggaagcaattttggaggtggtggaagctacaatgattttggcaattacaacaatcagtcttcaaattttggacccatgaagggaggaaattttggaggcagaaactctggcccctatggcggtggaggccagtactttgcaaaaccacgaaaccaaggtggctatggcggttccagcagcagcagtagctgtgtcagtggcagaagattttaattaggaaacaaagcttagcaggagaggagagccagagaagtgacagggaagccacaggttacaacagatttgtgaactcagccaagcacagtggtggcagggcctagctgctac

SEQ ID NO: 5044 - protein, 153 aa, Homo sapiens
MSKSKSPKEPEQQRKLFIGGLSFETTDESLRSHCEQWGMLTDCVVMRDPNFKHSRGCGFVTYATVEEVDAAMNARPHKVDGRVVEPKRAVSREDSQRPGAHLTVKKIFVGGIKEDTEEHHLRDYFEQLEAILQVVEATVILAITTISLQILDP

SEQ ID NO: 5045 - DNA, 483 bp, Homo sapiens
cctttctgcccgtggacgccgccgaagaagcatcgttaaagtctctcttcaccctgccgtcatgtctaagtcagagtctcctaaagagcccgaacagctgaggaagctcttcattggagggttgagctttgaaacaactgatgagagcctgaggagccattttgagcaatggggaacgctcacggactgtgtggtaatgagagatccaaacaccaagcgctccaggggctttgggtttgtcacatatgccactgtggaggaggtggatgcagctatgaatgcaaggccacacaaggtggatggaagagttgtggaaccaaagagagctgtctccagagaagattctcaaagaccaggtgcccacttaactgtgaaaaagatattgtggtggaagctacaatgattttggcaattacaacaatcagtcttcaaattttggacccatgaagggaggaaattttggaggcagaaactctggcccct

SEQ ID NO: 5046 - DNA, 1732 bp, Homo sapiens
cctttctgcccgtggacgccgccgaagaagcatcgttaaagtctctcttcaccctgccgtcatgtctaagtcagagtctcctaaagagcccgaacagctgaggaagctcttcattggagggttgagctttgaaacaactgatgagagcctgaggagccattttgagcaatggggaacgctcacggactgtgtggtaatgagagatccaaacaccaagcgctccaggggctttgggtttgtcacatatgccactgtggaggaggtggatgcagctatgaatgcaaggccacacaaggtggatggaagagttgtggaaccaaagagagctgtctccagagaagattctcaaagaccaggtgcccacttaactgtgaaaaagatatttgttggtggcattaaagaagacactgaagaacatcacctaagagattattttgaacagtatggaaaaattgaagtgattgaaatcatgactgaccgaggcagtggcaagaaaaggggctttgcctttgtaacctttgacgaccatgactccgtggataagattgtcattcagaaataccatactgtgaatggccacaactgtgaagttagaaaagccctgtcaaagcaagagatggctagtgcttcatccagccaaagaggtcgaagtggttctggaaactttggtggtggtcgtggaggtggtttcggtgggaatgacaacttcggtcatggaggaaacttcagtggtcgtggtggctttggtggcagccgtgctggtggtagatatggtggcagtggggatggctctaatggatttggtaatgatggaagcaattttggaggtggtggaagctacaatgattttggcaattacaacaatcagtcttcaaattttggacccatgaagggaggaaattttggaggcagaaactctggcccctatggcggtggaggccagtactttgcaaaaccacgaaaccaaggtggctatggcggttccagcagcagcagtagctgtgtcagtggcagaagattttaattaggaaacaaagcttagcaggagaggagagccagagaagtgacagggaagccacaggttacaacagatttgtgaactcagccaagcacagtggtggcagggcctagctgctacaaagaagacatgttttagacaaatactcatgtgtatgggcaaaaaactcgaggactgtgtttgtgactaattgtataacaggttattttagtttctgttctgtggaaagtgtaaagcattccaacaaagcgttttaatgtagattttttttttttgcacccatgctgttgattgctaaatgtaatagtctgatcgtgacgctgaataaatgtctttttttttttaatgtgctgtgtaaagttagtctactctgaagccatcttggtaaatttccccaacagtgtgaagttagaattccttcagggtgatgccaggttctatttggaatttatatacaacctgcttgggtggagaagccattgtcttcggaaaccttggtgtagttgaactgatagttactgttgtgacctgaagttcaccattaaaagggattacccaaacaaagtcatggaatggttataaaagtgattgttggcacatcctatgcaatatatctaaattgaataatggtaccagataaaattatagatgggaatgaagcttgtgtatcatccattatcatgtgtaatcaataaacaatttaattctcttgaa

SEQ ID NO: 5047 - protein, 268 aa, Homo sapiens
MSKSESPKEPEQLRKLFIGGLSFETTDESLRSHFEQWGTLTDCVVMRDPNTKRSRGFGFVTYATVEEVDAAMNARPHKVDGRVVEPKRAVSREDSQRPDAHLTVKKIFVGGIKEDTEEHHLRDYFEQYGKIEVIEIMTDRGSGKKRGFAFVTFDDHDSVDKIVIQKYHTVNGHNCEVRKALSKQEMASASSSQRGRSGSGNFGGGRGGGFGGNDNFGRGGNFSGRGGFGGSRGGGGYGGSGDGYNGFGNDGSNFGGGGSYNDFGNYNN

SEQ ID NO: 5048 - DNA, 899 bp, Homo sapiens
aagtctctcttcaccctgccgtcatgtctaagtcagagtctcctaaagagcccgaacagctgaggaagctcttcattggagggttgagctttgaaacaactgatgagagcctgaggagccattttgagcaatggggaacgctcacggactgtgtggtaatgagagatccaaacaccaagcgctccaggggctttgggtttgtcacatatgccactgtggaggaggtggatgcagctatgaatgcaaggccacacaaggtggatggaagagttgtggaaccaaagagagctgtctccagagaagattctcaaagaccaggtgcccacttaactgtgaaaaagatatttgttggtggcattaaagaagacactgaagaacatcacctaagagattattttgaacagtatggaaaaattgaagtgattgaaatcatgactgaccgaggcagtggcaagaaaaggggctttgcctttgtaacctttgacgaccatgactccgtggataagattgtcattcagaaataccatactgtgaatggccacaactgtgaagttagaaaagccctgtcaaagcaagagatggctagtgcttcatccagccaaagaggtcgaagtggttctggaaactttggtggtggtcgtggaggtggtttcggtgggaatgacaacttcggtcatggaggaaacttcagtggtcgtggtggctttggtggcagctctaatggatttggtaatgatggaagcaattttggaggtggtggaagctacaatgattttggcaattacaacaatcagtcttcaaattttggacccatgaagggaggaaattttggaggcagaaactctggcccctatggcggtggaggccagtactttgcaaaaccacgaaaccaaggtggc

SEQ ID NO: 5049 - DNA, 645 bp, Homo sapiens
accctgccgtcatgtctaagtcagagtctcctaaagagcccgaacagctgaggaagctcttcattggagggttgagctttgaaacaactgatgagagcctgaggagccattttgagcaatggggaacgctcacggactgtgtggtaatgagagatccaaacaccaagcgctccaggggctttgggtttgtcacatatgccactgtggaggaggtggatgcagctatgaatgcaaggccacacaaggtggatggaagagttgtggaaccaaagagagctgtctccagagaagattctcaaagaccaggtgcccacttaactgtgaaaaagatatttgttggtggcattaaagaagacactgaagaacatcacctaagagattattttgaacagtatggaaaaattgaagtgattgaaatcatgactgaccgaggcagtggcaagaaaaggggctttgcctttgtaacctttgacgaccatgactccgtggtggctttggtggcagccgtgctggtggtagatatggtggcagtggggatggctctaatggatttggtaatgatggaagcaattttggaggtggtggaagctacaatgattttggcaattacaacaatcagtcttcaaattttggacccatgaaggg

SEQ ID NO: 5050 - DNA, 3336 bp, Homo sapiens
ttttcttagacattaactgcagacggctggcaggatagaagcagcggctcacttggactttttcaccagggaaatcagagacaatgatggggctcttccccagaactacaggggctctggccatcttcgtggtggtcatattggttcatggagaattgcgaatagagactaaaggtcaatatgatgaagaagagatgactatgcaacaagctaaaagaaggcaaaaacgtgaatgggtgaaatttgccaaaccctgcagagaaggagaagataactcaaaaagaaacccaattgccaagattacttcagattaccaagcaacccagaaaatcacctaccgaatctctggagtgggaatcgatcagccgccttttggaatctttgttgttgacaaaaacactggagatattaacataacagctatagtcgaccgggaggaaactccaagcttcctgatcacatgtcgggctctaaatgcccaaggactagatgtagagaaaccacttatactaacggttaaaattttggatattaatgataatcctccagtattttcacaacaaattttcatgggtgaaattgaagaaaatagtgcctcaaactcactggtgatgatactaaatgccacagatgcagatgaaccaaaccacttgaattctaaaattgccttcaaaattgtctctcaggaaccagcaggcacacccatgttcctcctaagcagaaacactggggaagtccgtactttgaccaattctcttgaccgagagcaagctagcagctatcgtctggttgtgagtggtgcagacaaagatggagaaggactatcaactcaatgtgaatgtaatattaaagtgaaagatgtcaacgataacttcccaatgtttagagactctcagtattcagcacgtattgaagaaaatattttaagttctgaattacttcgatttcaagtaacagatttggatgaagagtacacagataattggcttgcagtatatttctttacctctgggaatgaaggaaattggtttgaaatacaaactgatcctagaactaatgaaggcatcctgaaagtggtgaaggctctagattatgaacaactacaaagcgtgaaacttagtattgctgtcaaaaacaaagctgaatttcaccaatcagttatctctcgataccgagttcagtcaaccccagtcacaattcaggtaataaatgtaagagaaggaattgcattccgtcctgcttccaagacatttactgtgcaaaaaggcataagtagcaaaaaattggtggattatatcctgggaacatatcaagccatcgatgaggacactaacaaagctgcctcaaatgtcaaatatgtcatgggacgtaacgatggtggatacctaatgattgattcaaaaactgctgaaatcaaatttgtcaaaaatatgaaccgagattctactttcatagttaacaaaacaatcacagctgaggttctggccatagatgaatacacgggtaaaacttctacaggcacggtatatgttagagtacccgatttcaatgacaattgtccaacagctgtcctcgaaaaagatgcagtttgcagttcttcaccttccgtggttgtctccgctagaacactgaataatagatacactggcccctatacatttgcactggaagatcaacctgtaaagttgcctgccgtatggagtatcacaaccctcaatgctacctcggccctcctcagagcccaggaacagatacctcctggagtataccacatctccctggtacttacagacagtcagaacaatcggtgtgagatgccacgcagcttgacactggaagtctgtcagtgtgacaacaggggcatctgtggaacttcttacccaaccacaagccctgggaccaggtatggcaggccgcactcagggaggctggggcctgccgccatcggcctgctgctccttggtctcctgctgctgctgttggccccccttctgctgttgacctgtgactgtggggcaggttctactgggggagtgacaggtggttttatcccagttcctgatggctcagaaggaacaattcatcagtggggaattgaaggagcccatcctgaagacaaggaaatcacaaatatttgtgtgcctcctgtaacagccaatggagccgatttcatggaaagttctgaagtttgtacaaatacgtatgccagaggcacagcggtggaaggcacttcaggaatggaaatgaccactaagcttggagcagccactgaatctggaggtgctgcaggctttgcaacagggacagtgtcaggagctgcttcaggattcggagcagccactggagttggcatctgttcctcagggcagtctggaaccatgagaacaaggcattccactggaggaaccaataaggactacgctgatggggcgataagcatgaattttctggactcctacttttctcagaaagcatttgcctgtgcggaggaagacgatggccaggaagcaaatgactgcttgttgatctatgataatgaaggcgcagatgccactggttctcctgtgggctccgtgggttgttgcagttttattgctgatgacctggatgacagcttcttggactcacttggacccaaatttaaaaaacttgcagagataagccttggtgttgatggtgaaggcaaagaagttcagccaccctctaaagacagcggttatgggattgaatcctgtggccatcccatagaagtccagcagacaggatttgttaagtgccagactttgtcaggaagtcaaggagcttctgctttgtccgcctctgggtctgtccagccagctgtttccatccctgaccctctgcagcatggtaactatttagtaacggagacttactcggcttctggttccctcgtgcaaccttccactgcaggctttgatccacttctcacacaaaatgtgatagtgacagaaagggtgatctgtcccatttccagtgttcctggcaacctagctggcccaacgcagctacgagggtcacatactatgctctgtacagaggatccttgctcccgtctaatatgaccagaatgagctggaataccacactgaccaaatctggatctttggactaaagtattcaaaatagcatagcaaagctcactgtattgggctaataatttggcacttattagcttctctcataaactgatcacgattataaattaaatgtttgggttcataccccaaaagcaatatgttgtcactcctaattctcaagtactattcaaattgtagtaaatcttaaagtttttcaaaaccctaaaatcatattcgc

SEQ ID NO: 5051 - protein, 999 aa, Homo sapiens
MMGLFPRTTGALAIFVVVILVHGELRIETKGQYDEEEMTMQQAKRRQKREWVKFAKPCREGEDNSKRNPIAKITSDYQATQKITYRISGVGIDQPPFGIFVVDKNTGDINITAIVDREETPSFLITCRALNAQGLDVEKPLILTVKILDINDNPPVFSQQIFMGEIEENSASNSLVMILNATDADEPNHLNSKIAFKIVSQEPAGTPMFLLSRNTGEVRTLTNSLDREQASSYRLVVSGADKDGEGLSTQCECNIKVKDVNDNFPMFRDSQYSARIEENILSSELLRFQVTDLDEEYTDNWLAVYFFTSGNEGNWFEIQTDPRTNEGILKVVKALDYEQLQSVKLSIAVKNKAEFHQSVISRYRVQSTPVTIQVINVREGIAFRPASKTFTVQKGISSKKLVDYILGTYQAIDEDTNKAASNVKYVMGRNDGGYLMIDSKTAEIKFVKNMNRDSTFIVNKTITAEVLAIDEYTGKTSTGTVYVRVPDFNDNCPTAVLEKDAVCSSSPSVVVSARTLNNRYTGPYTFALEDQPVKLPAVWSITTLNATSALLRAQEQIPPGVYHISLVLTDSQNNRCEMPRSLTLEVCQCDNRGICGTSYPTTSPGTRYGRPHSGRLGPAAIGLLLLGLLLLLLAPLLLLTCDCGAGSTGGVTGGFIPVPDGSEGTIHQWGIEGAHPEDKEITNICVPPVTANGADFMESSEVCTNTYARGTAVEGTSGMEMTTKLGAATESGGAAGFATGTVSGAASGFGAATGVGICSSGQSGTMRTRHSTGGTNKDYADGAISMNFLDSYFSQKAFACAEEDDGQEANDCLLIYDNEGADATGSPVGSVGCCSFIADDLDDSFLDSLGPKFKKLAEISLGVDGEGKEVQPPSKDSGYGIESCGHPIEVQQTGFVKCQTLSGSQGASALSASGSVQPAVSIPDPLQHGNYLVTETYSASGSLVQPSTAGFDPLLTQNVIVTERVICPISSVPGNLAGPTQLRGSHTMLCTEDPCSRLI

SEQ ID NO: 5052 - DNA, 2624 bp, Homo sapiens
cccacgcgtccggatggtcctggtcacaaaatattaaagagaccgaccgctaagggaacaggaaaaacgtccgagacagccgttgcaattacgaatggaccagacttggtagcacggggcattgattgctggtgcccaaccggaccctcctcccctcttcccatcccttcccccacccaaagcaggctcccgctgcggccgggacctcgcatccctgcaacgtggccggggctgcatttttcatgagcctagggtgaacaggtgcgaagtgcgctgggagcatccggccagcggccgagcgcggggaacatggagagcgagcgcgacatgtaccgccagttccaggactggtgcctcaggacttacggggactcaggcaagaccaagacggtgacccgtaaaaaatacgaacggatcgtctagctcctcaatggctccgagtcgagctccacggacaacgccaaatttaaattctgggtcaaatcgaagggcttccagctgggccagccggacgaggtccgcgggggaggcggcggcgccaagcaagtgctctagtgcctgtcaagaccacggatggcgtaggggtagatgagaagctatctttacgacgggtagctgtggttgaagatttctttgacattatttattcgatgcatgtggaaacggggccaaatggagaacaaattcggaaacacgctggacaaaagagaacttacaaagcaatttcagagagctatgccttcctaccaagagaagcggtgacacgatttctaatgagctgctcagagtgccagaaaagaatgcatttaaacccagatggaacagatcataaagataatggaaaacctcccactttggtgaccagcatgattgactacaacatgccaattaccatggcctacatgaaacacatgaagctgcagctgctaaactcacagcaagatgaggatgaaagttcaatagaaagtgatgaatttgacatgagtgattcaacacggatgtcagctgtgaactctgatcttagctccaatcttgaagaaagaatgcaaagtccccagaatcttcatggccagcaagatgatgattctgctgcagagagctttaatggcaatgagactctggggcacagttcaattgcttcagggggaacacacagcagggagatgggagactccaacagtgatggcaaaactgggctggagcaagatgaacagccactgaacctgagtgacagtcccctctctgcgcagctaacttcggaatacagaatagatgatcacaacagtaatgggaaaaacaagtataagaatcttctaatttctgacctcaagatggaacgagaggcgagagaaaatggaagcaagtctcctgcacatagttactccagctatgactctggcaaaaatgagagtgtagaccgaggagctgaggacctctcactaaacaggggagatgaggacgaagatgaccacgaggaccatgacgattcggagaaagttaatgagacagacggcgttgaagccgagcggctgaaagcttttaatatgtttgtcaggctgtttgtagatgaaaacttggaccgaatggtcccaatctctaagcagcccaaagaaaagatccaggctatcattgactcatgcaggcgacaattccctgagtatcaagagcgtgccagaaaacgtatacgtacttacctcaagtcctgcaggcggatgaaaagaagtggttttgagatgtctcgacctattccttcccaccttacttcagcagttgcagagagtatcttggcttcagcttgtgagagtgagagtagaaatgccgccaagaggatgcgtctggagagacagcaggatgagtctgctccagctgacaaacagtgtaaaccagaggcgacccaggccacttactcaacatcagctgttccaggctcacaggacgtgctgtacatcaatggaaatgggacctatagttaccatagttacagagggctaggagggggtctgctaaatctgaatgatgcttccagcagtggacccactgatctcagcatgaagagacaattggcgactagctcaggatcctccagcagctcaaactccagaccccagctgagtccaactgaaatcaatgccgtgagacagcttgttgcaggatatcgagaatcagctgcatttttattgcgatctgcagatgaactggaaaatctcattttacaacagaactgagacagacgaccaccatattcactgaggtctaaatttgcagttccactaatgacattttgatttcccaacagagatacttctggtcttactgcacagtcttttaagagaaatacttccattatgccacattgtccttgatccgtaagtgatgtgttaaggtgcttcaaaggaactctgacctctgaagtacttgagctactttagtatgtccagcctattgctttttgttttagtgtgtcaccataaatatcaggggcataaaaggctatctattcttaattcaaggataaaacagaagaagcttgtggtataaaacaatagttcaagatccagctgaaatattagtggaatttgctactgactcattggactgaaagctgaagtacctggcaaaaaaaa

SEQ ID NO: 5053 - protein, 524 aa, Homo sapiens
MHVETGPNGEQIRKHAGQKRTYKAISESYAFLPREAVTRFLMSCSECQKRMHLNPDGTDHKDNGKPPTLVTSMIDYNMPITMAYMKHMKLQLLNSQQDEDESSIESDEFDMSDSTRMSAVNSDLSSNLEERMQSPQNLHGQQDDDSAAESFNGNETLGHSSIASGGTHSREMGDSNSDGKTGLEQDEQPLNLSDSPLSAQLTSEYRIDDHNSNGKNKYKNLLISDLKMEREARENGSKSPAHSYSSYDSGKNESVDRGAEDLSLNRGDEDEDDHEDHDDSEKVNETDGVEAERLKAFNMFVRLFVDENLDRMVPISKQPKEKIQAIIDSCRRQFPEYQERARKRIRTYLKSCRRMKRSGFEMSRPIPSHLTSAVAESILASACESESRNAAKRMRLERQQDESAPADKQCKPEATQATYSTSAVPGSQDVLYINGNGTYSYHSYRGLGGGLLNLNDASSSGPTDLSMKRQLATSSGSSSSSNSRPQLSPTEINAVRQLVAGYRESAAFLLRSADELENLILQQN

SEQ ID NO: 5054 - DNA, 2397 bp, Homo sapiens
atcttgctggtttgcggccggtcttggatgaagcggcggccgtggtgagagcgtggggaagggtggggtgagggggcgaggccgcagctagggcggcgaaactctcctcccctcggccccaccgcgtgggacggcgtgaacgtggtgtcggagggatgtcagccttctctgaggcggcgctggagaagaagctgtcggagttgagcaactcgcagcagagcgtgcagaccttgtccctgtggctcattcaccaccgtaaacactcgcgtcccatcgtcaccgtgtgggagcgggagctgcggaaagccaaaccaaacaggaagcttacttttctctacctagccaatgatgtcatacagaacagcaagaggaaggggccagagtttacaaaagattttgcaccagttatagtggaggcttttaagcatgtttcaagtgaaactgatgaaagttgtaagaagcaccttggaagagtgttatctatttgggaagaaaggtctgtttatgaaaatgatgtattagaacaacttaaacaagctctgtatggtgataagaagcctaggaagcgaacttatgaacagataaaggtggatgaaaatgaaaactgttcctctctgggatctccaagtgaaccaccacagactctagatctcgttagagcattacaagatctggaaaatgcagcctcaggtgatgcagcagttcatcagaggatagcttctttacctgttgaagtccaagaagtatctctattagataaaataacagataaagaatctggagaaaggctttccaaaatggtagaggatgcgtgtatgttgctggcagattacaatggcagattggcggcagaaatagatgatagaaagcaactcactcgaatgttagcagattttcttcgttgtcaaaaggaagcccttgcagagaaagagcataaattggaagagtacaagcgcaagctagccagagtttccctggtgcgcaaagaactcaggtcccggatccagagcctgccagacttatctcgattgcccaatgtcactggcagccacatgcacctgccctttgcgggagacatctacagtgaagattgatggaccagcctctttccaggtcccaggactttgcaagagatggagacaggttaggtggatagtcctgtagtgttatttttgtatattgttgagaaagaaacactaacaaaaggaacaacgagtaatttataaaattgtttaaaatgttggtttgtttactattttattggtaaattaacatgacttaatttgaacaaagtgatgatttgtgtgtattaataagctcacaaatagtgattattttcaaaagatctttttgtaaattttttttttgatccaaggccttgtgagaaatctcttgtttgtatttcttcaggtattttcaattgtttttctttattttcttcagcatttaatcactgtatactatgtaattcctgaaggggaagaactaattaggagttgattgagactttattatggtatagttaggacttgattgtagaagggactaaatgttccaacataatctttacccttctccccaaacaaaatatcaattctgtgtctctacatgcctttgattccttagaggtcggtaatttaacataaaacagggatgtcactttgaggggcagatgaaagtctagagaactgttccttaatagcattgtaaaagttccattccaactgccagtgtagattttaaaagtgttaaatagtgactcccttgattaaactgtttgtaattatttgagtagattaataatgaaaatactttggaaataatatacattttgacattctaccaagaggacaactttggttctggaactggtttctatttgtcaaatcagtttccttttaacataattaatccctttaacaaaaagccgtctatgggattaaaagacacgtgaaatgatacttttattattcccttgctcatataactttaaaaataatacttttagctctaatagctcaagaacacaatattcgttaatgttcagtaaagtagcctgagacattttcaatgtttccttaaggtttttgaatgactgtatatttggcagttaagcagtgccacactacagggtagatatggtaaattttatatttgtatatttacagttacaaaacaaatgtacttttaccttttatttctgaccctgtgtgttagagcagttgcatgctctcctgctgttaaaaacacattgttaagctgtggatttgtactcaataatgacttaggataaacatttattttcattcattgctttacatactagacatttttcttctctttgtaagtagattcaaattagatagtcaataaaacatcttgaaaatcccacaagcc

SEQ ID NO: 5055 - DNA, 2763 bp, Homo sapiens
accgcgtgttcgcgcctggtagagatttctcgaagacaccagtgggcccgttccgagccctctggaccgcccgtgtggaaccaaacctgcgcgcgtggccgggccgtgggacaacgaggccgcggagacgaaggcgcaatggcgaggaagttatctgtaatcttgatcctgacctttgccctctctgtcacaaatccccttcatgaactaaaagcagctgctttcccccagaccactgagaaaattagtccgaattgggaatctggcattaatgttgacttggcaatttccacacggcaatatcatctacaacagcttttctaccgctatggagaaaataattctttgtcagttgaagggttcagaaaattacttcaaaatataggcatagataagattaaaagaatccatatacaccatgaccacgaccatcactcagaccacgagcatcactcagaccatgagcgtcactcagaccatgagcatcactcagagcacgagcatcactctgaccatgatcatcactctcaccataatcatgctgcttctggtaaaaataagcgaaaagctctttgcccagaccatgactcagatagttcaggtaaagatcctagaaacagccaggggaaaggagctcaccgaccagaacatgccagtggtagaaggaatgtcaaggacagtgttagtgctagtgaagtgacctcaactgtgtacaacactgtctctgaaggaactcactttctagagacaatagagactccaagacctggaaaactcttccccaaagatgtaagcagctccactccacccagtgtcacatcaaagagccgggtgagccggctggctggtaggaaaacaaatgaatctgtgagtgagccccgaaaaggctttatgtattccagaaacacaaatgaaaatcctcaggagtgtttcaatgcatcaaagctactgacatctcatggcatgggcatccaggttccgctgaatgcaacagagttcaactatctctgtccagccatcatcaaccaaattgatgctagatcttgtctgattcatacaagtgaaaagaaggctgaaatccctccaaagacctattcattacaaatagcctgggttggtggttttatagccatttccatcatcagtttcctgtctctgctgggggttatcttagtgcctctcatgaatcgggtgtttttcaaatttctcctgagtttccttgtggcactggccgttgggactttgagtggtgatgcttttttacaccttcttccacattctcatgcaagtcaccaccatagtcatagccatgaagaaccagcaatggaaatgaaaagaggaccacttttcagtcatctgtcttctcaaaacatagaagaaagtgcctattttgattccacgtggaagggtctaacagctctaggaggcctgtatttcatgtttcttgttgaacatgtcctcacattgatcaaacaatttaaagataagaagaaaaagaatcagaagaaacctgaaaatgatgatgatgtggagattaagaagcagttgtccaagtatgaatctcaactttcaacaaatgaggagaaagtagatacagatgatcgaactgaaggctatttacgagcagactcacaagagccctcccactttgattctcagcagcctgcagtcttggaagaagaagaggtcatgatagctcatgctcatccacaggaagtctacaatgaatatgtacccagagggtgcaagaataaatgccattcacatttccacgatacactcggccagtcagacgatctcattcaccaccatcatgactaccatcatattctccatcatcaccaccaccaaaaccaccatcctcacagtcacagccagcgctactctcgggaggagctgaaagatgccggcgtcgccactctggcctggatggtgataatgggtgatggcctgcacaatttcagcgatggcctagcaattggtgctgcttttactgaaggcttatcaagtggtttaagtacttctgttgctgtgttctgtcatgagttgcctcatgaattaggtgactttgctgttctactaaaggctggcatgaccgttaagcaggctgtcctttataatgcattgtcagccatgctggcgtatcttggaatggcaacaggaattttcattggtcattatgctgaaaatgtttctatgtggatatttgcacttactgctggcttattcatgtatgttgctctggttgatatggtacctgaaatgctgcacaatgatgctagtgaccatggatgtagccgctgggggtatttctttttacagaatgctgggatgcttttgggttttggaattatgttacttatttccatatttgaacataaaatcgtgtttcgtataaatttctagttaaggtttaaatgctagagtagcttaaaaagttgtcatagtttcagtaggtcatagggagatgagtttgtatgctgtactatgcagcgtttaaagttagtgggttttgtgatttttgtattgaatattgctgtctgttacaaagtcagttaaaggtacgttttaatatttaagttattctatcttggagataaaatctgtatgtgcaattcaccggtattaccagtttattatgtaaacaagagatttggcatgacatgttctgtatgtttcagggaaaaatgtctttaatgctttttcaagaactaacacagttattcctatactggattttaggtctctgaagaactgctggtg

SEQ ID NO: 5056 - DNA, 2494 bp, Homo sapiens
agttggcgacatggtggcacccgtgctggagacttctcacgtgttttgctgcccaaaccgggtgcggggagtcctgaactggagctctgggcccagaggacttctggcctttggcacgtcctgctccgtggtgctctatgaccccctgaaaagggttgttgttaccaacttgaatggtcacaccgcccgagtcaattgcatacagtggatttgtaaacaggatggctccccttctactgaattagtttctggaggatctgataatcaagtgattcactgggaaatagaggataatcagcttttaaaagcagtgcatcttcaaggccatgaaggacctgtttatgcggtgcatgctgtttaccagaggaggacatcagatcctgcattatgtacactgatcgtttctgcagctgcagattctgctgttcgactctggtctaaaaagggtccagaagtaatgtgccttcagactttaaactttggaaatggatttgctttggctctctgcttatcttttttgccaaatactgatgtaccaatattagcatgtggcaatgatgattgcagaattcacatatttgctcaacaaaatgatcagtttcagaaagtgctttctctctgtggacatgaggattggattagaggagtggaatgggcagcctttggtagagatcttttcctagcaagctgttcacaagattgcctgataagaatatggaagctgtatataaagtcaacatctttagaaactcaggatgacgataacataagactgaaagaaaatacttttaccatagaaaatgaaagtgttaaaatagcatttgctgttactctggagacagtgctagccggtcatgaaaactgggtaaatgcagttcactggcaacctgtgttttacaaagatggtgtcctacagcagccagtgagattattatctgcttccatggataaaaccatgattctctgggctccagatgaagagtcaggagtttggctagaacaggttcgagtaggtgaagtaggtgggaatactttgggattttatgattgccagttcaatgaagatggctccatgatcattgctcatgctttccacggagcgttgcacctttggaaacagaatacagttaacccaagagagtggactccagagattgtcatttcaggacactttgatggtgtccaagacctagtctgggatccagaaggagaatttattatcactgttggtactgatcagacaactagactttttgctccatggaagagaaaagaccaatcacaggtgacttggcatgaaattgcaaggcctcagatacatgggtatgacctgaaatgtttggcaatgattaatcggtttcagtttgtatctggagcagatgaaaaagttcttcgggttttttctgcacctcggaattttgtggaaaatttttgtgccattacaggacaatcactgaatcatgtgctctgtaatcaagatagtgatcttccagaaggagccactgtccctgcattgggattatcaaataaagctgtctttcagggagatatagcttctcagccttctgatgaagaggagctgttaactagtactggttttgagtatcagcaggtggcctttcagccctccatacttactgagcctcccactgaggatcatcttctgcagaatactttgtggcctgaagttcaaaaactatatgggcacggttatgaaatattttgtgttacttgtaacagttcaaagactctgcttgcctcagcttgtaaggcagctaagaaagagcatgcagctatcattctttggaacactacatcttggaaacaggtgcagaatttagttttccacagtttgacagtcacgcagatggccttctcacctaatgagaagttcttactagctgtttccagagatcgaacctggtcattgtggaaaaagcaggatacaatctcacctgagttcgagccagtttttagtctttttgccttcaccaacaaaattacttctgtgcacagtagaattatttggtcttgtgattggagtcctgacagcaagtatttcttcactgggagtcgagacaaaaaggtggttgtctggggtgagtgcgactccactgatgactgtattgagcacaacattggcccctgctcctcagtcctggacgtgggtggggctgtgacagctgtcagcgtctgcccagtgctccacccttctcaacgatacgtggttgcagtaggattggagtgtggaaagatttgcttatatacctggaaaaagactgatcaagttccagaaataaatgactggacccactgtgtagaaacaagtcaaagccaaagtcatacactggctatcagaaaattatgctggaagaattgcagtggaaaaactgaacagaaggaagcagaaggtgctgagtggttacactttgcaagctgtggtgaagatcacactgtgaagatacacagagtcaataaatgtgcactgtaatgg

SEQ ID NO: 5057 - protein, 826 aa, Homo sapiens
MVAPVLETSHVFCCPNRVRGVLNWSSGPRGLLAFGTSCSVVLYDPLKRVVVTNLNGHTARVNCIQWICKQDGSPSTELVSGGSDNQVIHWEIEDNQLLKAVHLQGHEGPVYAVHAVYQRRTSDPALCTLIVSAAADSAVRLWSKKGPEVMCLQTLNFGNGFALALCLSFLPNTDVPILACGNDDCRIHIFAQQNDQFQKVLSLCGHEDWIRGVEWAAFGRDLFLASCSQDCLIRIWKLYIKSTSLETQDDDNIRLKENTFTIENESVKIAFAVTLETVLAGHENWVNAVHWQPVFYKDGVLQQPVRLLSASMDKTMILWAPDEESGVWLEQVRVGEVGGNTLGFYDCQFNEDGSMIIAHAFHGALHLWKQNTVNPREWTPEIVISGHFDGVQDLVWDPEGEFIITVGTDQTTRLFAPWKRKDQSQVTWHEIARPQIHGYDLKCLAMINRFQFVSGADEKVLRVFSAPRNFVENFCAITGQSLNHVLCNQDSDLPEGATVPALGLSNKAVFQGDIASQPSDEEELLTSTGFEYQQVAFQPSILTEPPTEDHLLQNTLWPEVQKLYGHGYEIFCVTCNSSKTLLASACKAAKKEHAAIILWNTTSWKQVQNLVFHSLTVTQMAFSPNEKFLLAVSRDRTWSLWKKQDTISPEFEPVFSLFAFTNKITSVHSRIIWSCDWSPDSKYFFTGSRDKKVVVWGECDSTDDCIEHNIGPCSSVLDVGGAVTAVSVCPVLHPSQRYVVAVGLECGKICLYTWKKTDQVPEINDWTHCVETSQSQSHTLAIRKLCWKNCSGKTEQKEAEGAEWLHFASCGEDHTVKIHRVNKCAL

SEQ ID NO: 5058 - DNA, 879 bp, Homo sapiens
ctctcctcccgccgcccaagatgccgaaaggaaagaaggccaagggaaagaaggtggctccggcccctgctgtcgtgaagaagcaggaggctaagaaagtggtgaatcccctgcttgagaaaaggcctaagaattttggcattggacaggacatccagcccaaaagagacctcacccgctttgtgaaatggccccgctatatcaggttgcagcggcagagagccatcctctataagcggctgaaagtgcctcctgcgattaaccagttcacccaggccctggaccgccaaacagctactcagctgcttaagctggcccacaaatacagaccagagacaaagcaagagaagaagcagagactgctggcccgggaggagaagaaagctgctggcaaaggggacgtccccacgaaaagaccacctgtccttcgagcaggagttaataccgtcaccaccttggtggagaacaagaaagctcagctggtggtaattgcacatgacgtggatcccatcgagctggttgtcttcttggctgccctgtgtcgtaaaatgggggtcccttactgcattatcaaggggaaggcaagactgggacgtctagtccacaggaagacctgcaccactgtcgccttcacacaggtgaactcggaagacaaaggcactttggctaagctgatggaagctatcaggaccaattacaatgacagatacgatgagatccgccgtcactggggcggcaacgtcctgggtcctaagtctgtggctcgtatcgccaagctcgaaaaggcaaaggctaaagaccttgccactaaactgggttaaatgtacactgttgagttttctgtacataaaaataattaaaataatacaaattttcttc

SEQ ID NO: 5059 - protein, 266 aa, Homo sapiens [sequence omitted]

SEQ ID NO: 5060 - DNA, 1127 bp, Homo sapiens
ggcacgagggcggggcgcatctcccgctaggagttcctagtaaagtggcgggagccgcagctatggagccgcaggaggagagagaaacgcaggttgctgcgtggttaaaaaaaatatttggagatcatcctattccacagtatgaggtgaacccacggaccacagagattttacatcacctttcagaacgcaacagggtccgggacagggatgtctacctggtaatagaggacttgaagcagaaagcaagtgaatacgagtcagaagccaagtatcttcaagaccttctcatggagagtgtgaatttttcccccgccaatctctctagcactggttccaggtatctgaatgctttggttgacagtgcggtggcccttgaaacaaaggatacctcgctagctagttttatccctgcagtgaatgatttgacctctgatctctttcgtaccaaatccaaaagtgaagaaatcaagattgaactggaaaaacttgaaaaaaatttaactgcaactttagtattagaaaaatgtctacaagaggatgtcaagaaagcagagttgcatctgtctacagaaagggccaaagttgataatcgtcgtcagaacatggactttctaaaagcaaagtcagaggaattcagatttggaatcaaggctgcagaggagcaactttcagccagaggcatggatgcttctctgtctcatcagtccttagtagcactatcagagaaactggcaagattaaagcaacagactatacctttgaagaaaaaattggagtcctatttagacttaatgccgaatccgtctcttgctcaagtgaaaattgaagaagcaaagcgagaactagatagcattgaagctgaacttacaagaagagtagacatgatggaactgtgacaaaagccaaataaacatccttttccctaacaaagtaaattgaataggactttacagagttctttttcctcttggcatttcctaataacaaaactttctgtgttcttagattacagaatatcataattgatagaatatggtttcttactgtgtgttgcatttttgtgcccaaatacatagttttcatattaaaaagccttttctcttaaaaaaaaaaaaaaaaaaaaa

SEQ ID NO: 5061 - protein, 278 aa, Homo sapiens
MEPQEERETQVAAWLKKIFGDHPIPQYEVNPRTTEILHHLSERNRVRDRDVYLVIEDLKQKASEYESEAKYLQDLLMESVNFSPANLSSTGSRYLNALVDSAVALETKDTSLASFIPAVNDLTSDLFRTKSKSEEIKIELEKLEKNLTATLVLEKCLQEDVKKAELHLSTERAKVDNRRQNMDFLKAKSEEFRFGIKAAEEQLSARGMDASLSHQSLVALSEKLARLKQQTIPLKKKLESYLDLMPNPSLAQVKIEEAKRELDSIEAELTRRVDMMEL

SEQ ID NO: 5062 - DNA, 1853 bp, Homo sapiens
gtcccagtcagtccggaggctgcggctgcagaagtaccgcctgcggagtaactgcaaagatgctgtccgtgcgcgttgctgcggccgtggtccgcgcccttcctcggcgggccggactggtctccagaaatgctttgggttcatctttcattgctgcaaggaacttccatgcctctaacactcatcttcaaaagactgggactgctgagatgtcctctattcttgaagagcgtattcttggagctgatacctctgttgatcttgaagaaactgggcgtgtcttaagtattggtgatggtattgcccgcgtacatgggctgaggaatgttcaagcagaagaaatggtagagttttcttcaggcttaaagggtatgtccttgaacttggaacctgacaatgttggtgttgtcgtgtttggaaatgataaactaattaaggaaggagatatagtgaagaggacaggagccattgtggacgttccagttggtgaggagctgttgggtcgtgtagttgatgcccttggtaatgctattgatggaaagggtccaattggttccaagacgcgtaggcgagttggtctgaaagcccccggtatcattcctcgaatttcagtgcgggaaccaatgcagactggcattaaggctgtggatagcttggtgccaattggtcgtggtcagcgtgaactgattattggtgaccgacagactgggaaaacctcaattgctattgacacaatcattaaccagaaacgtttcaatgatggatctgatgaaaagaagaagctgtactgtatttatgttgctattggtcaaaagagatccactgttgcccagttggtgaagagacttacagatgcagatgccatgaagtacaccattgtggtgtcggctacggcctcggatgctgccccacttcagtacctggctccttactctggctgttccatgggagagtattttagagacaatggcaaacatgctttgatcatctatgacgacttatccaaacaggctgttgcttaccgtcagatgtctctgttgctccgccgaccccctggtcgtgaggcctatcctggtgatgtgttctacctacactcccggttgctggagagagcagccaaaatgaacgatgcttttggtggtggctccttgactgctttgccagtcatagaaacacaggctggtgatgtgtctgcttacattccaacaaatgtcatttccatcactgacggacagatcttcttggaaacagaattgttctacaaaggtatccgccctgcaattaacgttggtctgtctgtatctcgtgtcggatccgctgcccaaaccagggctatgaagcaggtagcaggtaccatgaagctggaattggctcagtatcgtgaggttgctgcttttgcccagttcggttctgacctcgatgctgccactcaacaacttttgagtcgtggcgtgcgtctaactgagttgctgaagcaaggacagtattctcccatggctattgaagaacaagtggctgttatctatgcgggtgtaaggggatatcttgataaactggagcccagcaagattacaaagtttgagaatgctttcttgtctcatgtcgtcagccagcaccaagccttgttgggcactatcagggctgatggaaagatctcagaacaatcagatgcaaagctgaaagagattgtaacaaatttcttggctggatttgaagcttaaactcctgtggattcacatcaaataccagttcagttttgtcattgttctagtaaattagttccatttgtaaaagggttactctcatactccttatgtacagaaatcacatgaaaaataaaggttccataatgc

SEQ ID NO: 5063 - protein, 553 aa, Homo sapiens
MLSVRVAAAVVRALPRRAGLVSRNALGSSFIAARNFHASNTHLQKTGTAEMSSILEERILGADTSVDLEETGRVLSIGDGIARVHGLRNVQAEEMVEFSSGLKGMSLNLEPDNVGVVVFGNDKLIKEGDIVKRTGAIVDVPVGEELLGRVVDALGNAIDGKGPIGSKTRRRVGLKAPGIIPRISVREPMQTGIKAVDSLVPIGRGQRELIIGDRQTGKTSIAIDTIINQKRFNDGSDEKKKLYCIYVAIGQKRSTVAQLVKRLTDADAMKYTIVVSATASDAAPLQYLAPYSGCSMGEYFRDNGKHALIIYDDLSKQAVAYRQMSLLLRRPPGREAYPGDVFYLHSRLLERAAKMNDAFGGGSLTALPVIETQAGDVSAYIPTNVISITDGQIFLETELFYKGIRPAINVGLSVSRVGSAAQTRAMKQVAGTMKLELAQYREVAAFAQFGSDLDAATQQLLSRGVRLTELLKQGQYSPMAIEEQVAVIYAGVRGYLDKLEPSKITKFENAFLSHVVSQHQALLGTIRADGKISEQSDAKLKEIVTNFLAGFEA

SEQ ID NO: 5064 - DNA, 552 bp, Homo sapiens
ccatggactttatcaacgacgccaccgacgtcaacgatgccctgggctatgtgacccgcttctaccgcgaggcctcgtccggcgctgccaagaagaggctgctgctcttctcagatggcaactcgcagggcgccacgcccgctgccatcgagaaggccgtgcaggaagcccagcgggcaggcatcgagatcttcgtggtggtcgtgggccgccaggtgaatgagccccacatccgcgtcctggtcaccggcaagacggccgagtacgacgtggcctacggcgagagccacctgttccgtgtccccagctaccaggccctgctccgcggtgtcttccaccagacagtctccaggaaggtggcgctgggctagcccaccctgcacgccggcaccaaaccctgtcctcccacccctccccactcatcactaaacagagtaaaatgtgatgcgaattttcccgaccaacctgattcgctagatttttttccttctgtgtttttttctgaaccatatccatgttgctgacttttccaaataaaggttttcactcctc

SEQ ID NO: 5065 - DNA, 1304 bp, Homo sapiens
  unsure 1234: unknown base
ctcagccccagctccaacagaagcagcccggccacccactccccgtgaccgcccacgccacatggacacagccctcgccctccgccccggcttttctctgcctttctaccgaccatgtgaccccgcaccagccctgcccccacctgccctcccgggcagtactggggaccttccctgggggacggggagggaggaggcagcgactccttggacagaggcctgggccctcagtggactgcctgctcccacagcctgggctgacgtcagaggccgaggccaggaactgagtgaggcccctggtcctgggtctcaggatgggtcctgggggcctcgtgttcatcaagacacccctctgcccagctcaccacatcttcatcaccagcaaacgccaggacttggctcccccatcctcagaactcacaagccattgctccccagctggggaacctcaacctcccccctgcctcggttggtgacagagggggtgggacaggggcggggggttccccctgtacataccctgccataccaaccccaggtattaattctcgctggttttgtttttattttaatttttttgttttgatttttttaataagaattttcattttaagcacatttatactgaaggaatttgtgctgtgtattggggggagctggatccagagctggagggggtgggtccgggggagggagtggctcggaaggggcccccactctcctttcatgtccctgtgccccccagttctcctcctcagccttttcctcctcagttttctctttaaaactgtgaagtactaactttccaaggcctgccttcccctccctcccactggagaagccgccagcccctttctccctctgcctgaccactgggtgtggacggtgtggggcagccctgaaaggacaggctcctggccttggcacttgcctgcacccaccatgaggcatggagcagggcatagcaagggccccgggacagagttttcccagacctggctcctcggcagagctgcctcccgtcagggcccacatcatctaggctccccagcccccactgtgaaggggctggccaggggcccgagctgcccccacccccggcctcagccaccagcacccccatagggcccccagacaccacacacatgcgcgtgcgcacacacacaaacacacacacactggacagtagatgggccgacacacacttggcccgagttcctccatttccctggcntggccccccacccccaacctgtcccacccccgtgccccctccttaccccgcaggacgggcctacaggggg

SEQ ID NO: 5066 - DNA, 2036 bp, Homo sapiens
  unsure 1076: unknown base
aggttcgatacaagaggctgttttcctagcgtggcttgctgcctttggtaagaacatgtcgtccatcttgccattcacgccgccagttgtgaagagactgctgggatggaagaagtcagctggtgggtctggaggagcaggcggaggagagcagaatgggcaggaagaaaagtggtgtgagaaagcagtgaaaagtctggtgaagaagctaaagaaaacaggacgattagatgagcttgagaaagccatcaccactcaaaactgtaatactaaatgtgttaccataccaagcacttgctctgaaatttggggactgagtacaccaaatacgatagatcagtgggatacaacaggcctttacagcttctctgaacaaaccaggtctcttgatggtcgtctccaggtatcccatcgaaaaggattgccacatgttatatattgccgattatggcgctggcctgatcttcacagtcatcatgaactcaaggcaattgaaaactgcgaatatgcttttaatcttaaaaaggatgaagtatgtgtaaacccttaccactatcagagagttgagacaccagttttgcctccagtattagtgccccgacacaccgagatcctaacagaacttccgcctctggatgactatactcactccattccagaaaacactaacttcccagcaggaattgagccacagagtaattatattccagaaacgccacctcctggatatatcagtgaagatggagaaacaagtgaccaacagttgaatcaaagtatggacacaggctctccagcagaactatctcctactactctttcccctgttaatcatagcttggatttacagccagttacttactcagaacctgcattttggtgttcgatagcatattatgaattaaatcagagggttggagaaaccttccatgcatcacagccctcactcactgtagatggctttacagacccatcaaattcagagaggttctgcttaggtttactctccaatgttaaccgaaatgccacggtagaaatgacaagaaggcatataggaagaggagtgcgcttatactacnataggtggggaagtttttgctgagtgcctaagtgatagtgcaatctttgtgcagagccccaattgtaatcagagatatggctggcaccctgcaacagtgtgtaaaattccaccaggctgtaatctgaagatcttcaacaaccaggaatttgctgctcttctggctcagtctgttaatcagggttttgaagccgtctatcagctaactagaatgtgcaccataagaatgagttttgtgaaagggtggggagcagaataccgaaggcagacggtaacaagtactccttgctggattgaacttcatctgaatggacctctacagtggttggacaaagtattaactcagatgggatccccttcagtgcgttgctcaagcatgtcataaagcttcaccaatcaagtcccatgaaaagacttaatgtaacaactcttctgtcatagcattgtgtgtggtccctatggactgtttactatccaaaagttcaagagagaaaacagcacttgaggtctcatcaattaaagcaccttgtggaatctgtttcctatatttgaatattagatgggaaaattagtgtctagaaatactctcccattaaagaggaagagaagattttaaagacttaatgatgtcttattgggcataaaactgagtgtcccaaaggtttattaataacagtagtagttatgtgtacaggtaatgtatcatgatccagtatcacagtattgtgctgtttatatacatttttagtttgcatagatgaggtgtgtgtgtgcgctgcttcttgatctaggcaaacctttataaagttgcagtacctaatctgttattcccacttctctgttatttttgtgtgtcttttttaatatataatatatatcaagattttcaaattatttagaagcagattttcctgtagaaaaactaatttttctgccttttaccaaaaataaactcttgggg

SEQ ID NO: 5067 - DNA, 898 bp, Homo sapiens
tcctctttccctaagcagcctgagggttgactggattggtgaggcccgtgtggctacttctgtggaagcagtgctgtagttactggaagataaaagggaaagcaagcccttggtgggggaaagtatggctgcgatgatggcatttcttaggacacctttggattaataatgaaaacaactactctctgagcagctgttcgaatcatctgatatttatactgaatgagttactgtaagtacgtattgacagaattacactgtactttcctctaggtgatctgtgaaaatggttcgctattcacttgacccggagaaccccacgaaatcatgcaaatcaagaggttccaatcttcgtgttcactttaagaacactcgtgaaactgctcaggccatcaagggtatgcatatacgaaaagccacgaagtatctgaaagatgtcactttacagaaacagtgtgtaccattccgacgttacaatggtggagttggcaggtgtgcgcaggccaagcaatggggctggacacaaggtcggtggcccaaaaagagtgctgaatttttgctgcacatgcttaaaaacgcagagagtaatgctgaacttaagggtttagatgtagattctctggtcattgagcatatccaagtgaacaaagcacctaagatgcgccgccggacctacagagctcatggtcggattaacccatacatgagctctccctgccacattgagatgatccttacggaaaaggaacagattgttcctaaaccagaagaggaggttgcccagaagaaaaagatatcccagaagaaactgaagaaacaaaaacttatggcacgggagtaaattcagcattaaaataaatgtaattaaaaggaaaaaaaaaaaaaaaaaaaaaaaaaa

SEQ ID NO: 5068 - protein, 184 aa, Homo sapiens [sequence omitted]

SEQ ID NO: 5069 - DNA, 1949 bp, Homo sapiens
gctgagcatcgccagggcgggcggcagggcgcggcctctccgccgggtgtacctcctgtcgcggcgcgagacctctggtgaaagaaaagatgttgtcccggttaagagtagtttccaccacttgtactttggcatgtcgacatttgcacataaaagaaaaaggcaagccacttatgctgaacccaagaacaaacaagggaatggcatttactttacaagaacgacaaatgcttggtcttcaaggacttctacctcccaaaatagagacacaagatattcaagccttacgatttcatagaaacttgaagaaaatgactagccctttggaaaaatatatctacataatgggaatacaagaaagaaatgagaaattgttttatagaatactgcaagatgacattgagagtttaatgccaattgtatatacaccgacggttggtcttgcctgctcccagtatggacacatctttagaagacctaagggattatttatttcgatctcagacagaggtcatgttagatcaattgtggataactggccagaaaatcatgttaaggctgttgtagtgactgatggagagagaattctgggtcttggagatctgggtgtctatggaatgggaattccagtaggaaaactttgtttgtatacagcttgtgcaggaatacggcctgatagatgcctgccagtgtgtattgatgtgggaactgataatatcgcactcttaaaagacccattttacatgggcttgtaccagaaacgagatcgcacacaacagtatgatgacctgattgatgagtttatgaaagctattactgacagatatggccggaacacactcattcagttcgaagactttggaaatcataatgcattcaggttcttgagaaagtaccgagaaaaatattgtactttcaatgatgatattcaagggacagctgcagtagctctagcaggtcttcttgcagcacaaaaagttattagtaaaccaatctccgaacacaaaatcttattccttggagcaggagaggctgctcttggaattgcaaatcttatagttatgtctatggtagaaaatggcctgtcagaacaagaggcacaaaagaaaatctggatgtttgacaagtatggtttattagttaagggacggaaagcaaaaatagatagttatcaggaaccatttactcactcagccccagagagcatacctgatacttttgaagatgcagtgaatatactgaagccttcaactattattggagttgcaggtgctggccgtcttttcactcctgatgtaatcagagccatggcctctatcaatgaaaggcctgtaatatttgcattaagtaatcctacagcacaggcagagtgcacggctgaagaagcatatacacttacagagggcaggtgtttgtttgccagtggcagtccatttgggccagtgaaacttacagatgggcgagtctttacaccaggtcaaggaaacaatgtttatatttttccaggtgtggctttagctgttattctctgtaacacccggcatattagtgacagtgttttcctagaagctgcaaaggccctgacaagccaattgacagatgaagagctagcccaagggagactttacccaccgcttgctaatattcaggaagtttctattaacattgctattaaagttacagaatacctatatgctaataaaatggctttccgatacccagaacctgaagacaaggccaaatatgttaaagaaagaacatggcggagtgaatatgattccctgctgccagatgtgtatgaatggccagaatctgcatcaagccctcctgtgataacagaatagaagcactcccctgataaatactttctgtgctccagggaaccccttttttcagacaagaagagataatgtcttcagttttaaaaaaaaaaaaaaaaaaaaaaaaaa

SEQ ID NO: 5070 - protein, 584 aa, Homo sapiens
MLSRLRVVSTTCTLACRHLHIKEKGKPLMLNPRTNKGMAFTLQERQMLGLQGLLPPKIETQDIQALRFHRNLKKMTSPLEKYIYIMGIQERNEKLFYRILQDDIESLMPIVYTPTVGLACSQYGHIFRRPKGLFISISDRGHVRSIVDNWPENHVKAVVVTDGERILGLGDLGVYGMGIPVGKLCLYTACAGIRPDRCLPVCIDVGTDNIALLKDPFYMGLYQKRDRTQQYDDLIDEFMKAITDRYGRNTLIQFEDFGNHNAFRFLRKYREKYCTFNDDIQGTAAVALAGLLAAQKVISKPISEHKILFLGAGEAALGIANLIVMSMVENGLSEQEAQKKIWMFDKYGLLVKGRKAKIDSYQEPFTHSAPESIPDTFEDAVNILKPSTIIGVAGAGRLFTPDVIRAMASINERPVIFALSNPTAQAECTAEEAYTLTEGRCLFASGSPFGPVKLTDGRVFTPGQGNNVYIFPGVALAVILCNTRHISDSVFLEAAKALTSQLTDEELAQGRLYPPLANIQEVSINIAIKVTEYLYANKMAFRYPEPEDKAKYVKERTWRSEYDSLLPDVYEWPESASSPPVITE

SEQ ID NO: 5071 - DNA, 2516 bp, Homo sapiens
gctagggcgcggcgggcggtttgaattttgcttacagagtcccgtctcaccatcctgggcttccaacggagactgcggtatccgcagctggagacccagcggcgagtagccttttgctcccggacggacttgaggttggagtctgtgtgttggggaccctgcctttggaagcgcccgagaggcttaaaggatggcctcgtcagatctggaacaattatgctctcatgttaatgaaaagattggcaatattaagaaaaccttatcattaagaaactgtggccaggaacctaccttgaaaactgtattaaataaaataggagatgagatcattgtaataaatgaacttctaaataaattggaattggaaattcagtatcaagaacaaaccaacaattcactcaaggaactctgtgaatctcttgaagaagattacaaagacatagaacatcttaaagaaaacgttccttcccatttgcctcaagtaacagtaacccagagctgtgttaagggatcagatcttgatcctgaagaaccaatcaaagttgaagaacctgaacccgtaaagaagcctcccaaagagcaaagaagtattaaggaaatgccatttataacttgtgatgagttcaatggtgttccttcgtacatgaaatcccgcttaacctataatcaaattaatgatgttattaaagaaatcaacaaggcagtaattagtaaatataaaatcctacatcagccaaaaaagtctatgaattctgtgaccagaaatctctatcacagatttattgatgaagaaacgaaggataccaaaggtcgttattttatagtggaagctgacataaaggagttcacaactttgaaagctgacaagaagtttcacgtgttactgaatattttacgacactgccggaggctatcagaggtccgagggggaggacttactcgttatgttataacctgagtcccttgtgaacttttgaacataccaacagggtatagagtatagaggctatttctataattttcttatatataatttttttaacttttaatcttttttgtttccttttttttttttttgagacaggatcttgctttgtcacccaggggcttgctttgtcacgcaggctagagtgcagtggcgcaaacatggctcactgcagcctcaacctcccaggctcaagtgatcctcccacctcagccccctgaatggctgggactacaagcgtgcgccaccatgcctggctaatttttgtattttttggagagatggggtttcaccatgttgcctaggctggtcttgagctcctgagctcaaacaatccaccctcctcagcctcccaaagtgctgggattacaggcttgagccaccacacctgacctattcttgtttcttataaaaataaaacttttttggataaagcttatttcttgtttttttctttttctttttttttttttttgagacagtctcgctctttcacccaggccggactgcagcggcgctatctcggctcactgcaaactctgcctcccaggttcacgccatcctcctgcctcagctactcaggagaattgcttgaacctaggaggtggaggttgcagtgagccgagatcgtgccactgcactccagtctgggcaacagagcgagactccatctcagaaaaaaagaaaaaaagactgggtacagatgtgatattggaagaaaaagatcaagctgatgaggttaggatacccaggccctttggacttaaagatcactagtgtctaaattccatcgatggcatttcagtctataggtaaacttcctggaagctggatttggagacagtttatcatctgattattgggctttcgtataggtccttagggagcagcttacctgaaatgcatttagtgtacaccagtctgtaaacttcaacctgtaatgaaagtgtaataaatgtacattgagttgatgtgataatgtgatataataagaaatatatatttgatcttcctatctagttccttgttcagagctcctaaaacccttgtaatttccaaagtgatggagtacatcttttgttctagtatttggtctttgaccccagttcctgacacaaagctcctaaattcctttaaatttcccagtgataggagaattttttgttctaatgaggtcactcttgatgggcacctggataactcaggatgggggctgctcacaaagaccacatcatgattggaagtttcaaactttcagtctcccacctccagagaggggagaggggctggagatttgtgtcaataatccatcaggcctatgtcaacaagacataatccgttaactatggagttcagggagcttcagggttggcaaacattttgatgtgccaggaaggtgacgcactccagctttatgaagtcagcaagtcctgtgctcaggatgcttctggaccttgccccaggtaccccttcatgtggctgttgttcatctgtatcctttgtagtagccttaaaataaactgttaaacac

SEQ ID NO: 5072 - DNA, 2714 bp, Homo sapiens
ccgacatgttgagtcataagacgcgtcggtgttgcagtctgtgtccttggaggtgaccagggccactgcaggcatggtgctagcagagctgtacgtctctgaccgagagggaagcgatgccacgggagatggaaccaaggagaaaccatttaaaacaggtctaaaggctttgatgacagtagggaaagaaccatttcctaccatttacgtagattcacaaaaagaaaatgagaggtggaatgttatttctaaatcacagttgaagaacattaaaaagatgtggcatagggaacaaatgaagagtgaatcccgggaaaagaaagaggcagaagatagtttacgaagagaaaagaacctggaagaagcaaagaagattaccattaaaaatgatccaagtctcccagagccaaaatgtgtgaagattggtgcgttagaaggatatagaggccaaagagtaaaggtgtttggctgggtccacaggctgcgcaggcaaggaaagaatttaatgtttctggtgttgcgagatggtacaggttatcttcagtgtgtcttggcggatgagttgtgtcagtgctacaatggagttctcttgtccacggagagcagtgttgcagtgtatggaatgctaaatcttaccccaaagggcaagcaggctccaggtggccatgagctgagttgtgacttctgggaactaattgggttggcccctgctggaggagctgacaacctgatcaatgaggagtctgacgttgatgtccagctcaacaacagacacatgatgatccgaggagaaaacatgtccaaaatcctaaaagcacgatccatggtcaccaggtgctttagagatcacttctttgatagggggtactatgaagttactcctccaacattagtgcaaacacaagtagaaggtggtgccacactcttcaagcttgactattttggggaagaggcatttttgactcaatcctctcagttgtacttggagacctgcctcccagccctgggagatgttttttgtattgctcagtcataccgggcagagcagtccagaacacgaaggcacctggctgagtacactcacgtggaagctgagtgtcctttcctgacttttgacgacctcctgaaccggttggaggacttggtttgtgatgtggtagatcgaatattgaagtcacctgcagggagcatagtgcatgagctcaacccgaactttcagccccccaaacggcctttcaaacggatgaactattcagatgctatcgtttggctaaaagaacatgatgtaaagaaagaagatggaactttctatgaatttggagaagatatcccagaagctcctgagagactgatgacagacaccattaatgaaccaatcttgctgtgtcgatttcctgtggagatcaagtccttctacatgcagcgatgtcctgaggattcccgtcttactgaatctgtcgacgtgttgatgcccaatgttggtgagattgtgggaggctcaatgcgtatctttgatagtgaagaaatactggcaggttataaaagggaagggattgaccccactccctattactggtatacggatcagagaaaatacggtacatgtccccatggaggatatggcttgggcttggaacgattcttaacgtggattctgaataggtatcacatccgagacgtgtgcttataccctcgatttgtccagcgttgcacgccataaccattttctccagaagcgtggaggaaagattatgaaaggaacaggctctttaaaaaagaaaacaaaaagccagaatcttccttttttttgtttcattggggtttctctttctgtttttctttctactaccataaaaactatctcaaatcacctgaacatcaagtgatattaaggttgtcatcttaagaaaaaatatccatttttttcttaagttcgggaaacaaagttcggggaaaatacctggcatgaaactgtagttagggatacatttcagcattttactcactttatccaagttattcattttattcaagttatatgtatgtataattcaacaattttagattatggtgtaagatactccagtaacttatctttctgtccttttaagtgtacctggaattctttgatttattttattgcatcaatgaattaaaacaaaaatcttgggggaagaaattggcaatatcgtataaaaatctgctcatattagaacacagtataattcagcagtaaacactagaatcaaatgaatagccttttgtatcagttattaatcttttctaactctgcttagctgctaataatcctgaggcatagaaattgaagaatttgtaaaaatagaattgccttaaaggatttgaagtaagaacataattttggggagagttttttagtgattcacagtatccctcttagcattaatttaaggtaaagaggcagattgattttccctctttcctggtaattcctaagtaattaagaataaataagttccaaaagaaattgtagctggaatcttaataacaattgtgagtggctgtttgagttgcccccaccatgtccttagatctaatctgtgctaccttattaactcacagcaggcttactgaatggcttcatttcagatttagttgatttctccaccaaatgcatgtcatgtattctcaataggctgtattcccagcagtcaataaatgaacacccgtaaaaa

SEQ ID NO: 5073 - protein, 548 aa, Homo sapiens
MVLAELYVSDREGSDATGDGTKEKPFKTGLKALMTVGKEPFPTIYVDSQKENERWNVISKSQLKNIKKMWHREQMKSESREKKEAEDSLRREKNLEEAKKITIKNDPSLPEPKCVKIGALEGYRGQRVKVFGWVHRLRRQGKNLMFLVLRDGTGYLQCVLADELCQCYNGVLLSTESSVAVYGMLNLTPKGKQAPGGHELSCDFWELIGLAPAGGADNLINEESDVDVQLNNRHMMIRGENMSKILKARSMVTRCFRDHFFDRGYYEVTPPTLVQTQVEGGATLFKLDYFGEEAFLTQSSQLYLETCLPALGDVFCIAQSYRAEQSRTRRHLAEYTHVEAECPFLTFDDLLNRLEDLVCDVVDRILKSPAGSIVHELNPNFQPPKRPFKRMNYSDAIVWLKEHDVKKEDGTFYEFGEDIPEAPERLMTDTINEPILLCRFPVEIKSFYMQRCPEDSRLTESVDVLMPNVGEIVGGSMRIFDSEEILAGYKREGIDPTPYYWYTDQRKYGTCPHGGYGLGLERFLTWILNRYHIRDVCLYPRFVQRCTP

SEQ ID NO: 5074 - DNA, 3005 bp, Homo sapiens
cggccagcgacgcggttcacctcctgctgtcctcgccctcgccccggcgagctgcccccgacgcgagatgtcttatttaccaacaaatccaccagggagcattcttatttgctggctcggcgtctctctcagcagtcaccggagtgccggagggggaagcgcgatttacggaagactattacccagaagaaaagatgtttgtttttcacaagccaaagatgtaccgaagtatagagggctactgtatttgcagagctaagtcctccagttctcgattcactgacagtaaacgctatgaaaaggacttccagagctgtttggattgcatgagactcgttcaggagacatctgcaatgcctgtgtcctgcttgtgaaaagatggaagaagttgccagcaggatcaaaaaaaaaaactggaatcatgtggtagatgcaagggttggacccagtctaaagactacattgaaaccaaagaaagtgaaaactctatctgggaacaggataaaaagcaaccagatcagtaaactgcagaaggaatttaaacgtcataattctgatgctcacaataccacctcaagtgcctccccagctccatctcctcgttacagtaaccagtcagatgacggctcagatacagagatggcttctggttctaacagaacaccagttttttcctttttagatctcacatactggaaaagacagaagatatgttgtgggatcaactataaaggccgttttggggaagtcctcattgacacacatcccttcaagccttgctgcagcaataagaaagcagctgccgagaagccagaggagcaggggccagagcctctgcccatctccactcaggagtggtgactgaggtttttatgtagaaggggaacaaaaaaaatctgaattttgaaaagaccacaaagcagcaaactgaccctctttttttttttttttttttttttttttgagacggagttttgctcttgttacccaggcaggagtgcagtggcgtgatcttggctcactgcaacttccgtctcccgggttcaagtgattctcctgccttagcctcccaagtagctgggtttatatgtgcccgccaccagacccggctaatattttagttttagtagagacggggtttcaccacattggccaggctggtctcaaatgaccctcttatttttaacttggatacctgctattctgccaaaagacaatttctacagtagttttgaatgggttgatatcccctagtcccacaaactctgaagccagtgtccagcttactaaaaaaagagtggtacataatatttaagatgctgagtatttcataggaaagatgaatgctgctgtaaagtactctttaagtcttttttttttttaatccccttctaatgaatgaaactaggggaatttcaggggacagagatgggatttgttgtatgataaactgtatgtagtttttagtctttctgtattgagatgcagtggttggggcatttttaagatggctggctacttgttttccctcatgataataaatttgtcataactcagtaacatgaacttgcccctagaggtagttgttaatgattttgaaatattaaggtcttgccaagcttgtgatgattcaaacctgtactactgattattaagcaggacagactgagctttctgttgcaaataccttggaggagaaagtaacttctaaatatacagagaggtaacttgactatatatgttgcatcctgtgcctcccttcatattaatatttgataaagattttaatttttgtaaaacttctaaagcagaatcaaagctcctcttggggaaatggcaagtctttaggacaggcgagaccctgtatgaatagtaccaaagcattaccgcatggtagagaacacactcgattaaaaatgttaagctatctgaaaaataaaatgtacaagtcctcaggatggcacaaaacaaaggttaatgcttcttggggcacatttcttagagggcttgctgagtgtgtaaatataatcgacttttgtttgtgttctgtgacttcattgaaaatctttacaattcagtttcagctctggattacttcagttgacctttgtgaaggtttttatctgtgtagaatgggtgtttgacttgttttagcctattaagtttttattttctttcactctgtattaaaagtaaaacttactaaaagaaaagaggtttgtgttcacattaaatggttttggtttggcttcttttagtcaggctttctgaacattgagatatcctgaacttagagctcttcaatcctaagattttcatgaaaagcctctcacttgaacctaaaccagagtactcttactgcctcttttctaaatgttcaggaaaagcatcgccagttcggtcttttcagaatgagggagaaacatttgcctgccttgtaataacaagactcagtgctcattttttaaactgcattttaaaaattggatagtataataacaataaggagtaagccaccttttataggcaccctgtagttttatagttcttaatctaaacattttatatttccttcttttggaaaaaacctacatgctacaagccaccatatgcacagactatacagcgagttgagttggcttctcccacagtctttgaggcgaattacaaaagtccagccattatcatcctcctgagttattttgaaatgatttttttgtacattttggctgcagtattggtggtagaatatactataatatggatcatctctacttctgtatttatttatttattactagacctcaaccacagtcttctttttccccttccacctctctttgcctgtaggatgtactgtatgtagtcatgcactttgtattaatatattagaaatctacagatctgttttgtactttttatactgttggatacttataatcaaaacttttactagggtattgaataaatctagtcttattagaaaataaaaaaaaagaaagaaa

SEQ ID NO: 5075 - DNA, 711 bp, Homo sapiens
gctgtcctcgccctcgccccggcgagctgcccccgacgcgagatgtcttatttaccaacaaatccaccagggagcattcttatttgctggctcggcgtctctctcagcagtcaccggagtgccggagggggaagcgcgatttacggaagactattacccagaagaaaagatgtttgtttttcacaagccaaagatgtaccgaagtatagagggctactgtatttgcagagctaagtcctccagttctcgattcactgacagtaaacgctatgaaaaggacttccagagctgtttggattgcatgagactcgttcaggagacatctgcaatgcctgtgtcctgcttgtgaaaagatggaagaagttgccagcaggatcaaaaaaaaaaactggaatcatgtggtagatgcaagggttggacccagtctaaagactacattgaaaccaaagaaagtgaaaactctatctgggaacaggataaaaagcaaccagatcagtaaactgcagaaggaatttaaacgtcataattctgatgctcacaataccacctcaagtgcctccccagctccatctcctcgttacagtaaccagtcagatgacggctcagatacagagatggcttctggttctaacagaacaccagttttttcctttttagatctcacatactggcctcattgacacacatcccttcaagccttgctgcagcaat

SEQ ID NO: 5076 - DNA, 864 bp, Homo sapiens
acttctgcccttttggctctctgaccagcaccatggtggtgggcaagaacaagcaccttacgaaaggcggcaaaaagggagccaagaagaaagtggttgatccattttctaagaaagattggtttgacgcgaaagcacctactacgttcaatataagaaatattggaaagacgctcatcaccaggacccagggaaccaaaattgcatctgatggtctcaagggtcgtgtgtttgaagtgagtcttgctgatttgcagaatgatgaagttgcatttagaaaattcagctgattactgaagatgttcagggcaaaaactgcctaacttccatggcatggatcttacccatgacaaaatgtgttccatggtcaaaaaatggcagacaatgattgaagctcatgttgatgtcaagactaccgatggttacttgcttcgtcttttctgtgttggttttactaaaaaacgcagcaatcagatacggaagacctcttatgctcagcaacaacaggtccgccaaatccggaagaagatgatggaaatcatgactcgagaggtgcagacaaatgacgtgaaagaagtggtcaataaattgattccagacagcattggaaaagacatagaaaagacttgccaatctatttatcctctctatgatgtcttcgttagaaaagtaaaaatgttgaagaagcccaagtttgaactgggaaagctcatggagcttcatggtgaaggcagtagttctggaaaagctgctggggacgagacaggtgctaaagttgaatgagctgatggatatgaaccaccagtccaagaatctgtttaaagttcagacttcaaatagtggcaaataaaaagtgctatttgt

SEQ ID NO: 5077 - protein, 149 aa, Homo sapiens [sequence omitted]

SEQ ID NO: 5078 - DNA, 921 bp, Homo sapiens
atgaaagaggccatcggatgcgaggacatcagcccagtaactttgagggaagaaggttttccttcccctgctgcctatgccgtggggtttgagcacgtctctcggggggaagtcatggcccatagccagcttgctgcaatggaagcgatgcttacagtaaggcgagttccctggacacgatatatgagagtgaggacacagtgcccagagttgggagttgaccgaacctaccttcagatgggatttctgcttgaaaaccaggaagcagaactcagatgtgaattacgctttctagacattcaactgctatcaaagaataattgccatgctaaattatttatatttgtggagcaaatgactttaggcactaaggcttttatctcttcccctgaggaaccttttgaactttgttttcttgaactctatgccatccaggcagggggattagaagaacctcctaatctgagtaatttgaataaactgagggaaattgtggaaaagaaagattacaaggtgatgaaaaagagagtagataatgaagagggtgtaaaaacttataaggtactggaaagggcagccatgaaattcctgaccatggaacccaaactgagagatgacagacttgaaggatatggagaaaaagattcaagttcttggcggagaaggtcatgttcagaagcaagtaaggtagtgagagcgtacttacaacttatcgtgtggaagctgctcagtgatgagactgggaaagatgaatatgcgtacgctctttcactcacagcaaaatcactaagcttctctgagggtataggatactttcttttctatgggtcagtgatggtcattactggaagttcccatcacttcccggtccatcttcctgtgctggagaacaaacctaaacacgagggttggggaaactga

SEQ ID NO: 5079 - protein, 306 aa, Homo sapiens
MKEAIGCEDISPVTLREEGFPSPAAYAVGFEHVSRGEVMAHSQLAAMEAMLTVRRVPWTRYMRVRTQCPELGVDRTYLQMGFLLENQEAELRCELRFLDIQLLSKNNCHAKLFIFVEQMTLGTKAFISSPEEPFELCFLELYAIQAGGLEEPPNLSNLNKLREIVEKKDYKVMKKRVDNEEGVKTYKVLERAAMKFLTMEPKLRDDRLEGYGEKDSSSWRRRSCSEASKVVRAYLQLIVWKLLSDETGKDEYAYALSLTAKSLSFSEGIGYFLFYGSVMVITGSSHHFPVHLPVLENKPKHEGWGN

SEQ ID NO: 5080 - DNA, 303 bp, Homo sapiens
atggtctatggaattaaaaaatatggtccctttgttgcagactttgctgataaactcaatgagcaaaaccttgcccaactagaagaggcgaagcaggcttccatccaacaaatccagaatgcaattgatatggagaagtcacaacaggcactggttcagaagcgccattacctttttgatgtgcaaaggaataacattgctatggctttggaagttacttaccgggaacgactgtatagagtatataaggaagtaaagaatcgcctggactatcatatatctgtgcagaacatgatgtgttga

SEQ ID NO: 5081 - protein, 100 aa, Homo sapiens [sequence omitted]

SEQ ID NO: 5082 - DNA, 2643 bp, Homo sapiens
acgtggtacggaaccggcgccgcgcttgctgctggtaacagggccttgcctagtgggccttccttcccaggtcgcccctcagtctccactagagacaggactgaccagttgctcttccttccaagaaccttcgagatctgcggtctggggtctggttgaaagatggcggccctcactaccctgtttaagtacatagatgaaaatcaggatcgctacattaagaaactcgcaaaatgggtggctatccagagtgtgtctgcgtggccggagaagagaggcgaaatcaggaggatgatggaagttgctgctgcagatgttaagcagttggggggctctgtggaactggtggatatcggaaaacaaaagctccctgatggctcggagatcccgctccctcctattctgctcggcaggctgggctccgacccacagaagaagaccgtgtgcatttacgggcacctggatgtgcagcctgcagccctggaggacggctgggacagcgagcccttcaccctggtggagcgagacggcaagctgtatgggagaggttcgactgatgataagggcccggtggccggctggataaacgccctggaagcgtatcagaaaacaggccaggagattcctgtcaacgtccgattctgcctcgaaggcatggaggagtcaggctctgagggcctagacgagctgatttttgcccggaaagacacattctttaaggatgtggactatgtctgcatttctgacaattactggctgggaaagaagaagccctgcatcacctacggcctcaggggcatttgctactttttcatcgaggtggagtgcagcaacaaagacctccattctggggtgtacgggggctcggtgcatgaggccatgactgatctcattttgctgatgggctctttggtggacaagagggggaacatcctgatccccggcattaacgaggccgtggccgccgtcacggaagaggagcacaagctgtacgacgacatcgactttgacatagaggagtttgccaaggatgtgggggcgcagatcctcctgcacagccacaagaaagacatcctcatgcaccgatggcggtacccgtctctgtccctccatggcatcgaaggcgccttctctgggtctggggccaagaccgtgattcccaggaaggtggttggcaagttctccatcaggctcgtgccgaacatgactcctgaagtcgtcggcgagcaggtcacaagctacctaactaagaagtttgctgaactacgcagccccaatgagttcaaggtgtacatgggccacggtgggaagccctgggtctccgacttcagtcaccctcattacctggctgggagaagagccatgaagacagtttttggtgttgagccagacttgaccagggaaggcggcagtattcccgtgaccttgacctttcaggaggccacgggcaagaacgtcatgctgctgcctgtggggtcagcggatgacggagcccactcccagaatgaaaagctcaacaggtataactacatagagggaaccaagatgctggccgcgtacctgtatgaggtctcccagctgaaggactaggccaagccctctgtgtgccatctccaatgagaaggaatcctgccctcacctcacccttttccaacttgcccagggaagtggaggttccctctttcctttccctcttgtcaggtcatccatgactttagagaacagacacaagtgtatccagctgtccacgggtggagctacccgttgggcttatgagtgacctggagtgacagctgagtcaccctgggtaagttctcagagtggtcaggatggcttgacctgcagaagatacccaaggtccaaaagcacaaggtctgcggaaagttctggttgtcggccgggcaccacggctcacacctataatcgagcactttgggaggccaagacaggaggatcacttgaggccaggagtctgagacaagcctaggcaacaaaacaagactctgtctctacaaaaagtttaagaaatgagccagacatggtggtgtatgcctgtagtcccagccactcagaaggctgaggcaggaggatcgcttgagaccaagagtttgagcctgcggtgagctgtgaatgcaccacggcactcaagcctgggcaatgtagcaagatcctgtctctacaagaaattttttaaaaatgagccaagtgtggtggtgcatgcctgtagttccagctactcaggacactgacgtaggagggttgcttgagactgagagttggaggctgcgatgagccatgaatgccccactgcactccagcctgggcgacagaacgagaccccatctcaaaaaaaataagttctggttgtcattgaattgggataaacagagagcttgatgctttctgccttctgtctcaggtgatgcattgcacatttgggatatttggaaaggaaatgaggaaagaaattagggcctcctctgatctctcgctatctgcgggtcctgtccttttctcaagaccttcaccattactggcattttcctgtcttctctttagtatgatccctcaaaacctcactaactggaaggatgattttgtctcagtttgtactcctaaataaaaagtaaacatgacacctct

SEQ ID NO: 5083 - DNA, 5994 bp, Homo sapiens
  unsure 2355: unknown base
  unsure 2693: unknown base
  unsure 2774: unknown base
  unsure 3036: unknown base
  unsure 3410: unknown base
  unsure 3456: unknown base
  unsure 3474: unknown base
aatctgagagaggccgagtggagttcggtccttctctgaacacttttagctgagagtaccagcatccaactgggagcgttgtcattgcatttccacattcccaggaaagcccaggtgctggctgccagctgctgcgccccccatgtagaaggtgcacctcctgggagcaggcacgtcttttggctcttctgaccatggagagataggacggtccctgcagcccgcgcgacagaaagctgtgccgccaccaccggccgcgcccgtccttcggatggatcgcaacagagaggccgagatggagctgaggcgaggccccagccccaccagggccggccggggccacgaggtggatggggacaaggctacctgccacacctgctgcatctgcggcaagagcttccccttccagagctcgctttcgcagcacatgcgcaagcacacgggcgagaagccctacaagtgtccctactgcgaccaccgggcttcccagaagggcaacctgaagattcacatccggagccaccgcacggggactctgattcagggacacgagccggaggcgggcgaggcgccgctgggtgagatgcgcgcctccgagggcctggacgcctgcgccagccccaccaagagcgcctcggcctgcaaccggctgctgaacggggcctcgcaggccgacggcgccagggtcctgaacggggcctcgcaggccgacagcggcagagtcctgctgcggagcagcaagaagggggcagaggggtccgcatgcgccccgggggaggccaaggcagcggtccagtgctccttctgcaagagccagttcgagcgtaagaaggacctggagctgcacgtgcaccaggcgcacaagccgttcaagtgcaggctgtgcagctacgcgacgctgcgggaggagtcgctgctgagccacatcgagagggaccacatcaccgcgcaggggcccggcagcggcgaggcctgcgtggagaacggcaagcccgagctgagccccggggagttcccgtgcgaggtgtgtggccaggccttcagccagacctggttcctgaaggcgcacatgaagaagcaccggggctccttcgaccacggctgccacatctgcggccgtaggttcaaggagccctggttcctcaagaaccacatgaaggcgcacggccccaagacgggcagcaagaacaggcccaagagtgagctggaccccatcgccaccatcaacaacgtggtccaggaggaggtgatcgtcgccggcctgagcctctacgaggtctgcgccaagtgcgggaacctgtttacaaacctggacagcttgaacgcccacaatgccatccaccgcagagtcgaggccagccgcacgcgcgccccggccgaggagggggcggaggggccctcggacaccaagcagttcttcctccagtgcctgaacctgaggccgtcggcggccggcgactcgtgccctggcacgcaggccggacggcgggtggctgagctggacccggtcaacagctaccaggcctggcagctggccacgcggggtaaggtggccgagccggccgagtacctcaagtacggggcctgggacgaggcgctggccggggacgtggccttcgacaaggacaggcgcgagtacgtcctggtgagccaggagaagcgcaagcgtgagcaggatgcaccagccgcgcaggggcccccgcggaagcgcgcgagcgggcctggggaccccgcgcccgccggccacctcgatccccgctcggccgcgcgccccaaccgcagggccgcagccaccaccggccagggcaagtcctccgagtgcttcgagtgcggcaagatcttccgcacctatcatcagatggtgctgcactcacgcgtgcatcgccgcgcgcgccgcgagagggacagtgacggggacagggcggcgcgggcccgctgcggatcactcagtgagggtgactcggcctcccagcccagcagccctggctccgcctgtgccgctgctgactccccgggctctggcctggccgacgaggctgccgaagacagtggtgaggagggcgcccctgaacctgcaccagggggacagccgcgccgctgctgcttttccgaagaggtgacttcgaccgagctctccagtggagaccagagtcacaagatgggagataacgcctcggaaagagacaccggcgagtccaaggcagggatcgcagcttctgtgtccatacttgaaaacagtagcagagagacttctagaaggcaagagcagcacagattttctatggacttaaagatgccagcatttcaccccaagcaggaggtgcccgtccctggtgatggtgtggagttcccttnccagtacgggagcggagggccagacgggtcaccctgcagaaaagctgtccgatttgcacaacaaggaacactctgggggagggaagcgggcgctggccccagacctcatgccgctagatttaagtgcgaggtcgacgcgggatgaccccagcaataaggagacggcctcctccctgcaggcggctttagtcgttcacccgtgtccttactgcagccacaagacctactaccccgaggtcctgtggatgcacaaacgcatctggcaccgcgtcagctgcaactccgtggctcccccgtggattcagcccaatggttacaaaagcatcagaagcaatttnggttttcctttcccggagcggacgcacgggccccccgcctgccctcggtggcaaagaatgccagcctttgctccttgctcnggttcacccgcactcaggtgccaggggggatgccggggtccaaaagtggctcttctcccctgggagtggtcacaaaagccgctagcatgcctaagaataaggagagccattccggaggtccctgcgctctgtgggcgcccggccctgacgggtatcgacagaccaaaccttgtcacggccaggagccacatggcgcggccacacaggggcccctggccaagcccaggcaggaggctagctccaaaccggtgcctgccccggngtggcgggggcttcagcaggagcgccacccctacgcccaccgtcatcgcccgggctggcgcgcagccctcggccaatagcaagcctgtggagaagtttggggtccccccagcgggggctggctttgcccccacaaataagcacagtgccccggactccctgaaagccaaattcagtgctcagcctcagggtccacctcctgcaaagggcgaagggggcgctcctcctctacctccccgcgagcccccctcgaaggcagcccaggagctgaggactctggccacctgtgctgcggggtccaggggcgacgcggccttgcaggcccagcccggcgtggctggggcgcccccccgtcctacactccatcaaacaggnagccggtggccgaggggcatgagaagcgcctggacatcctcaacantctttaagacgtacattnccaaaggactttgcgaccctctaccagggatggggtgtcagcggccctgggttggagcacagagggacactccggacgcaggcccggccaggagagttcgtctgcatcgagtgcggaaagagcttccaccagcccggccacctcagggcccacatgcgggcacactcagtggtgtttgagtccgatgggcctcggggttctgaagttcataccacctccgcagacgcccccaaacaagggagagaccattctaacacaggtaccgtccagacagtgcctctgagaaagggaacctaaaggcgtgtttccgacgcaccccaggtccccgtaacggccattagcagtaccctcacgatgtcccagcagcctcccacctgtgacctggccgctccatggaagaacagccggggaactcctgagcagacacctcacatcccgagccgctgcgctggagtggaaactgaaggcagatgcctctccttgttaaacgttcagaaataaatgaagatgctatattctagaaatacatgtagatactatatacgcatttacgtgctcatcgtccatagtcccatattttcttataataaacagtagtactggcaggcacagtaggggcacaaggcatctgtcttattcaagacaagtttgagacactggaaaaaaagatacttgttgtgtgtgttggacagagtggcgaggctgagcactgtcacaggggcctcccatgttaagagggactgtggggatgatgtcagaacaagacgtggtggatttgaggttgatcgagtattaatactactgcctctccttgtcttagtgggtatttaaaatagtaaataagagagaggaaggaggtgacgttcaggtgctgtgggaagcaggcttggcggaggggtatgatgatgagaccctcattgttcactggctccatcgcactcctccctggggccgtgtgcctgttccattcttcccaccattcgaactgagcgaatctggcaaaggagacacgtctgtgggaatgcgtagattccgcctcggaagagagctagcgcaacactaagaaaagcaggcttcttgtttattctcaggacctttttgtaacagggctacattctgcaaactgcttacaaaggaagactatacgtcttaacaaattatttagccactgagtcctcccgattcggacctgttttagtaatggcagaagaatccctgagcaggttcaggtgccctagatgactagggtgctgagctctggcgccttctgtccccactctttgcctccccgccccttccctgagccaccccagcaagtgggtgtcttttctccctgggcctggtgacctccacaggatgagtgactttgttcataaagggtggggatcaccagccccttgggtgggggacggcttcatatacctcttcctcagtaatgcaaatgcgagtttttgtggtgggggttaaggcccataacaaaggatcttaaaccatgcagtgtacgcaattgaaatggtattccacagatataaatattttcttttcccattgccgtgacactatgtgtgatggtaatatttctgagagtttcagatttttgcacatatgattttatgcattatcaaaagttactgctgccttgaatgaaaatgttctgtgaaattttttgcaaaagctttactaggtttttttttaattgtgaaattttgtaaaggcaggaaatggattaaaacgagcatgctaaatatatttttcaaaaaagcaataattttacatgtacagaaattatcctaacctttaatactggcgagagcaacagtttacttaatacggtaatggactagtgcagtttttgtagacagtgggcttctgatacaaagtcttgtttaaacacagacacacacacacacaaacacacacacacaccctaaagtgtgggtttcctgttctaatgatttgttgaatattattatattattattattattattattattattgttattgttattagtaatgtttggttctggattctacttgttactgagtttaaattacttgacggttcaggttactttgcaacactttcaaacgatgcaatgtaactggctagcttatatatatatatatatatatatatatatatatttttttttttttttacttatttttttctgatattcttacaccagatatgtacgaaaatgatctgtcctgttggtgtaattaggaatgtccatgcagatacagttaaacaactgtaattgactgttctgtaaagttattttgggcaaagttgcggagacacattcctctgtccacctaagaaatcagaagactcttctgttgatttatgtttaatcatttcagtagtttccccacagtgatcatttctgcattttctggcttttgttttcttggctgaaagtgaatggtgactgttaggaatgtcagggactagtgacccagtcctgtttctctgtgttttagttattaaaaagaaattctgtacccaaagtg

SEQ ID NO: 5084 - DNA, 4260 bp, Homo sapiens
agaccatccaagaagacagtgcagccacctccgagagcctggatgtgatggcgtcacagaagagaccctcccagaggcacggatccaagtacctggccacagcaagtaccatggaccatgccaggcatggcttcctcccaaggcacagagacacgggcatccttgactccatcgggcgcttctttggcggtgacaggggtgcgcccaagcggggctctggcaaggtgagctctgaggagtagaggagttttagtttaaatggaaaaagcaaaggagaaatcagtaggtgaactcagccattagaggaagaactggcacgtagcctcttgctgtctaaggtctcgttccgtgctggagaatgcatatgagcccaagagtgtgggcctgagtggctgcttaggacgttttcgtttaactcaccccctcttttcctcacaagggatggtggccggggtgtggctcaggaatgtaaggacatgctgaattctggatctctaagggtgcctggacatgggcgttgcagaaagagagccacattctcagggtctctggtggtgtgtgcttgcggacttgatgactgatgttgcctctgcagcccacacgctggggttcaacactgggttatgctcgttttttcctggagtcagtgctgctagcttcatgttgctctgcgacaatcataggattgaggtcgaggaagacttttgaacaaactcctcaatttaaatccgccttgagcaaacgttctctgtggtctgagaagtggaaggggggagggataaatgagtgtctatgaatcaaagctttattatcttgtgattccattaatttgcatacagagtcttagaagtttctttattcaaaagcaaatgtggataaaaatgtattacaaaaaaaaaaaactctgctatggggtccagagtctaggagtggtttctgcagttgattgtcagtggagaacctgtggctgctggttcatcaaagcgctggtccctgagtgccattcagattgcagatgcagtattttacgtgatgtttagagtgtttggtggttgtgtaattttggagagaaagaagtttttcccaaaaaagtccctagtttattgggtgttctcacacaacctgtaagatgaagctgtttttctgcctgtgtgcagggctgattctggaattccagaaggccttgtgggagcgtaaaaggcttttgaataaagtgtggaacagagcgcctcattctgataacatgcaatcataaaaaccatagggcaacttggagttaaggagtttctagaatttgctttagtctccaactgcaattctttattgatcatgaaattgttgaagagaaacacaaatgtcagttttacctttcctgtgggcgtgaaagcacatcgaagtttcaggcaactgttaacatctctaccatctgtctgagttgagatttcaggttgtgacacttgccgtgacttatttgtaaatgacattttgtgtgtcttagatactaatggaattcatattctggctagttctttcagtgcatttgtagacatgttcttttcctttgtagcagtcctccctcaccctgaaatgttggtgttctaaccgatttctaatgctaatttcaactggaagcactttttcaagcccagctatcaaaccacaccagacatgtatggattcgggttgcccaataaagcgttgctattatgtaagcatccctcacgcatacagcatcaccagttttgaaagcttgaactattctgcttacttcaaggtacagaaaaaaaaaatgtacttaaactgtgcagaaaagatgaaatcactggataatatgtattataaaataagcttcatgtgagtgacactggtttaagttgaaataaaatggtgaaagcattgatatcaatcattgtgactttatctcaaaacaatattgacacacatagatgtttttcttcctttatggtaagattacagcctttattgtcttaaatctcttatactcttcaatattttcaaagaaaacattctagtctcagaaatagtccatctctttgcaaaacagggctggccaattatcaaggacccataaaaatcaaaacactttcaaaaattttaaaaataaaaataattttcacatgattgctttaggaattttgaagtatccattcttttcactatggagtgttgaatatagaagattttttaatgaacaggcttgccctttgatgccaaaggcaaaaaataataataataacatttgcacgtgtgatcacagagcagctgtgaggcatcccgggggagcgcacgcagtggggatgtgattgctccactcaactattttatcacaaagtgttgtaaacatgggagatgaaagcttaactctctctacacccagctacagacccgcaatggccctaaaaatctggggtattcattgggtgggctgccatggaggaatttttggttttgtttttatttttatttgttgttctgtttacaaatcaggagagcccctgtttttatatgctaggaaggtccttgggataggccgaagaggtgtgcaaacgagcagtggaaggcccgggccctgtctctcaggaccacggcggcctgccccacacacagttctgcttctccctatctagaacgaggttttcctggcagattcctgccagactctgagtggagcccccccatgaccctataaaaggggctgtttgtcctcctcccaccctcctgtgctcttcctccctccccttgagggcacatggccgctggtaccacatgttggagcggccgcccccgagcccgggaatgccctaacaacacccatgcttgtgttgctgggagctgacattcaagaaaagtgcattaaaaattccttgagaaggcatattcttttgagagccgtaaatgaaaagtgcattcacggagaacatgctcctttgttgtgagaggaaagaaaggactgttgttgcctttaaggaacaggtttcccagttccccggaatgtcagggtcacatgaggaatgggtgagcacttagggccaagattgtcgtgtgcttggcccggcagcttctctctaagtgacctctccagcatcactctgtgccagtgctcatatctgaggccacttgagtgtcacgaggcagagcctggaaacattagctttggaaaccgttccttcctttttatgtggaggaagtaaggtttcacaagacacctaagctggacatggtgatgtgccacttggatagttcccaaagcagaaagcagccaggacatcccagtaccccacttctccgtgccgtgtacttttagggaggttttcgaaagctagcttcttaccgatgattttgtctatttttctgttttatgtgaaaaccttcatttataacctgctcttctcagtgttcttctattcagcattcagtatgacttctatgcctctaattgcgactgtatggagaagaactgtttgtcattcagtgccgtgggatataatcagtcctgtaaattcatcagaatgttctgttgcctgattttttttccattgcattttaatttcattaaacatattttagttctacagtaacctaattcctcattgttaccatgagatcctaattctgtagctgtgttctgtaatcccatggggcatgtaccatttggagacacatgaaggatacagtagacagcacggaaggcagcagcaacacacaggggtgtcctccctccccagagcccagtgtgcacacagaaccaaattcaatctcattcatcgtgagcttgcatggtaactgatccagccactcagtacctccattggataagagatttggccacagattcttctagagaaaatccaaatgtggagggtgcatttgtttctgcacccaaacaaataccttttgagatttcttataggcattcctctcgaagtctcattactctgatcagttattgatcggaggctaccctggctcagtcaccagctgctcactgtgtccttctgtggtctcaggagctgcagttgttgctgttgtatgaatagacgatagttaattagactggatgtgtctgtactggcagtgattttgcaacttcctctgtataagcgatacatttgtaaatcatgggaatgtatttgatggtaattgcctgtggtggttgtatcatgatttaattttattatgagcttttggctttatatatttttctgcctttttatgcattcattaaacagtttaacagac

SEQ ID NO: 5085 - protein, 112 aa, Homo sapiens
MGNHAGKRELNAEKASTNSETNRGESEKKRNLGELSRTTSEDNEVFGEADANQNNGTSSQDTAVTDSKRTADPKNAWQDAHPADPGSRPHLIRLFSRDAPGEGGQHLQRQAL

SEQ ID NO: 5086 - DNA, 1231 bp, Homo sapiens
cctggatgtgatggcgtcacagaagagaccctcccagaggcacggatccaagtacctggccacagcaagtaccatggaccatgccaggcatggcttcctcccaaggcacagagacacgggcatccttgactccatcgggcgcttctttggcggtgacaggggtgcgcccaagcggggctctggcaaggtaccctggctaaagccgggccggagccctctgccctctcatgcccgcagccagcctgggctgtgcaacatgtacaaggactcacaccacccggcaagaactgctcactacggctccctgccccagaagtcacacggccggacccaagatgaaaaccccgtagtccacttcttcaagaacattgtgacgcctcgcacaccacccccgtcgcagggaaagggggccgaaggccagagaccaggatttggctacggaggcagagcgtccgactataaatcggctcacaagggattcaagggagtcgatgcccagggcacgctttccaaaatttttaagctgggaggaagagatagtcgctctggatcacccatggctagacgctgaaaacccacctggttccggaatcctgtcctcagcttcttaatataactgccttaaaactttaatcccacttgcccctgttacctaattagagcagatgacccctcccctaatgcctgcggagttgtgcacgtagtagggtcaggccacggcagcctaccggcaatttccggccaacagttaaatgagaacatgaaaacagaaaacggttaaaactgtccctttctgtgtgaagatcacgttccttcccccgcaatgtgcccccagacgcacgtgggtcttcagggggccaggtgcacagacgtccctccacgttcacccctccacccttggactttcttttcgccgtggctgcggcacccttgcgcttttgctggtcactgccatggaggcacacagctgcagagacagagaggacgtgggcggcagagaggactgttgacatccaagcttcctttgtttttttttcctgtccttctctcacctcctaaagtagacttcatttttcctaacaggattagacagtcaaggagtggcttactacatgtgggagcttttggtatgtgacatgcgggctgggcagctgttagagtccaacgtggggcagcacagagagggggccacctccccaggccgtggctgcccacacaccccaattagctg

SEQ ID NO: 5087 - protein, 186 aa, Homo sapiens
MASQKRPSQRHGSKYLATASTMDHARHGFLPRHRDTGILDSIGRFFGGDRGAPKRGSGKVPWLKPGRSPLPSHARSQPGLCNMYKDSHHPARTAHYGSLPQKSHGRTQDENPVVHFFKNIVTPRTPPPSQGKGAEGQRPGFGYGGRASDYKSAHKGFKGVDAQGTLSKIFKLGGRDSRSGSPMARR

SEQ ID NO: 5088 - DNA, 2554 bp, Homo sapiens
ggcgcctgagcggactgacgccgagacgcgcgcgggtcagcggcgcggggacgcggggcgctgggcgcggggctgggggcgcaggccccgaggccgcaggagcgcgcggagcggcgatgagcaggcggccggtggcccgcggggcgcggagcccgtgacagcctcggccaggcgggcgctgcgatggaggccgagggcctggactggctcctggtgccactgcaccagctggtgtcctggggcgcggccgcggccatggtcttcggaggggtggtgccctacgtcccgcagtatcgggacattcgcaggacgcagaacgccgacggcttctccacctacgtgtgcctggtgctgctggtggccaacattttgcggatactcttctggtttggaaggcgctttgagtccccgctgctgtggcagagcgccatcatgatcctgaccatgctgctgatgctgaagctgtgcaccgaggtccgtgtggccaacgagctcaacgccaggcgccgctcctttacagctgcagatagcaaggatgaagaagtcaaggttgcccccaggcggtccttcctggacttcgacccccaccacttctggcagtggagcagcttctcggactacgtgcagtgcgtcctggccttcacgggcgtggcgggctacatcacctacctgtccattgactccgccctgtttgtggagaccctgggcttcctggctgtgctgaccgaagccatgctgggtgtgccccagctttaccgcaaccaccgccaccagtccacggagggcatgagcatcaagatggtgctcatgtggaccagtggtgacgccttcaagacggcctacttcctgctgaagggtgcccctctgcagttctccgtgtgcggcctgctgcaggtgctggtggacctggccatcctggggcaggcctacgccttcgcccgccacccccagaagccggcgccccacgccgtgcaccccactggcaccaaggccctctgacagtggggaggacgaggatgtgggaccgccagccgcgggcactggtgggccctgacctccccgcggggagggtgggtgctgtggcccctgcaggtgtggcagagatggggcatgggcattggggtctccatcagcctctgtggggtgtctcagggtgggcagtgggggtggggctgggacgctgtttgtgctcagcggggacagccagggttgatctggccccgagggttttggatgtttttaggatgacataaaaagcaagtgttttccccatttcctcttatgaaacaccgtctgagcccaaggtacacattgggcggcctgcaggaacctgctccaggtggacacacgggccagcagccgcgaaccttgaagctggggtgaccgcaggagaccctgtaaggcctgtgagcggagccctcgaccccgtgacaccctggccagacaccctgcttggactggggtggcctctgctacccaggggtctggcacgggggagggctggggctttctctgcctggtacacacggaaaggcggctgtgcggacgcagggtcaccgtgctccgggttttctgacagtcggtgtttcctgggcctttggagtggctgcgaggcctgaacgccttgtggatccgctgtgtccagcccggctgagcatcgccagggctagctcatgctgctcttgtcagcctctggttctcctcgagtccttggggacgtggcagatgccagcgaccatcagacaacgtggaggccctcatgggcaatggctgagggggccgggctgaggctgtgcacatgcagtctgcacgccactcttgggctctgctggcggagatccccttccttctgggtgcagactgcacctccggatgcagttttgatgtccatcttccaggagagacggtctcgggtccagggagtggagggggctgcccctgccgtgcaggtcctggccgatggcgccttaccctgctgccctgggcttttggcctgaagcaaattcctgagtggggggtactggggcctgccgcatcctgtcctgtccactgcccacccccgtgtgctggctccctcacttctggctgcagtgggagccgccagtctgacccttgtcaccgcacgctctgcccccaccccgttgcaagaggtcacaccatgtcagcagccttgcactgaccgcagccggcccccaggcctcagagttctggatgcttccgtgcggctccaacaggcatcgtcttcccttccgcaggtggaggggccgcttcccgcaggcatctgagctctgtgccggggccgtggccatgggaagatgttccacgctgcctcctcctcgagttttcctcggaaacactcttgaatgtctgagtgagggtcctgcttagctctttggcctgtgagatgctttgaaaatttttatttttttaagatgaagcaagatgtctgtagcggtaattgcctcacattaaactgtcgccgactgcaggcgcagtgactgctgaatgtaccctgtgtggcgacttggaatcaataaaccatttgtggatcctg

SEQ ID NO: 5089 - DNA, 3686 bp, Homo sapiens
ctgggttgtgtcgccgcggtaggcgctgcgctctgagcgcagcgcaggccccgtaccgaccgcccgcccgccctctgtccgcgatggaggtgccggccgcgggtcgcgttcctgccgagggcgccccgacggcggctgtggccgaggtgcgctgcccggggcccgcgccgctgcgcctgctggagtggagggtggcggcgggcgcggccgtgcgcatcggctcggtgctggccgtgttcgaggccgccgcctccgcgcagtcctccggggcctctcagtcccgtgtagcctccgggggctgcgtgcgccccgcgcggccggaacgcaggctgaggtcggagcgcgcgggcgtggtgcgggagctgtgcgcgcagccgggccaggtggtcgccccaggagcggttctggtgaggttggaaggatgcagccacccggttgtcatgaaaggcctgtgtgctgaatgtggccaagacctcacccagttgcagagtaagaacgggaagcagcaggtgccgctgtccacggcgaccgtgtccatggtgcacagcgtgccggagttgatggtgagctccgagcaagctgaacagctgggaagagaagaccagcagcgactgcaccgaaaccggaagctggtgctcatggtggacttggaccagacgttgattcacacaaccgagcagcactgtcagcagatgtcgaataaaggcatctttcacttccagctgggccggggtgagcccatgctgcacacgcgcctgcgtccacactgcaaggacttcctggagaagatcgccaagctgtacgagctgcacgtcttcaccttcggcagccggctgtacgcacacaccatcgcaggctttttagaccccgagaagaagcttttttctcaccgaatattatcaagggatgaatgtattgacccattttctaaaacgggaaaccttagaaatctctttccttgtggagactcaatggtttgcattattgatgatcgagaagatgtctggaagtttgcccccaatctgataactgtgaagaaatatgtatacttccagggcacgggtgatatgaatgcgccccctgggtcccgagaatctcagacgagaaagaaagtaaatcattctcgaggcactgaggtctcagagccatctccgcccgtgagagaccctgagggggtaacgcaggcccctggagtggagcccagcaatggcctggagaagcctgcacgggagctgaacggcagcgaggccgccaccccgcgggactcaccccgccccgggaagccagacgagagggacatctggccccctgcccaggcccccaccagcagccaagagctggcaggcgctcctgagccccagggatcctgtgcgcagggtggccgggtggcaccgggacagcggcctgcccagggtgccacgggcactgacctggactttgacttatccagcgacagcgagagcagcagtgagtccgagggcacgaagtcctcctcctccgcctctgatggcgaaagcgaggggaaaagaggccggcagaagccgaaggctgccccagagggagccggggcgctggcacagggcagttccctggagccggggcggcctgcagcaccgagtctccccggagaggccgagcctggcgcgcatgccccggacaaggagcctgagctgggtgggcaggaggagggcgagcgggatggcctctgcggcctgggcaacggctgtgccgacaggaaggaggcggagaccgagtcacagaacagcgagctgtcgggggtcactgcgggtgagtccctggaccagagcatggaggaggaggaggaggaggacacggatgaggatgaccacctcatctacctggaggagatcctggtccgtgtacacactgactactatgccaagtatgaccgctacctcaacaaggagatcgaggaggcgccggacatccgcaagatcgtgccggagctcaagagcaaggtgctggcagacgtggccataattttcagtgggctacacccgacaaacttcccgatagagaagacgcgggagcattaccacgccacggcgctgggagcgaagatcctcactcggctggtgctgagccccgacgcccctgacagggccacgcacctgatcgccgcgcgagctggcacagagaaggtgctgcaggcacaggagtgcggacacctgcacgtggtcaaccctgactggctgtggagctgcctggagcgctgggacaaggtggaggagcagctcttcccgctcagggacgatcacaccaaggcacagagggagaacagccctgcggcctttcccgaccgggagggtgtgccccccaccgccttgttccacccgatgccggttcttcccaaggcccagcctggccccgaggttcggatctacgactccaacacggggaagctcatcaggacgggcgcccgggggcccccagcaccctccagctccctacccatccgccaggagccctcttccttcagagcggttccgccaccccagccgcagatgtttggtgaagagctgcctgacgctcaggacggagagcagcctggcccttctagaagaaagcgacagcccagtatgtctgagacaatgccgctgtacactctttgtaaggaggatttagagagtatggacaaagaggtggacgacatccttggagaaggcagcgacgacagcgacagcgagaagaggaggcctgaggagcaggaggaggagccccagccccggaagccagggacccgcagggagcggacgctcggggcacctgcgtccagcgagaggagcgcggcagggggccgggggcccagaggccacaagaggaagctgaatgaagaggacgccgccagcgagtccagcagggagtccagcaacgaggatgagggcagcagctccgaggccgacgagatggccaaggcgctggaggcggagctcaacgacctcatgtgagcgcgggcagcgggcagggactgaagcctgaccgacctccagcagcactcggacgtccccggaccagccctcagtctcggtccacgctgctttcttcccaaaggacatgtatatttgcagagctccacatacagaaacacattattttgcagaaataggtgtttttaagaagttttactacaggaatgtctacttttgtaagtgacaggtgttaaaggcccaggtgtgctgtgccaaagagctcagcagaggctcacgtggcccaggctggtgcgcccgctgtctcggtaaggggcgggttggtgtgttttccccttgtgtaccagagcacattccttaggggacggctttgggggtcccacgagacatggactaggagtttaagcaggacagtgtgcgtgcacgagctccgagcccagcacagacatgcctggaacccccgccgcctgctgctccctcctagggaacccatttccggggaacgccgtgactgtcgggcagcctggagcttcctgcagcctcctacgcagggtccacgccacgtggcctgggctgccatcctgccgtcctcccactggcatcctggcaagggggcgttgcttttcctgggcggccttttatgtcttggagacacctgatgtaaagtttctgtaaatctatttcatatctgacccaccaaacagatttctctttaataaaaatcctttttgtaagttc

SEQ ID NO: 5090 - DNA, 5136 bp, Homo sapiens
cacccttccatcaccccagcctgaaactctacccattgaacacgagctgcccaactccgccttgcttccccattcctggcgaccactgcttctgtctctgtgaattttgactattctaggcacttcacaaaactggactcatacgatatctgtagttttgcgtctggcttctctattgaattcttaaaggggggtgggaactaagcagatcacaagggagctgcccacagaggtaaagacaaggtcaggtaggctgagagacgcaggaaagcgggtcaaggcgtagggctggagggcaggggcgggccctgggcgtgggctgggggtcctgccccggggcgcaccccgggcgagggctgcccggaggagccgaggttggcggacagcttggccctgagcttgaggggaaggcagcgatgggacaaaggacggaggtctaggaagagggtctgcagagcagaaagcacgggtaggggcggcctgacgctcggaagacaacgcatgggagccgtgtgcacgtcgggagctcggagtgagcgtgagttccgtgcccaggcccgcgactcggcccgacaggacagcgctccgggtcgacggggtcctggagccgcgctcggggagggcgcagcggagggcgagcggcggcgttaggacccggaggcgcgggcggactgggggcggcggggctaggacccagcggctccggcagagcggaagcggcggcgggagcttccgggagggcggctcgcaggcaccatgactcctgtgaggatgcagcactccctggcaggtcagacctatgccgtgcccttcatccagccagacctgcggcgagaggaggccgtccagcagatggcggatgccctgcagtacctgcagaaggtctctggagacatcttcagcaggtgggtgctgccactcacccccacctgatgagagggccatccctgtcctgggcaatcccagcaacacaccctctgggagcagcccccttggggaatcccggtcctggggaacccatctggcttccctgtgtgggaggggctgaagtgagagcccaacttggaagcttttactcctgggagtccaagagctcactcccttccaccccacttagcctcctggtttcctgtggtggctctgctctcacaactcatgcttttcctcccattggagggcctattccttcacgttttcctgcagccaacaaatatttacccagcagtgctcgtgtgcaaggcagtgtgggaatctctatatatccagccacggataaggcaacatacctctccacctggagcgcacattctggcaggagagaaagacctaaataagcaatagatgattagttcttcaataacagttgtgacaaggtctattgataatattttgtaatcactaatattcatataaaccgtgcacaaccattgatttgagtgcattaactcacacttcatgagcaggcactgccgtcatctcattttatagatgaggaaactgaggcacagaagggctgagagacctggcctagtgacagagccaggattcaaagccatagatcatggccccgggttatgtaggttattactgcatctgttcaggggagatggggtactgtgaggctcgtcatgggaagcctggcttggtctcaggtcagggaaggcagacgtgaggaaatgacatttatggtaaagtctgagggttgagtgggtaggttgggaagaacattccagaaagaagcacatgaactacagcctggaggtggaggacctaaaaggaagccagcatggctggagcacggagtggccattgagggaggcgagctggagggctgcagcttcttgtattggcagtgctgacctcgcacagtccttgggctccagtgacttcactcagtgtttatctaacatgagtgagtgaatggtgtttgctctttttttggtaaaggtcccaggggttgtcgggtacacaggtcctgtctttggccataagcaaactgaaatgaggcttggtctccttcccaggatcccacaccatgcctcacatggtagaccccagtgggaagtatgtgactgcctgactcaggtgcctctcgtggtccaagccatccctgccctgtcccttccctggttgtcgccagacctggagcccctgctccttcactttgcagcctcctcttctgtcaccaactgggaacccacctcttcctgaaagtcctcccccactgactcaccggcttgccccgagtttgtcaagaatgtcccagtaaccaggggacacacagtgaagtgactgaggggttaccttggagttgatgccttggctcagatccagctcccctgttttcttcctctgtaaccttgggcaacccaacccctctaagcctcggtgttctcatttgtgaagttgtggtaataatggtagcttcctggtagaattattttaaatattaaattaatcaaaacatgcaaaggaatggaacagtgcctggcacttaggaagccttcaggaaatgctatctcttccctgttgataatcttgacccgtacactgcctttggttgccattcataaacctgccaccaatagtaacaaagtgctggatgcaccttttgtgcttatctttgtgctaaatgtgcccgagggacacctagggaagaggatgcaggtctttaagagccatcagctccagattatggccaccccatgtccagcacttagaatggaggccaaaaccattccctcggaaattgtgtttccttgccaagatggggactgcgtggttgcccttctctgagggcagcgctggatttttggcgtctttcctttcctgtcctggtacttggcaccttgtagacagttgcatgtcccctgcccagggatgggatgaggagagggcaggaaggcatttcctgggtagtggagtgctgcgttcattgagtgtgggttctccaagctgctggcacagcgcagggagggccagatgcctctcaggagccttgggcctgagtcctggctccctcactcctgggttccaggtcactgcatctgtctctccaccatgtgctccacctcgtgctggaccttaagagataccaattatgtggctgccactgtgtcctagaggctggaatgggaacacatagggcgagattgattgttaattgctagcatgaaccgcgtgggcttctcagggtctagagtggagagaaatcggtaagaattggtggcacgcctgtcagaactccccagaccaagctaagcaaaaattaaccaatcagtagagcagccttcggagtaagggctaaaatgatgtcctcagggcctggttttgctttccttccatgtcagtttgcttctttgggtctggctgcattcccagacaggccatgctctcgtggtagcaaggtgacatgacacagggtcaggtccagcaggaaagaatgctgtcctgtgtccccacttcctccagaagccacactcactcatcccacctggcttggtcctcatgtctatcccagaatccattaatggggccaggggactatgacacaccacttggcttagactgaggagctctgtgggcagccccacctgaagctctgggactaagcctgcgagagagatggattccccaagggaaatggggccattgcttgagtaaaaaggaaatagttgctgaagaggaaaaccacgtgcttactccacatagggcagactcctggaagaggggggcagggtagggaggtggatatgcaggttgccctggcagggtctggaaatgggggctgcaggcttggagggaggcctcagtgtggcttggaacgtggtgtatggtggtctgccgcgaaggccggcctgcacaggggtgggaggggggtgcttctgcatgggaagcacagacagcgctgcctctcccttgcactcagctctcggggcatgagaggctaactttccgtgagcctgtgggccaggcctctttgaatggggctgagggagctttgccctggttcctttgtgtccccacggtgccacgggaggctccctggcagggtgtggggcagggcagtgagtgaagagttgggatgagtgagttagggcccacggattactcaagacaggacttcaagttgattcaggcgtgttagggagctgtgattggattttgagcagggcagggatgggacagaagagtttggggaaggttcctcaggcatccgtcacagaagggacaagaagggagagagagtggatgccagggacacccagaagctgttattgtagtcaggatacgacaggggtgaggctacagacaggggacttgcaagcagggagggcagggtgagacattcagaggaaacgacgacaggaaatggtgacagatagggaacgaggatgaagggaagggagagccagtgacgactggcagtggagtggggagcaccgccacctctcctcctccacttgcccctcctgtggcactggacaagctagtgggcttttcgttgtccatgggctttttcggtggggatgtgaccagctttgaacccgtccccttaaacatgctcctcctgcacggaagagacaggggcaggggagagactctctccccaccacccggctcaggccccagcacagcccggcctctggcctcactggcgtctgtgcccagtgacgcaggcaggtgagctcctggcaaattagcattgcaggctgtgctctctcctcctgctctgctgcagctgggagtgtgcagagactggaggggatgacagtcaccctctgttttctgtggtggctctgttttctgtggtgctggatgcacctctgttttctgtggtggctccaagagagtgcacggtccctgctgattgaaagaaggatgaagggcagaagaggggcggggagctgtgtgccctaagatctcattgcctttttatgccgattaacatgcttttagcccctactgagcttatagttaacagaagtttccaggtctttcttcacctgaactgtgtctaaagcaagttccctccaccttctgtatttatacgcttgatttttaaaacctaaatgttgggcttcacatttgttccttgtaaatttcatcttggtgattgcagtctaccctctggcc

SEQ ID NO: 5091 - protein, 133 aa, Homo sapiens
MRGPSLSWAIPATHPLGAAPLGNPGPGEPIWLPCVGGAEVRAQLGSFYSWESKSSLPSTPLSLLVSCGGSALTTHAFPPIGGPIPSRFPAANKYLPSSARVQGSVGISIYPATDKATYLSTWSAHSGRRERPK

SEQ ID NO: 5092 - DNA, 2672 bp, Homo sapiens
agatgatgattattccccaccttctaagagacaaagaccaacgagccgccacagccaccagtcccagaacccgccaatgctggggaacggaaaatgagggagttcaactctggccctcacaatccagtggaggagacgcaactcatctgcctctgtccctctgggcacgcctcgtgccaggtgcatctgtggacaggggccatgctcctgggcttccaaagttggagaaagctgccaggctcaggtctgaaggccagaattctacagtaagtcctactgagtcaaggtgggagcagggtcggtagcttccgaggctctgcgggagaatctgtttcctggccgtagaggtggcctgcactcctcagcctgtgctgcccgtctcgaatgactggagtttcctgcttctgtcactacacctcccaccctctccatcacctgctctgctcttacaaggatccgaagaaatggaatcatcgtatcgctgatctacgtaaacaaactgaagaattgtctgaaagaaaatatgacatgaacttatgaattcaataggtgaagatttacaacttgataaatcaactttgtcagctcgagctgtaaaagccaaaggtccggtgatgatcccatacccttttttccagtctcatgttgaagatttttatgtagaaggccttcccaaaggaattttttttttttttttttttttgagatggagttttcactcttatcgcccaggctggggtgcaatggcacaaccttgctggtcactgcaacctctgcctcctgggttcaagaaattctcctgccttagcctcccaagtcactgggattacaggtgcccaccaccacaccaggctaatttttgtatttttagtggagatgcggtttcaccatgttggccgggccagtctcgaactcctgacgtcaagtgatcttcccgcctcgactcctgatatcaagtgatcttcccgcctcggcctcccagagtgctgagattacagacgtgaacccatgcctggccaggaattttgttttttaggaaggctttctactaatggaattcctggccttgagaggatgttactttagaaggaaaggatttttttgttattaaaagctggacctaccatgaaagacttctgaatccaggaagagaaactgactgggcaacatgttattcagaaacaggaccttgccctgtcactcaggatggagttcagtggtcctatcatggctcattatagcctcaaactcccaggctcaagcaatcctaccatgtcagccttcccagtagctggaactacagataccgggtctcacactgtcacccaggctggagtacagtggcacaacctctgctcactgcagcctccacctgccaggctcaagcaattctcctgcctcagcctcccgagtagctggtgatttccaggaagtgcgctcacaatgactcaagctgccacatactgttgattgtgaaatgccagttgaagcatatgtcctgcaagcttaggggtgctacaagttgaccactgcagcagtaaagatgactctgaagaacggcgtgggatggttcctttcaaatgcacttgagcagcggtctccaaccacagggccacagagctggagctggatctaccatgaaagacttgtgaatccaggaagagagactgactgggcaacatgttattcagaatctccctgtgccatccaggctggagtgcagtgatgtgatcatagctcactatagctttggccttctgagatcaagcaatcctcccatctcaacctcccaagtagctaggactacacacgcatgccacccatgcccagatcatttttgtagagtcagagtttcaccgtggtggccaggttggccatgttggccagatggggtcttcttttgttgcccaggctggccacaaattcctgggctcaagtgatcctcccacctcgtccttgtagagatgagatttagttatgtcgtccaggctgatctcaaactcctgggctaaatcgattgtctcacctcagcctctcaagtatgttatgaaggttatatgttaggaagggtcccaggaggtaaacccacacagatgggatttgggcataggtttggtttcccagggggcagtgctgagctctttgccagtgggaaatgggatgctggtgatttccagtaggtgacctcacagtgactcaagctaccacttactgttgattgtgacgaaatgccagctgaggcacatgccttgggagctaagtggttgctgcccttgaccactgtgaagactggtgtgggaagggtcgttttggatgcacttgagcaggggtccccaacccctgagccatggagccgcaaggagccacacagcaggaggtgggaacatccagttgcaggaaaacaagcttaacacgcccactgattctacattatgctcctacctcccggcagcctctccaggcccagaactttctccagtcagcctctacagaccaagctcatgactcacaatggcctatttaggcccataccctacgtcacggcagcctccgcagatgaggctactgcctcacaacagcctccacaggcacagctccatcgttacaatggcctctttagacccagctcctgcctcccagccttctctccaggccctgaactttctcaagtc

SEQ ID NO: 5093 - DNA, 1269 bp, Homo sapiens
gcgacgggacgcgctgggaccggcgtcgggggtcgcggggaccatgcagcggaggtgggtcttcgtgctgctcgacgtgctgtgcttactggtcgcctccctgcccttcgctatcctgacgctggtgaacgccccgtacaagcgaggattttactgcggggatgactccatccggtacccctaccgtccagataccatcacccacgggctcatggctggggtcaccatcacggccaccgtcatccttgtctcggccggggaagcctacctggtgtacacagaccggctctattctcgctcggacttcaacaactacgtggctgctgtatacaaggtgctggggaccttcctgtttggggctgccgtgagccagtctctgacagacctggccaagtacatgattgggcgtctgaggcccaacttcctagccgtctgcgaccccgactggagccgggtcaactgctcggtctatgtgcagctggagaaggtgtgcaggggaaaccctgctgatgtcaccgaggccaggttgtctttctactcgggacactcttcctttgggatgtactgcatggtgttcttggcgctgtatgtgcaggcacgactctgttggaagtgggcacggctgctgcgacccacagtccagttcttcctggtggcctttgccctctacgtgggctacacccgcgtgtctgattacaaacaccactggagcgatgtccttgttggcctcctgcagggggcactggtggctgccctcactgtctgctacatctcagacttcttcaaagcccgacccccacagcactgtctgaaggaggaggagctggaacggaagcccagcctgtcactgacgttgaccctgggcgaggctgaccacaaccactatggatacccgcactcctcctcctgaggccggaccccgcccaggcagggagctgctgtgagtccagctgatgcccacccaggtggtccctccagcctggttaggcactgagggttctggacgggctccaggaaccctgggctgatgggagcagtgagcggttccgctgccccctgccctgcactggaccaggagtctggagatgcctgggtagccctcagcatttggaggggaacctgttcccgtcggtccccaaatatccccttctttttatggggttaaggaagggaccgagagatcagatagttgctgttttgtaaaatgtaatgtatatgtggtttttagtaaaatagggcacctgtttcacaaaaaaaaaaaaaaaaaaa

SEQ ID NO: 5094 - protein, 288 aa, Homo sapiens
MQRRWVFVLLDVLCLLVASLPFAILTLVNAPYKRGFYCGDDSIRYPYRPDTITHGLMAGVTITATVILVSAGEAYLVYTDRLYSRSDFNNYVAAVYKVLGTFLFGAAVSQSLTDLAKYMIGRLRPNFLAVCDPDWSRVNCSVYVQLEKVCRGNPADVTEARLSFYSGHSSFGMYCMVFLALYVQARLCWKWARLLRPTVQFFLVAFALYVGYTRVSDYKHHWSDVLVGLLQGALVAALTVCYISDFFKARPPQHCLKEEELERKPSLSLTLTLGEADHNHYGYPHSSS

SEQ ID NO: 5095 - DNA, 1615 bp, Homo sapiens
gccgcgggcggcggcggcagcggttggaggttgtaggaccggcgaggaataggaatcatggcggctgcgctgttcgtgctgctgggattcgcgctgctgggcacccacggagcctccggggctgccggcacagtcttcactaccgtagaagaccttggctccaagatactcctcacctgctccttgaatgacagcgccacagaggtcacagggcaccgctggctgaaggggggcgtggtgctgaaggaggacgcgctgcccggccagaaaacggagttcaaggtggactccgacgaccagtggggagagtactcctgcgtcttcctccccgagcccatgggcacggccaacatccagctccacgggcctcccagagtgaaggctgtgaagtcgtcagaacacatcaacgagggggagacggccatgctggtctgcaagtcagagtccgtgccacctgtcactgactgggcctggtacaagatcactgactctgaggacaaggccctcatgaacggctccgagagcaggttcttcgtgagttcctcgcagggccggtcagagctacacattgagaacctgaacatggaggccgaccccggccagtaccggtgcaacggcaccagctccaagggctccgaccaggccatcatcacgctccgcgtgcgcagccacctggccgccctctggcccttcctgggcatcgtggctgaggtgctggtgctggtcaccatcatcttcatctacgagaagcgccggaagcccgaggacgtcctggatgatgacgacgccggctctgcacccctgaagagcagcgggcagcaccagaatgacaaaggcaagaacgtccgccagaggaactcttcctgaggcaggtggcccgaggacgctccctgctccacgtctgcgccgccgccggagtccactcccagtgcttgcaagattccaagttctcacctcttaaagaaaacccaccccgtagattcccatcatacacttccttcttttttaaaaaagttgggttttctccattcaggattctgttccttaggtttttttccttctgaagtgtttcacgagagcccgggagctgctgccctgcggccccgtctgtggctttcagcctctgggtctgagtcatggccgggtgggcggcacagccttctccactggccggagtcagtgccaggtccttgccctttgtggaaagtcacaggtcacacgaggggccccgtgtcctgcctgtctgaagccaatgctgtctggttgcgccatttttgtgcttttatgtttaattttatgagggccacgggtctgtgttcgactcagcctcagggacgactctgacctcttggccacagaggactcacttgcccacaccgagggcgaccccgtcacagcctcaagtcactcccaagccccctccttgtctgtgcatccgggggcagctctggagggggtttgctggggaactggcgccatcgccgggactccagaaccgcagaagcctccccagctcacccctggaggacggccggctctctatagcaccagggctcacgtgggaacccccctcccacccaccgccacaataaagatcgcccccacctccaccctc

SEQ ID NO: 5096 - protein, 269 aa, Homo sapiens
MAAALFVLLGFALLGTHGASGAAGTVFTTVEDLGSKILLTCSLNDSATEVTGHRWLKGGVVLKEDALPGQKTEFKVDSDDQWGEYSCVFLPEPMGTANIQLHGPPRVKAVKSSEHINEGETAMLVCKSESVPPVTDWAWYKITDSEDKALMNGSESRFFVSSSQGRSELHIENLNMEADPGQYRCNGTSSKGSDQAIITLRVRSHLAALWPFLGIVAEVLVLVTIIFIYEKRRKPEDVLDDDDAGSAPLKSSGQHQNDKGKNVRQRNSS

SEQ ID NO: 5097 - DNA, 1607 bp, Homo sapiens
cgggcggcggcggcagcggttggaggttgtaggaccggcgaggaataggaatcatggcggctgcgctgttcgtgctgctgggattcgcgctgctgggcacccacggagcctccggggctgccggcacagtcttcactaccgtagaagaccttggctccaagatactcctcacctgctccttgaatgacagcgccacagaggtcacagggcaccgctggctgaaggggggcgtggtgctgaaggaggacgcgctgcccggccagaaaacggagttcaaggtggactccgacgaccagtggggagagtactcctgcgtcttcctccccgagcccatgggcacggccaacatccagctccacgggcctcccagagtgaaggctgtgaagtcgtcagaacacatcaacgagggggagacggccatgctggtctgcaagtcagagtccgtgccacctgtcactgactgggcctggtacaagatcactgactctgaggacaaggccctcatgaacggctccgagagcaggttcttcgtgagttcctcgcagggccggtcagagctacacattgagaacctgaacatggaggccgaccccggccagtaccggtgcaacggcaccagctccaagggctccgaccaggccatcatcacgctccgcgtgcgcagccacctggccgccctctggcccttcctgggcatcgtggctgaggtgctggtgctggtcaccatcatcttcatctacgagaagcgccggaagcccgaggacgtcctggatgatgacgacgccggctctgcacccctgaagagcagcgggcagcaccagaatgacaaaggcaagaacgtccgccagaggaactcttcctgaggtggcccgaggacgctccctgctccacgtctgcgccgccgccggagtccactcccagtgcttgcaagattccaagttctcacctcttaaagaaaacccaccccgtagattcccatcatacacttccttcttttttaaaaaagttgggttttctccattcaggattctgttccttaggtttttttccttctgaagtgtttcacgagagcccgggagctgctgccctgcggccccgtctgtggctttcagcctctgggtctgagtcatggccgggtgggcggcacagccttctccactggccggagtcagtgccaggtccttgccctttgtggaaagtcacaggtcacacgaggggccccgtgtcctgcctgtctgaagccaatgctgtctggttgcgccatttttgtgcttttatgtttaattttatgagggccacgggtctgtgttcgactcagcctcagggacgactctgacctcttggccacagaggactcacttgcccacaccgagggcgaccccgtcacagcctcaagtcactcccaagccccctccttgtctgtgcatccgggggcagctctggagggggtttgctggggaactggcgccatcgccgggactccagaaccgcagaagcctccccagctcacccctggaggacggccggctctctatagcaccagggctcacgtgggaacccccctcccacccaccgccacaataaagatcgcccccacctccaccctc

SEQ ID NO: 5098 - DNA, 1681 bp, Homo sapiens
ggcacgaggatacctcctcatcaactctgacatagtgtgcgaacaggacatctacgagtggactaagatcaatggccggcggcgggtgccgcgcggggggcgggcggcgcggagtaggtggcggcggccatggccgaggcgtcgccgcatcccggacggtacttctgccactgctgctccgtggagatcgtcccgcgcctgccggattatatctgtccaagatgcgagtctggttttatcgaggagcttccggaagagaccaggagcacagaaaatggttctgccccctccacagctcccacagaccagagccggccaccgctggagcacgtggaccagcacctgttcacgctgccgcagggctacggacagtttgctttcggcatcttcgatgacagcttcgagatccccacgttccctcctggggcgcaggctgacgacggcagggaccctgagagccggcgggagagagaccatccgtcccggcaccggtacggcgcccgacagccccgcgcccgcctcaccacgcggcgggccaccggccggcacgaaggcgtccccacgctggaagggatcatccagcagctcgtcaacggcatcatcacgcccgccaccatccccagcctgggcccctggggagtcctgcactcaaaccctatggactacgcctggggggccaacggcctggatgccatcatcacacagctcctcaatcagtttgaaaacacaggccccccaccggcagataaagagaaaatccaggccctccccaccgtccccgtcactgaggagcacgtaggctccgggctcgagtgccctgtgtgcaaggacgactacgcgctgggtgagcgtgtgcggcagctgccctgcaaccacctgttccacgacggctgcatcgtgccctggctggagcagcacgacagctgccccgtctgccgaaaaagcctcacgggacagaacacggccacgaacccccctggcctcactggggtgagcttctcctcctcgtcgtcatcgtcctcctccagctcgcccagcaacgagaacgccacaagcaactcgtgagcccacgtcggccgtcgggaaagcacggggcctttcccacccaccctcagccagcgccacacggcacccacagactgggtgccccggcggcgccacgcttggctggtcagcgctgcaggtcccgcctgttccagggcaggacccgggcccggcccaccggccccctggcttgggaaggcgtgggccacatggtcccctctggggcgtccccagcctccccgtcctctgtctaacctcaccctctaaacgttcagcggtggaaagatttttataattttaaattattactgctttgaaataaacggacgtttgagctcacgtggcggccatgcatggtttgtggcggaagacggggcccagcggctcccccagcgctgaagcacggggttcagcggctcccccagtgctgcaggtgccgccaggacgggccacgtgggcccccagcctccccctcggccgcctccacgacccggagtaggggggctcgggaccatgaggatgaccagcaaaattcaagaacaaaactgctccaacagacttttttaaaggaaaaaatatgtgtatcttgaaagctatttaaaatacactacttacaaagaaaaaaaaaaaaaaaaaa

SEQ ID NO: 5099 - protein, 311 aa, Homo sapiens
MAEASPHPGRYFCHCCSVEIVPRLPDYICPRCESGFIEELPEETRSTENGSAPSTAPTDQSRPPLEHVDQHLFTLPQGYGQFAFGIFDDSFEIPTFPPGAQADDGRDPESRRERDHPSRHRYGARQPRARLTTRRATGRHEGVPTLEGIIQQLVNGIITPATIPSLGPWGVLHSNPMDYAWGANGLDAIITQLLNQFENTGPPPADKEKIQALPTVPVTEEHVGSGLECPVCKDDYALGERVRQLPCNHLFHDGCIVPWLEQHDSCPVCRKSLTGQNTATNPPGLTGVSFSSSSSSSSSSSPSNENATSNS

SEQ ID NO: 5100 - DNA, 3301 bp, Homo sapiens
cttgtgagtctataactcggagccgttgggtcggttcctgctattccggcgcctccactccgtcccccgcgggtctgctctgtgtgccatggacggcattgtcccagatatagccgttggtacaaagcggggatctgacgagcttttctctacttgtgtcactaacggaccgtttatcatgagcagcaactcggcttctgcagcaaacggaaatgacagcaagaagttcaaaggtgacagccgaagtgcaggcgtcccctctagagtgatccacatccggaagctccccatcgacgtcacggagggggaagtcatctccctggggctgccctttgggaaggtcaccaacctcctgatgctgaaggggaaaaaccaggccttcatcgagatgaacacggaggaggctgccaacaccatggtgaactactacacctcggtgacccctgtgctgcgcggccagcccatctacatccagttctccaaccacaaggagctgaagaccgacagctctcccaaccaggcgcgggcccaggcggccctgcaggcggtgaactcggtccagtcggggaacctggccttggctgcctcggcggcggccgtggacgcagggatggcgatggccgggcagagccccgtgctcaggatcatcgtggagaacctcttctaccctgtgaccctggatgtgctgcaccagattttctccaagttcggcacagtgttgaagatcatcaccttcaccaagaacaaccagttccaggccctgctgcagtatgcggaccccgtgagcgcccagcacgccaagctgtcgctggacgggcagaacatctacaacgcctgctgcacgctgcgcatcgacttttccaagctcaccagcctcaacgtcaagtacaacaatgacaagagccgtgactacacacgcccagacctgccttccggggacagccagccctcgctggaccagaccatggccgcggccttcgcctctccgtatgcaggagctggtttccctcccacctttgccattcctcaagctgcaggcctttccgttccgaacgtccacggcgccctggcccccctggccatcccctcggcggcggcggcagctgcggcggcaggtcggatcgccatcccgggcctggcgggggcaggaaattctgtattgctggtcagcaacctcaacccagagagagtcacaccccaaagcctctttattcttttcggcgtctacggtgacgtgcagcgcgtgaagatcctgttcaataagaaggagaacgccctagtgcagatggcggacggcaaccaggcccagctggccatgagccacctgaacgggcacaagctgcacgggaagcccatccgcatcacgctctcgaagcaccagaacgtgcagctgccccgcgagggccaggaggaccagggcctgaccaaggactacggcaactcacccctgcaccgcttcaagaagccgggctccaagaacttccagaacatattcccgccctcggccacgctgcacctctccaacatcccgccctcagtctccgaggaggatctcaaggtcctgttttccagcaatgggggcgtcgtcaaaggattcaagttcttccagaaggaccgcaagatggcactgatccagatgggctccgtggaggaggcggtccaggccctcattgacctgcacaaccacgacctcggggagaaccaccacctgcgggtctccttctccaagtccaccatctaggggcacaggcccccacggccgggccccctggcgacaacttccatcattccagagaaaagccactttaaaaacagctgaagtgaccttagcagaccagagattttatttttttaaagagaaatcagtttacctgtttttaaaaaaattaaatctagttcaccttgctcaccctgcggtgacagggacagctcaggctcttggtgactgtggcagcgggagttcccggccctccacacccggggccagaccctcggggccatgccttggtggggcctgtgtcgggcgtggggcctgcaggtgggcgccccgaccacgacttggcttccttgtgccttaaaaaacctgccttcctgcagccacacacccacccggggtgtcctggggacccaaggggtgggggggtcacaccagagagaggcagggggcctggccggctcctgcaggatcatgcagctggggcgcggcggccgcggctgcgacaccccaaccccagccctctaatcaagtcacgtgattctcccttcaccccgcccccagggccttcccttctgcccccaggcgggctccccgctgctccagctgcggagctggtcgacataatctctgtattatatactttgcagttgcagacgtctgtgcctagcaatatttccagttgaccaaatattctaatcttttttcatttatatgcaaaagaaatagttttaagtaactttttatagcaagatgatacaatggtatgagtgtaatctaaacttccttgtggtattaccttgtatgctgttacttttattttattccttgtaattaagtcacaggcaggacccagtttccagagagcaggcggggccgcccagtgggtcaggcacagggagccccggtcctatcttagagcccctgagcttcagggaaggggcgggcgtgtcgccgcctctggcatcgcctccggttgccttacaccacgccttcacctgcagtcgcctagaaaacttgctctcaaacttcagggttttttcttccttcaaattttggaccaaagtctcatttctgtgttttgcctgcctctgatgctgggacccggaaggcgggcgctcctcctgtcttctctgtgctctttctaccgcccccgcgtcctgtcccgggggctctcctaggatcccctttccgtaaaagcgtgtaacaagggtgtaaatatttataattttttatacctgttgtgagacccgaggggcggcggcgcggttttttatggtgacacaaatgtatattttgctaacagcaattccaggctcagtattgtgaccgcggagccacaggggaccccacgcacattccgttgccttacccgatggcttgtgacgcggagagaaccgattaaaaccgtttgagaaactcctcccttgtctagccctgtgttcgctgtggacgctgtagaggcaggttggccagtctgtacctggacttcgaataaatcttctgtatcctcgctccgttccgccttaaaaaaaaaaaaaaaaaaaaaaaaaaaaaaaaaaaaaaaaaaaaaaaaaaaaaaaaaaa

SEQ ID NO: 5101 - protein, 550 aa, Homo sapiens
MDGIVPDIAVGTKRGSDELFSTCVTNGPFIMSSNSASAANGNDSKKFKGDSRSAGVPSRVIHIRKLPIDVTEGEVISLGLPFGKVTNLLMLKGKNQAFIEMNTEEAANTMVNYYTSVTPVLRGQPIYIQFSNHKELKTDSSPNQARAQAALQAVNSVQSGNLALAASAAAVDAGMAMAGQSPVLRIIVENLFYPVTLDVLHQIFSKFGTVLKIITFTKNNQFQALLQYADPVSAQHAKLSLDGQNIYNACCTLRIDFSKLTSLNVKYNNDKSRDYTRPDLPSGDSQPSLDQTMAAAFASPYAGAGFPPTFAIPQAAGLSVPNVHGALAPLAIPSAAAAAAAAGRIAIPGLAGAGNSVLLVSNLNPERVTPQSLFILFGVYGDVQRVKILFNKKENALVQMADGNQAQLAMSHLNGHKLHGKPIRITLSKHQNVQLPREGQEDQGLTKDYGNSPLHRFKKPGSKNFQNIFPPSATLHLSNIPPSVSEEDLKVLFSSNGGVVKGFKFFQKDRKMALIQMGSVEEAVQALIDLHNHDLGENHHLRVSFSKSTI

SEQ ID NO: 5102 - DNA, 3322 bp, Homo sapiens
cttgtgagtctataactcggagccgttgggtcggttcctgctattccggcgcctccactccgtcccccgcgggtctgctctgtgtgccatggacggcattgtcccagatatagccgttggtacaaagcggggatctgacgagcttttctctacttgtgtcactaacggaccgtttatcatgagcagcaactcggcttctgcagcaaacggaaatgacagcaagaagttcaaaggtgacagccgaagtgcaggcgtcccctctagagtgatccacatccggaagctccccatcgacgtcacggagggggaagtcatctccctggggctgccctttgggaaggtcaccaacctcctgatgctgaaggggaaaaaccaggccttcatcgagatgaacacggaggaggctgccaacaccatggtgaactactacacctcggtgacccctgtgctgcgcggccagcccatctacatccagttctccaaccacaaggagctgaagaccgacagctctcccaaccaggcgcgggcccaggcggccctgcaggcggtgaactcggtccagtcggggaacctggccttggctgcctcggcggcggccgtggacgcagggatggcgatggccgggcagagccccgtgctcaggatcatcgtggagaacctcttctaccctgtgaccctggatgtgctgcaccagattttctccaagttcggcacagtgttgaagatcatcaccttcaccaagaacaaccagttccaggccctgctgcagtatgcggaccccgtgagcgcccagcacgccaagctgtcgctggacgggcagaacatctacaacgcctgctgcacgctgcgcatcgacttttccaagctcaccagcctcaacgtcaagtacaacaatgacaagagccgtgactacacacgcccagacctgccttccggggacagccagccctcgctggaccagaccatggccgcggccttcggtgcacctggtataatctcagcctctccgtatgcaggagctggtttccctcccacctttgccattcctcaagctgcaggcctttccgttccgaacgtccacggcgccctggcccccctggccatcccctcggcggcggcggcagctgcggcggcaggtcggatcgccatcccgggcctggcgggggcaggaaattctgtattgctggtcagcaacctcaacccagagagagtcacaccccaaagcctctttattcttttcggcgtctacggtgacgtgcagcgcgtgaagatcctgttcaataagaaggagaacgccctagtgcagatggcggacggcaaccaggcccagctggccatgagccacctgaacgggcacaagctgcacgggaagcccatccgcatcacgctctcgaagcaccagaacgtgcagctgccccgcgagggccaggaggaccagggcctgaccaaggactacggcaactcacccctgcaccgcttcaagaagccgggctccaagaacttccagaacatattcccgccctcggccacgctgcacctctccaacatcccgccctcagtctccgaggaggatctcaaggtcctgttttccagcaatgggggcgtcgtcaaaggattcaagttcttccagaaggaccgcaagatggcactgatccagatgggctccgtggaggaggcggtccaggccctcattgacctgcacaaccacgacctcggggagaaccaccacctgcgggtctccttctccaagtccaccatctaggggcacaggcccccacggccgggccccctggcgacaacttccatcattccagagaaaagccactttaaaaacagctgaagtgaccttagcagaccagagattttatttttttaaagagaaatcagtttacctgtttttaaaaaaattaaatctagttcaccttgctcaccctgcggtgacagggacagctcaggctcttggtgactgtggcagcgggagttcccggccctccacacccggggccagaccctcggggccatgccttggtggggcctgtgtcgggcgtggggcctgcaggtgggcgccccgaccacgacttggcttccttgtgccttaaaaaacctgccttcctgcagccacacacccacccggggtgtcctggggacccaaggggtgggggggtcacaccagagagaggcagggggcctggccggctcctgcaggatcatgcagctggggcgcggcggccgcggctgcgacaccccaaccccagccctctaatcaagtcacgtgattctcccttcaccccgcccccagggccttcccttctgcccccaggcgggctccccgctgctccagctgcggagctggtcgacataatctctgtattatatactttgcagttgcagacgtctgtgcctagcaatatttccagttgaccaaatattctaatcttttttcatttatatgcaaaagaaatagttttaagtaactttttatagcaagatgatacaatggtatgagtgtaatctaaacttccttgtggtattaccttgtatgctgttacttttattttattccttgtaattaagtcacaggcaggacccagtttccagagagcaggcggggccgcccagtgggtcaggcacagggagccccggtcctatcttagagcccctgagcttcagggaaggggcgggcgtgtcgccgcctctggcatcgcctccggttgccttacaccacgccttcacctgcagtcgcctagaaaacttgctctcaaacttcagggttttttcttccttcaaattttggaccaaagtctcatttctgtgttttgcctgcctctgatgctgggacccggaaggcgggcgctcctcctgtcttctctgtgctctttctaccgcccccgcgtcctgtcccgggggctctcctaggatcccctttccgtaaaagcgtgtaacaagggtgtaaatatttataattttttatacctgttgtgagacccgaggggcggcggcgcggttttttatggtgacacaaatgtatattttgctaacagcaattccaggctcagtattgtgaccgcggagccacaggggaccccacgcacattccgttgccttacccgatggcttgtgacgcggagagaaccgattaaaaccgtttgagaaactcctcccttgtctagccctgtgttcgctgtggacgctgtagaggcaggttggccagtctgtacctggacttcgaataaatcttctgtatcctcgctccgttccgccttaaaaaaaaaaaaaaaaaaaaaaaaaaaaaaaaaaaaaaaaaaaaaaaaaaaaaaaaaaa

SEQ ID NO: 5103 - protein, 557 aa, Homo sapiens
MDGIVPDIAVGTKRGSDELFSTCVTNGPFIMSSNSASAANGNDSKKFKGDSRSAGVPSRVIHIRKLPIDVTEGEVISLGLPFGKVTNLLMLKGKNQAFIEMNTEEAANTMVNYYTSVTPVLRGQPIYIQFSNHKELKTDSSPNQARAQAALQAVNSVQSGNLALAASAAAVDAGMAMAGQSPVLRIIVENLFYPVTLDVLHQIFSKFGTVLKIITFTKNNQFQALLQYADPVSAQHAKLSLDGQNIYNACCTLRIDFSKLTSLNVKYNNDKSRDYTRPDLPSGDSQPSLDQTMAAAFGAPGIISASPYAGAGFPPTFAIPQAAGLSVPNVHGALAPLAIPSAAAAAAAAGRIAIPGLAGAGNSVLLVSNLNPERVTPQSLFILFGVYGDVQRVKILFNKKENALVQMADGNQAQLAMSHLNGHKLHGKPIRITLSKHQNVQLPREGQEDQGLTKDYGNSPLHRFKKPGSKNFQNIFPPSATLHLSNIPPSVSEEDLKVLFSSNGGVVKGFKFFQKDRKMALIQMGSVEEAVQALIDLHNHDLGENHHLRVSFSKSTI

SEQ ID NO: 5104 - DNA, 2725 bp, Homo sapiens
gcatgccccatcagccttcagcttgagcccggcggcccccgcccccgccccctgccaccctgcactgccccggctcccccgcggcccccacgctgcagtgcggccgggccccctccccgcaggggccgcccccgccgcccacccctagcgcccgtggtggtggtggtggtggtggtggtggtggcccgggccgcagggccatgaaactacaggccgtgatggagacgctgttgcagcggcagcagcgggcgcgccaggagctggaggcccggcagcagctgccccccgatccccctgctgcaccccccggccgggcccgggctgcccccgacgaggacagagagcccgagagtgcccggatgcagcgggctcagatggccgcactggcagccatgcgggctgcagctgcgggcctgggacacccagccagccccggcggctctgaggatgggcccccaggctcggaggaggaggacgcggcccgggaggggacaccgggctcacccgggcgaggcagagaagggccaggagaggagcactttgaggacatggcctccgacgaggacatgaagcccaaatgggaggaggaggagatggaggaagacctcggggaggatgaggaggaggaggaggaggattacgaggatgaggaggaggaggaggacgaggaggggctgggccccccaggccctgccagcttgggcaccacggcactgttcccccgaaaggcccagccaccccaggccttccgcggcgatggcgttcccagggtgctggggggccaggagcggccggggcctggccctgcccaccccggaggggccgcccacgtagccccgcagctgcagccgcctgaccacggcgactggacttacgaggagcagtttaagcagctctacgaactcgacggggaccccaagaggaaggaattcctggatgacttgttcagcttcatgcagaagcgagggacacctgtgaaccgcatccccatcatggccaaacaggtccttgacctgttcatgctgtacgtgctggtgacggagaagggcggcctcgtggaggtcatcaacaagaagctgtggcgtgagatcaccaagggcctcaacctgcccacgtccatcaccagtgcagccttcaccctgcggacccaatacatgaagtacctgtacccctacgagtgtgagaagcggggcctcagtaaccccaatgagctccaggcagccatagacagcaaccgacgggagggccggcgccagagctttggtggctccctctttgcctactcgccaggcggggcacacggcatgctctcctcacccaagctacccgtgtcctccctgggcctggccgcaagcaccaatggcagctccatcacccccgcccctaagatcaagaaagaggaggactcagccatccccatcacagtccctggccgcctgcctgtgtccctggcgggccaccctgtggtggcagcccaggcagcagctgtgcaagcagcagccgcccaagcagctgtggccgcacaggcagctgccctggaacagctgcgggagaagctggagtctgcagagcctccggagaagaagatggccctggtggccgatgagcagcaacggctgatgcaacgtgcactccagcagaacttcctggccatggcggcccagctgcccatgagcattcggatcaacagccaagcctccgaaagccgccaggactctgctgtgaacctgacgggcaccaacggcagcaacagcatcagcatgtcggtggagatcaacggcatcatgtacacaggagttctgtttgctcagccgccggcccccacgccaacctctgctcccaacaaaggaggcggcggcggcggcggcagcagcagcaacgcaggcggccggggaggaaacaccggaaccagcggcggccaggctgggccagcggggctgtccacaccctccacatctacctcaaataactcgttgccttaaccgcatcactccccacccgccacccaccctggagcccgccggcctgggcagggggtccaggtgggccacacaggggccaggatggcggaagatacgggtggggagggaagatatccagaaaggagccacagctgacgccaaaaagaaaagaaaaaagatatatatatatatatatatatatatacgtatatatataaagaagaatttaataaaacaggggaaaaccaaggaacacttgaatttctcaggttttggacattcagagagatgaattgtgagaacagcaaagaaatccatcagaaaaacagaaagaggcagacgtttcccagggcgttcaggcagccctgatggaccgaaggctctggtgtctggtttggccccacagcagtgtgggccgatcctgtttacctcatacatccctgcactgtgtgttttcatttttgtctgctttagttctcttttattttctattcaccacacactcaccactcccagcttctcgtgtccagtgaaacccctgaaccaagatcactgaatttttgtttttttcttgttgctttgggaaatttttttttctctgtagggtttttaagaggtttcgggggttttgttgtgtaaatattctattttattcttggggggatcaaaccttaggaaaaggatatctatatatctatatagctatatatttgtgttccttcagggaaactggtcttgaaaaagcaagaaaaaaaagcaaaaaa

SEQ ID NO: 5105 - protein, 593 aa, Homo sapiens
MKLQAVMETLLQRQQRARQELEARQQLPPDPPAAPPGRARAAPDEDREPESARMQRAQMAALAAMRAAAAGLGHPASPGGSEDGPPGSEEEDAAREGTPGSPGRGREGPGEEHFEDMASDEDMKPKWEEEEMEEDLGEDEEEEEEDYEDEEEEEDEEGLGPPGPASLGTTALFPRKAQPPQAFRGDGVPRVLGGQERPGPGPAHPGGAAHVAPQLQPPDHGDWTYEEQFKQLYELDGDPKRKEFLDDLFSFMQKRGTPVNRIPIMAKQVLDLFMLYVLVTEKGGLVEVINKKLWREITKGLNLPTSITSAAFTLRTQYMKYLYPYECEKRGLSNPNELQAAIDSNRREGRRQSFGGSLFAYSPGGAHGMLSSPKLPVSSLGLAASTNGSSITPAPKIKKEEDSAIPITVPGRLPVSLAGHPVVAAQAAAVQAAAAQAAVAAQAAALEQLREKLESAEPPEKKMALVADEQQRLMQRALQQNFLAMAAQLPMSIRINSQASESRQDSAVNLTGTNGSNSISMSVEINGIMYTGVLFAQPPAPTPTSAPNKGGGGGGGSSSNAGGRGGNTGTSGGQAGPAGLSTPSTSTSNNSLP

SEQ ID NO: 5106 - DNA, 1518 bp, Homo sapiens
ggcaagatggcggcgcccatggaggtggccgtgtgtacggactcggcggccccgatgtggagctgcatcgtgtgggaacttcactcgggcgccaacctgctcacctaccgcggcggccaggcgggaccccgcggcctggcgctgctcaatggcgagtatctgctggcggcgcagctgggcaagaattacatcagcgcctgggagctccagcggaaggaccagctccagcagaagatcatgtgccccgggcctgtcacctgtctgactgcatcacccaatggtctctacgtcctggcaggagttgcagaaagcatccacctgtgggaggtctccaccgggaaccttctggtcatcctgagtcgacactaccaggacgtctcctgccttcagttcacaggggacagcagccacttcatctcagggggcaaggactgcctggtgctggtttggagcctctgcagcgtgctgcaggccgacccctccaggattccggcgcccaggcacgtctggtctcaccacgcgctccccatcacggacctgcactgcggctttgggggccccctggcccgggtggccacctcctcactggaccagacggtgaagctatgggaggtctcctcgggggagctgctgctctccgtcctctttgacgtgtccatcatggcagtgaccatggacctggctgagcaccatatgttctgcgggggcagtgagggctccatcttccaggtcgacctcttcacctggcccggacagagggagaggagcttccacccagagcaggacgccgggaaggtcttcaaagggcacaggaaccaggtgacttgcctgtcagtgtccactgacggcagcgtgctgctctcaggctcccacgacgagaccgtgcgcctctgggacgtgcagagcaagcagtgcatccggacggtggccctcaaaggcccagtcaccaatgccgccatcctgctggcgcccgtcagcatgctgagctcagacttcaggcccagcctgccgctgccccacttcaacaagcacctgctgggcgccgagcacggggacgagccgcgccacgggggcctcactctgcgcctgggcctccaccagcagggctcggagcccagctacctggaccgcacggagcagctgcaggccgtcctgtgcagcaccatggagaagagcgtgctcggcggccaggaccagctgcgcgtccgtgtgacggagctggaggacgaggtgcgcaacctgcgcaagatcaatcgggacctgttcgacttctccacgcgcttcatcacgcggccggccaagtgaggcccggagaccccggcccgaggcgcccaggcctgagccccatgcctcccagcaaccagggcccgcgggtgtggcccccaccagcccaggcctggactctcctcagttctgtgtcgtgttcgggtttttcctctgtgactgggccgtcttggtgtctcgtggcacgcgtcacagtggtgctagtctgtttttaacaaaagaggatgaaaagcc

SEQ ID NO: 5107 - protein, 432 aa, Homo sapiens
MAAPMEVAVCTDSAAPMWSCIVWELHSGANLLTYRGGQAGPRGLALLNGEYLLAAQLGKNYISAWELQRKDQLQQKIMCPGPVTCLTASPNGLYVLAGVAESIHLWEVSTGNLLVILSRHYQDVSCLQFTGDSSHFISGGKDCLVLVWSLCSVLQADPSRIPAPRHVWSHHALPITDLHCGFGGPLARVATSSLDQTVKLWEVSSGELLLSVLFDVSIMAVTMDLAEHHMFCGGSEGSIFQVDLFTWPGQRERSFHPEQDAGKVFKGHRNQVTCLSVSTDGSVLLSGSHDETVRLWDVQSKQCIRTVALKGPVTNAAILLAPVSMLSSDFRPSLPLPHFNKHLLGAEHGDEPRHGGLTLRLGLHQQGSEPSYLDRTEQLQAVLCSTMEKSVLGGQDQLRVRVTELEDEVRNLRKINRDLFDFSTRFITRPAK

SEQ ID NO: 5108 - DNA, 408 bp, Homo sapiens
atgagctccacgcagttcaacaagggcccctcgtacgggctgtcggccgaggtcaagaaccgggctcccgcgaatcttggggagcacccaggtctgagatctgggggacgagtgacccattcccccccccaacatctaggggtagttgggtctgacttcgtcccctcgccatggccccaggacccccacgtgtccttacagctgacttctgcaggggaaactgcctctgcacgctctgagggcaccggccctgccagccccaacagccacctgcccggcggcactccagggccggcagactggagggagaattcctgcttccccgctgggccatctgcaccctgcattcatagagccccccgtgcagtggggtgggcaccctgccgcaccctgcatacagccggctaa

SEQ ID NO: 5109 - DNA, 2036 bp, Homo sapiens
accagctcctgtccaaatatgacccccagaaggaggcagagctccgcacctggatcgagggactcaccggcctctccatcggccccgacttccagaagggcctgaaggatggaactatcttatgcacactcatgaacaagctacagccgggctccgtccccaagatcaaccgctccatgcagaactggcaccagctagaaaacctgtccaacttcatcaaggccatggtcagctacggcatgaaccctgtggacctgttcgaggccaacgacctgtttgagagtgggaacatgacgcaggtgcaggtgtctcttctcgccctggcggggaaggccaagactaaggggctgcagagcggggtggacattggcgtcaagtactcggagaagcaggagcggaatttcgacgatgccaccatgaaggctggccagtgcgtcatcgggctgcagatgggcaccaacaaatgcgccagccagtcgggcatgactgcctacggcacgagaaggcatctctatgaccccaagaaccatatcctgccccccatggaccactcgaccatcagcctccagatgggcacgaacaagtgtgccagccaggtgggcatgacggctcccgggacccggcggcacatctatgataccaagctgggaaccgacaagtgtgacaactcctccatgtccctgcagatgggctacacgcagggcgccaaccagagcggccaggtcttcggcctgggccggcagatatatgaccccaagtactgcccgcaaggcacagtggccgatggggctccctcgggcaccggcgactgcccggacccgggggaggtccctgaatatcccccttactaccaggaggaggccggctactgaggctcccagcacgctctctccccacatcgtctgcccatctgggtttttgggtttttctgtgttttcatcttttttttttttttcttaacccgttcagtgctgccagtcaaccaagggtctgtgagtgtcagcgtgggatcaggcagcagagcttttttcccctttgccttgatccttcgcaaggctgagccactgggctgtgggggaaggggtcaaggccatatcccaatacgtgtagggcgagggtccctgctggcacattcaggctgtgctgggaagaagagacctgggcttggaaggaaccggtccccgacggtttctgcttgcctcgcctcttcccccttttgtcagctgagcagtttgtggtttctatgcccgcaagtttcaggaagtattcacaaaagaaaaatacattttttcccccaggggtggggcaaggacagtggagagagtgctaggaaatgagtcccctgggaaaggggaccgggccgtgatgttaaatatctccggctcccaagtgactggatttgcctaggaccttcagaccaacagacttcagaccctcagacctgccccggggccaggtggagaaagtgagggccgtacaaggaagtgaaattctgagttgttggggctaagcctgaccccctctccatgctccccgccccaacccactctggcctcagtagatttttttttcagttgtggttgttgcccaggctggagtgcagtggcgccatcttggctcactgcacctccaccttccgggctcaagcgattctccagcctcagcctcctgagtagctaggactgcaggtgctccaccacgcccggctaatttttgtatttttagtagagatggggtttccccatgttggccaggctggtctcgaactcctggcctcaggtgtgatccgcccgcctccgcctccccaagcgctgagattacaggtgtgagccaccgtgcccagcccctcagtaggttttaaggagcccccagccctcctcccttctgggcccgaccagcttatactgctccatcttccccggccacatgccccgccaagtactgcacagggaccccccacccaggggacctgctccgtgagataatgtgaaatacgactgtggaccaaacgcaataaaacctctgtttgtacgaag

SEQ ID NO: 5110 - DNA, 1223 bp, Homo sapiens
ggcggcggcggcggaggctgccatggacgacgaggaggagacgtaccggctctggaaaatccgcaagaccatcatgcagctgtgccacgaccgtggctatctggtgacccaggacgagcttgaccagaccctggaggagttcaaagcccaatctggggacaagccgagtgaggggcggccgcggcgcacggacctcaccgtgctggtggcccacaacgatgaccccaccgaccagatgtttgtgttctttccagaggagcccaaggtgggcatcaagaccatcaaggtgtactgccagcgcatgcaggaggagaacatcacacgggctctcatcgtggtgcagcagggcatgacaccctccgccaagcagtccctggtcgacatggcccccaagtacatcctggagcagtttctgcagcaggagctgctcatcaacatcacggagcacgagctagtccctgagcacgtcgtcatgaccaaggaggaggtgacagagctgctggcccgatataagctccgagagaaccagctgcccaggatccaggcgggggaccctgtggcgcgctactttgggataaagcgtgggcaggtggtgaagatcatccggcccagtgagacggctggcaggtacatcacctaccggctggtgcagtagctaccgcctgacagcccctagaggcggacacacagcgacccccatccctgcaggacaaacgcccctgccctgccagaatccggcccccacagctctcacggctgctgctcctctggactccccaaggcaggtggcctccacccacgttctcccgtcctggggtgaggcttcctgtggcccagcccgccccattcacctgtggatttgtgcgagatgcagcctcagaaggaacaaggcccccagagggaggtcacctgggggcagctggtgccgggtcttcacccagaccacgctgggtcccctctgttgggggtttggggtccgggtctcccaccagccactgcttcctcctgggccctcggccttccacccctcgtcttccctccctcgggggccctgatgcgtggcggcccccgcccggcctcggctctttactccattcacagccatgcacgcgctcaagccaccagggtgcgagatgccagctctggagttctcggttgttgtaggaggttgggtgttttcaaatggtaaagatgttttgagcaaataaatttgcttgatacag

SEQ ID NO: 5111 - protein, 210 aa, Homo sapiens
MDDEEETYRLWKIRKTIMQLCHDRGYLVTQDELDQTLEEFKAQSGDKPSEGRPRRTDLTVLVAHNDDPTDQMFVFFPEEPKVGIKTIKVYCQRMQEENITRALIVVQQGMTPSAKQSLVDMAPKYILEQFLQQELLINITEHELVPEHVVMTKEEVTELLARYKLRENQLPRIQAGDPVARYFGIKRGQVVKIIRPSETAGRYITYRLVQ

SEQ ID NO: 5112 - DNA, 896 bp, Homo sapiens
cggggaggcgcggaaagccgacgcgcgtccattggtcggctggacgaggggaggagccgctggctcccagccccgccgcgatgagcctcggccgcctttgccgcctactgaagccggcgctgctctgtggggctctggccgcgcctggcctggccgggaccatgtgcgcgtcccgggacgactggcgctgtgcgcgctccatgcacgagttttccgccaaggacatcgacgggcacatggttaacctggacaagtaccggggcttcgtgtgcatcgtcaccaacgtggcctcccagtgaggcaagaccgaagtaaactacactcagctcgtcgacctgcacgcccgatacgctgagtgtggtttgcggatcctggccttcccgtgtaaccagttcgggaagcaggagccagggagtaacgaagagatcaaagagttcgccgcgggctacaacgtcaaattcgatatgttcagcaagatctgcgtgaacggggacgacgcccacccgctgtggaagtggatgaagatccaacccaagggcaagggcatcctgggaaatgccatcaagtggaacttcaccaagttcctcatcgacaagaacggctgcgtggtgaagcgctacggacccatggaggagcccctggtgatagagaaggacctgccccactatttctagctccacaagtgtgtggccccgcccgagcccctgcccacgcccttggagccttccaccggcactcatgacggcctgcctgcaaacctgctggtggggcagacccgaaaatccagcgtgcaccccgccggaggaaggtcccatggcctgctgggcttggctcggcgcccccacccctggctaccttgtgggaataaacagacaaattagaaaaaaaaaaaaaaa

SEQ ID NO: 5113 - DNA, 4877 bp, Homo sapiens
gcccgaaacccggaagtgagcggcggcagctgcgaggctcggagaaacaggcgccgcgggctccgcgcccggccggacccgggcccgagatcatgatgctgccgccaccgccgccaccacggagcgagaagcccagatagacgccccggcggccccgggtcctggagtcccgccgcctgctgcccggccgaggaccccaccccgcctgccgcccgatgcttgcagtggggcccgccatggacagggattacccgcagcatgaacccccgccggcgggcagcctcctgtacagcccgccgcccctgcagagcgccatgctgcactgcccctactggaacaccttctcgctgccgccataccctgccttctccagcgacagccgcccgttcatgagctccgcctccttcctcggcagccagccctgcccagacaccagctatgcccccgtggccaccgcctccagcttgccaccaaagacctgcgactttgctcaggactcctcctattttgaggacttctccaacatctccatcttctcctcgtccgtggactccctgtcggacatcgtggacacgcccgacttcctgccggctgacagcctcaaccaggtgtccaccatctgggacgataaccctgccccctccacccacgataagctgttccagctcagcaggccgtttgcaggcttcgaggactttctgccctcccacagcaccccgcttctcgtcagctaccaggagcagagtgtgcagagccagccagaggaggaggacgaggctgaggaggaggaggcggaggagctggggcacacagagacctacgccgactacgtgccgtccaagtccaagatcgggaagcagcacccagaccgcgtggtggagaccagcacactgtccagcgtcccacccccagacatcacctacaccctggccctgccctcggacagcggggccctgtctgccctgcagctagaggccatcacctacgcctgccagcaacacgaggtcctgctccccagcgggcagcgcgcgggctttctcatcggcgatggggccggcgtgggcaaaggccggacggtggccggagtcatcctggagaaccacctgcgcggccggaagaaagcattgtggttcagcgtctccaacgacctcaagtacgatgcggagcgcgacctgcgggacatcgaagccacgggcatcgcggtgcacgcgctcagcaagatcaagtacggtgacaccactacctcagagggcgtcctcttcgccacctactccgccctgattggggagagccaggccggcggccagcaccgcactcgcctccggcagatcctggactggtgtggggaggccttcgagggcgtcatcgtgttcgacgagtgtcacaaagccaagaatgccggctccaccaagatgggcaaggctgtgctagacctgcagaacaagctgcccctggcccgcgtggtctacgccagcgccacaggtgcctctgagcctcggaacatgatctacatgagccgcttgggtatctggggcgagggcacacccttccggaactttgaggagttcctgcacgccatcgagaagaggggcgttggcgccatggagatcgtggccatggacatgaaggtcagcggcatgtacatcgcacgccagctcagcttctccggcgtcaccttccgcatcgaggagatcccgctggccccagccttcgagtgcgtctacaaccgcgcggccctgctgtgggccgaggccctgaacgtgttccagcaggcggccgactggatcggcctggagtcgcgcaagtccctgtggggccagttctggtcggcacaccagcgcttcttcaagtatctgtgcatcgcagccaaggtgcgccggctggtggagctggcccgagaggagctggcgcgagacaagtgcgtggtcatcgggctgcagtccacgggcgaggcgcgcacgcgggaggtgctgggggagaacgatgggcacctcaactgcttcgtctcggccgctgaaggcgtgttcctgtcgctaattcagaagcactttccgtccaccaagagaaagcgggacagaggagcgggcagcaagcggaaacggcgacctcggggacgcggggccaaagccccccggctggcgtgcgagacagcgggcgtcatccgcatcagtgacgacagcagcacggagtcggaccctggcctggacagcgacttcaactcctcccccgagtccctggtggatgacgacgttgtcatcgttgatgcagtcgggctccccagtgacgaccggggacccctgtgcctcctgcagagagacccgcatggccccggggtcctggagcgggtggagcggctgaagcaggatctgctggacaaagtgcggcggctgggccgggaactgccagtcaacaccctggacgagctcatcgaccagctgggcggcccccagcgggtggcggagatgaccggcaggaaaggccgcgtggtgtccaggcccgacgggacggtggccttcgagtcgcgggcagagcagggtctgtccatcgaccacgtgaacctcagggagaagcagcgcttcatgagcggcgagaagctcgtggccatcatctcggaggcctccagctcgggtgtctccctccaagccgaccgccgtgtccagaaccagcggcgccgcgtgcacatgaccttggagctgccgtggagcgccgaccgcgccatccagcagttcggccgcacccaccggtccaaccaggtctccgcgccagagtatgtcttcctcatctcggagctggccggggagcgccggttcgcctccatcgtggccaagcgcctggagagtctgggggccctgacccacggagaccgccgcgccacggagtcccgtgacctcagcaagtacaactttgagaacaagtatggcacccgggccctgcactgtgtcctcaccaccatcctgagccagactgagaacaaagtgcctgtgccccagggataccctggaggggtccccaccttcttccgggacatgaagcagggcctgctgtctgtgggcattggtggccgggagtcccggaatggctgcctggacgtggagaaggactgttccatcaccaagttcctgaaccgcatcctggggctggaggtgcacaagcagaacgccctgttccagtacttctcagacaccttcgaccacctcatcgagatggacaagcgggagggcaaatacgacatgggcatcctggaccttgctcccggtatcgaggagatctacgaggagagccagcaggtgttcctggctcccgggcacccgcaggacgggcaggtggtcttctacaagatcagcgtggaccgcggcctgaagtgggaggacgcctttgccaagtcgctggcgctgacgggcccctatgacggcttctacctctcctacaaggtccgcggtaacaagcccagctgcctgctggcggagcagaaccgcggccagttcttcacggtgtacaagcccaacatcggccggcagagccagctggaggccctggacagcctccgccgcaagttccaccgggtcaccgcggaggaggccaaggagccctgggagagtggctacgctttgtcgctgacgcactgcagccacagcgcctggaaccggcactgccggctggcgcaggagggtaaggactgcctgcaggggctgcggctgcggcaccactacatgctgtgcggcgcgctgctgcgcgtgtggggccgcatcgccgccgtcatggccgacgtcagcagcagcagctacctgcagatcgtgcggctgaagaccaaggacaggaagaagcaagtgggcatcaagatccccgagggctgcgtgcgccgggtgctgcaggagctgcggctgatggatgcggacgtgaagcgcaggcaggcgcccgccctgggctgccccgccccgcccgccccgcgcccgctggcgctgccttgcggccccggagaggtgctggacctcacctacagccccccggccgaggccttcccgccgcccccgcacttctctttcccggcgccgctgtccctggacgccggccccggcgtcgtgccgctgggcacccccgacgcccaggccgaccctgcggccctcgcgcaccagggctgcgacatcaacttcaaggaggtgctggaggacatgctgcgctcgctgcacgcggggccgccctccgagggcgcgctgggggagggcgcgggggcggggggcgcggcgggcggtggtcccgagcggcagagcgtgatccagttcagcccacccttccccggcgcccaggctcctctctgacacgcctttaggcgaaacatgccccaagacacagggaccgtttctcccctaggagcagcggtggggagcagggccaaggtcccctgaccactgctcagaggagccctaggccctggccgcagtgccttcagcgcccgacccgggcccccacctggtcagccctggcggggcccactcaggacagctgggggccggggcgtggcagggccctctctgtgcctctcctcccaagtaggaaggggctccgggtggctgctctgggactgggcacccacaagggctcagtgggcccaaacccttgaaatccgtgaaaccgggtggtcccaagagctagaaactcaggaaaccccaggtgctcagggccccgcgtctcgggggctccgtggggcagacccctgctaatatatgcaattctccctcccccagcccttccctgacccctaagttattgcccgctcacctctcccaggccccaggccgcggagctggcagggtggcgcctgcggtttctatgtatttatagcaagttctgatgtacatatgtaaaggacttttttaaat

SEQ ID NO: 5114 - DNA, 2158 bp, Homo sapiens
cccagggtccccgaggacgaagttgaccctgaccgggccgtctcccagttctgaggcccgggtcccactggaactcgcgtctgagccgccgtcccggacccccggtgcccgccggtccgcagaccctgcaccgggcttggactcgcagccgggactgacgtgtagaacaatcgtttctgttggaagaagggtttttcccttccttttggggtttttgttgccttttttttttcttttttctttgtaaaattttggagaagggaagtcggaacacaaggaaggaccgctcacccgcggactcagggctggcggcgggactccaggaccctgggtccagcatggaggtggtggacccgcagcagctgggcatgttcacggagggcgagctgatgtcggtgggtatggacacgttcatccaccgcatcgactccaccgaggtcatctaccagccgcgccgcaagcgggccaagctcatcggcaagtacctgatgggggacctgctgggggaaggctcttacggcaaggtgaaggaggtgctggactcggagacgctgtgcaggagggccgtcaagatcctcaagaagaagaagttgcgaaggatccccaacggggaggccaacgtgaagaaggaaattcaactactgaggaggttacggcacaaaaatgtcatccagctggtggatgtgttatacaacgaagagaagcagaaaatatatatggtgatggagtactgcgtgtgtggcatgcaggaaatgctggacagcgtgccggagaagcgtttcccagtgtgccaggcccacgggtacttctgtcagctgattgacggcctggagtacctgcatagccagggcattgtgcacaaggacatcaagccggggaacctgctgctcaccaccggtggcaccctcaaaatctccgacctgggcgtggccgaggcactgcacccgttcgcggcggacgacacctgccggaccagccagggctccccggctttccagccgcccgagattgccaacggcctggacaccttctccggcttcaaggtggacatctggtcggctggggtcaccctctacaacatcaccacgggtctgtaccccttcgaaggggacaacatctacaagttgtttgagaacatcgggaaggggagctacgccatcccgggcgactgtggccccccgctctctgacctgctgaaagggatgcttgagtacgaaccggccaagaggttctccatccggcagatccggcagcacagctggttccggaagaaacatcctccggctgaagcaccagtgcccatcccaccgagcccagacaccaaggaccggtggcgcagcatgactgtggtgccgtacttggaggacctgcacggcgcggacgaggacgaggacctcttcgacatcgaggatgacatcatctacactcaggacttcacggtgcccggacaggtcccagaagaggaggccagtcacaatggacagcgccggggcctccccaaggccgtgtgtatgaacggcacagaggcggcgcagctgagcaccaaatccagggcggagggccgggcccccaaccctgcccgcaaggcctgctccgccagcagcaagatccgccggctgtcggcctgcaagcagcagtgaggctggccgcctgcagcccgtgtccaggagccccgccaggtgcccgcgccaggccctcagtcttcctgccggttccgcccgccctcccggagaggtggccgccatgcttctgtgccgaccacgccccaggacctccggagcgccctgcagggccgggcagggggacagcagggaccgggcgcagccctcccccctcggccgcccggcagtgcacgcggcttgttgacttcgcagccccgggcggagccttcccgggcgggcgtgggaggagggaggcggcctccatgcactttatgtggagactactggccccgcccgtggcctcgtgctccgcagggcgcccagcgccgtccggcggccccgccgcagaccagctggcgggtgtggagaccaggctcctgaccccgccatgcatgcagcgccacctggaagccgcgcggccgctttggttttttgtttggttggttccattttctttttttctttttttttttaagaaaaaataaaaggtggatttg

SEQ ID NO: 5115 - DNA, 994 bp, Homo sapiens
gtcctcctcgccctccaggccgcccgcgccgcgccggagtccgctgtccgccagctacccgcttcctgccgcccgccgctgccatgctgcccgccgcgctgctccgccgcccgggacttggccgcctcgtccgccacgcccgtgcctatgccgaggccgccgccgccccggctgccgcctctggccccaaccagatgtccttcaccttcgcctctcccacgcaggtgttcttcaacggtgccaacgtccggcaggtggacgtgcccacgctgaccggagccttcggcatcctggcggcccacgtgcccacgctgcaggtcctgcggccggggctggtcgtggtgcatgcagaggacggcaccacctccaaatactttgtgagcagcggttccatcgcagtgaacgccgactcttcggtgcagttgttggccgaagaggccgtgacgctggacatgttggacctgggggcagccaaggcaaacttggagaaggcccaggcggagctggtggggacagctgacgaggccacgcgggcagagatccagatccgaatcgaggccaacgaggccctggtgaaggccctggagtaggcggtgcgtacccggtgtcccgaggcccggccaggggctgggcagggatgccaggtgggcccagccagctcctggggtcccggccacctggggaagccgcgcctgccaaggaggccaccagagggcagtgcaggcttctgcctgggccccaggccctgcctgtgttgaaagctctggggactgggccagggaagctcctcctcagctttgagctgtggctgccacccatggggctctccttccgcctctcaagatccccccagcctgacgggccgcttaccatcccctctgccctgcagagccagccgccaaggttgacctcagcttcggagccacctctggatgaactgcccccagcccccgccccattaaagacccggaagcctgaaaaaaaaaaaaaaaaa

SEQ ID NO: 5116 - protein, 168 aa, Homo sapiens
MLPAALLRRPGLGRLVRHARAYAEAAAAPAAASGPNQMSFTFASPTQVFFNGANVRQVDVPTLTGAFGILAAHVPTLQVLRPGLVVVHAEDGTTSKYFVSSGSIAVNADSSVQLLAEEAVTLDMLDLGAAKANLEKAQAELVGTADEATRAEIQIRIEANEALVKALE

SEQ ID NO: 5117 - DNA, 2396 bp, Homo sapiens
cagcagcgggcggccgcggcgtgacatcggcaccatcctgcagatcctgaacgacctcctgagcgccacccggcactaccagggcatgcccccttcgctggcccagctccgctgccacgcccagtgctccccggcctcaccggcccccgacctggcccccagaactacctcctgcgagaagctcacggctgccccctcagcctccctgctgcagggccagagccagatccgcatgtgcaagcccccgggggaccggcttcggcagacagaaaaccgcgccacgcgctgcaaggtggaacggctgcagctgcttctgcagcagaaacggctccgtagaaaggcccggcgggacgcgcggggtccgtaccactggtcacccagccgcaaggccggccgcagcgacagcagtagcagcgggggcggcggcagccccagcgaggcctccggcttgggcctcgacttcgaggactccgtgtggaagccagaagtcaaccctgacatcaagtcagagttcgtggtggcttaggatcttcggatcggccaccctcgcccctcgcaccccagcccagggcggcggggactccgagagccccggagagaacgtggcccagccctggagggcaggcggccactcccccagccagaagtctttttttcttttcttcttttttattatttttttctttttttaaaaagttctgaccgtggtttcctggactcttcatgggctttgcttcctacctccttcacccttcactcctgccctcctcttcctcctcctcctcctcctccgtctgtctcctttcacctctgcgccaggtcggtcctccctgccaaccttccccagctccaatatgtagcagtctctctggatggcggagagtgaaggagacggagaaacgcgccccatcccttccgccgcctcctttcccccccgaccctattcaggttttaagtcaaaaatgtcgatatgtcattatgcactttacagatgaggggaggggccgcagtgcgcagaacccaccccaccccccagtgcagacttcggggtctccaccccaggccagcagcgcccactgggctacagcaagccaacaggtcacagaagccaacgaggggactgtttctcttccactcctatcctcttttcttgatcttttttttgcattttccttcatttctttaacaaggagagcaaagctgttttagcagaggctggggctgaggtccccatggggtttgggtgcaggggcatggcaccctttcctgtcgggaagggagaggggaactacccccccagcctgccctccgccccgccccagccggcggactgtgctgtttcctccgcccccactcccgtgttttctgacctcctgcctgagtttggggtatttatagactattaattttctgactgagccaatagtggttggggaactcttgaaaaaggggagagaatggctgggtgctggggagttcccccctccgagccctccttcccggcccaacctgagggatgtggatttgggactgtctgggggcccctcctgcagcgaggatgggagggggtgctgagctgtgaatcccctgggcagggggcgacaactccgtgtagcattaacccccgtggcggggtccgctgctggtctaatttggaccccctgcctctcagtgcccctgccctaggggtgtctgtctccagaggggagggacaaatcccctactggggccatttcaatggggtagtttttggatttttttccccactcactttttattttttaatgataatggagatgtctggacccttcctcaccccacctgtcggtcttgtcctggctctgcctgtcccccaccgttgttctcgtaggtgaaccccaggtcctcaactccccccctttatgtgttgaaagttaatggtttcagatgtgaacatcacgtgttataactgtagcgctgtaaatttttttgtgggagggtgggcagggaggggtcccagagggtagagctcaaggattttgggttttgttttgttttcatttttccaaaaaaaaaagaaaaaaaaatagaaaaaaaaggagtaaaaggggcgggtttgttttttgaagaactgtcttggatacctatttaaatgtgtgttctgttttgttttttaacgatttttaaataacgtctgtgcctccactggttgagggtggaacctccaggcaggaaccggctcgccaccctctgcccggtaagggctgcccaagaaagcattacccgccctcggggggtcgggctgtgggggtcccggcacctggcgtgagtttcatgtatgaaaacataaaattgaaaaaaaaaaaaaaacctacacgagcaccgtgatttcaagtaataaacagaaaatgaaacac

SEQ ID NO: 5118 - protein, 481 aa, Homo sapiens [sequence omitted]

SEQ ID NO: 5119 - DNA, 1315 bp, Homo sapiens
gaggctcgggtcgttgtggtgcgctgtcttcccgcttgcgtcagggacctgcccgactcagtggccgccatggcatcagatgaaggcaaactttttgttggagggctgagttttgacaccaatgagcagtcgctggagcaggtcttctcaaagtacggacagatctctgaagtggtggttgtgaaagacagggagacccagagatctcggggatttgggtttgtcacctttgagaacattgacgacgctaaggatgccatgatggccatgaatgggaagtctgtagatggacggcagatccgagtagaccaggcaggcaagtcgtcagacaaccgatcccgtgggtaccgtggtggctctgccgggggccggggcttcttccgtgggggccgaggacggggccgtgggttctctagaggaggaggggaccgaggctatggggggaaccggttcgagtccaggagtgggggctacggaggctccagagactactatagcagccggagtcagagtggtggctacagtgaccggagctcgggcgggtcctacagagacagttatgacagttacgctacacacaacgagtaaaaacccttcctgctcaagatcgtccttccaatggctgtgtgtttaaagattgtgggagcttcgctgaacgttaatgtgtagtaaatgcacctccttgtattcccactttcgtagtcatttcggttctgatcttgtcaaacccagcctgaccgcttctgacgccgggatggcctcgttactagacttttctttttaaggaagtgctgtttttttttgagggttttcaaaacattttgaaaagcatttacttttttgaccacgagccatgagttttcaaaaaaatcgggggttgtgtgggtttttggtttttgttttagtttttggttgcgttgcctttttttttttagtggggttggccccatgaagtgggtgccccactcacttctctgagatcgaacggactgtgaatccgctctttgtcggaagctgagcaagctgtggcttttttccaactccgtgtgacgtttctgagtgtagtgtggtaggaccccggcgggtgtggcagcaactgccctggagccccagcccctgcgtccatctgtgctgtgcgccccacagtagacgtgcagacgtccctgagaggttcttgaagatgtttatttatattgtccttttttactggaagacgtacgcatactccatcgatgttgtatttgcagtggctgaggaattcttgtacgcagttttctttggctttacgaagccgattaaaagaccgtgtgaaatg

SEQ ID NO: 5120 - DNA, 793 bp, Homo sapiens
ccaagatggcggtgctgtcagctcctggcctgcgcggcttccggatccttggtctgcgctccagcgtgggcccggctgtgcaggcacgaggtgtccatcagagcgtggccaccgatggcccaagcagcacccagcctgccctgccaaaggccagagccgtggctcccaaacccagcagccggggcgagtatgtggtggccaagctggatgacctcgtcaactgggcccgccggagttctctgtggcccatgaccttcggcctggcctgctgcgccgtggagatgatgcacatggcagcaccccgctacgacatggaccgctttggcgtggtcttccgcgccagcccgcgccagtccgacgtcatgatcgtggccggcacactcaccaacaagatggccccagcgcttcgcaaggtctacgaccagatgccggagccgcgctacgtggtctccatggggagctgcgccaacggaggaggctactaccactattcctactcggtggtgaggggctgcgaccgcatcgtgcccgtggacatctacatcccaggctgcccacctacggccgaggccctgctctacggcatcctgcagctgcagaggaagatcaagcgggagcggaggctgcagatctggtaccgcaggtagcgccgccgccgccgccgccggagcctgtcgccgtcctgtccccagcctgcttgtgtcccgtgaggttgtcaataaacctgccctcgggctgccgccaaaaaaaaaaaaaaaaaaaaaaaaaaaaaaaaaaaaaaaaaaaaaaaaaa

SEQ ID NO: 5121 - protein, 213 aa, Homo sapiens
MAVLSAPGLRGFRILGLRSSVGPAVQARGVHQSVATDGPSSTQPALPKARAVAPKPSSRGEYVVAKLDDLVNWARRSSLWPMTFGLACCAVEMMHMAAPRYDMDRFGVVFRASPRQSDVMIVAGTLTNKMAPALRKVYDQMPEPRYVVSMGSCANGGGYYHYSYSVVRGCDRIVPVDIYIPGCPPTAEALLYGILQLQRKIKRERRLQIWYRR

SEQ ID NO: 5122 - DNA, 1086 bp, Homo sapiens
ccccggcccacaagcccctgcagggagcgggcccgggcggcgcgcgatcgaggtcgggtcgccgtccagcctgcagcatgagcgcccccagcgcgacccccatcttcgcgcccggcgagaactgcagccccgcgtggggggcggcgcccgcggcctacgacgcagcggacacgcacctgcgcatcctgggcaagccggtgatggagcgctgggagaccccctatatgcacgcgctggccgccgccgcctcctccaaagggggccgggtcctggaggtgggctttggcatggccatcgcagcgtcaaaggtgcaggaggcgcccattgatgagcattggatcatcgagtgcaatgacggcgtcttccagcggctccgggactgggccccacggcagacacacaaggtcatccccttgaaaggcctgtgggaggatgtggcacccaccctgcctgacggtcactttgatgggatcctgtacgacacgtacccactctcggaggagacctggcacacacaccagttcaacttcatcaagaaccacgcctttcgcctgctgaagccggggggcgtcctcacctactgcaacctcacctcctggggggagctgatgaagtccaagtactcagacatcaccatcatgtttgaggagacgcaggtgcccgcgctgctggaggccggcttccggagggagaacatccgtacggaggtgatggcgctggtcccaccggccgactgccgctactacgccttcccacagatgatcacgcccctggtgaccaaaggctgagcccccaccccggcccggccacacccatgccctcctccgtgccttcctggccgggagtccagggtgtcgcaccagccctgggctgatcccagctgtgtgtcaccagaagctttcccggcttctctgtgaggggtcccaccagcccagggctgatcccagctgtgtgtcaccagcagctttcccagcttctctgtgagggtcactgctgcccactgcagggtccctgaggtgaagtaaacgccggcgctgggcttggccagtcggcagtgaaaaaaaaaaaaaaaaaaaaaaaaaaaaa

SEQ ID NO: 5123 - protein, 236 aa, Homo sapiens
MSAPSATPIFAPGENCSPAWGAAPAAYDAADTHLRILGKPVMERWETPYMHALAAAASSKGGRVLEVGFGMAIAASKVQEAPIDEHWIIECNDGVFQRLRDWAPRQTHKVIPLKGLWEDVAPTLPDGHFDGILYDTYPLSEETWHTHQFNFIKNHAFRLLKPGGVLTYCNLTSWGELMKSKYSDITIMFEETQVPALLEAGFRRENIRTEVMALVPPADCRYYAFPQMITPLVTKG

SEQ ID NO: 5124 - DNA, 960 bp, Homo sapiens
ccccggcccacaagcccctgcagggagcgggcccgggcggcgcgcgatcgaggtcgggtcgccgtccagcctgcagcatgagcgcccccagcgcgacccccatcttcgcgcccggcgagaactgcagccccgcgtggggggcggcgcccgcggcctacgacgcagcggacacgcacctgcgcatcctgggcaagccggtgatggagcgctgggagaccccctatatgcacgcgctggccgccgccgcctcctccaaagggggccgggtcctggaggtgggctttggcatggccatcgcagcgtcaaaggtgcaggaggcgcccattgatgagcattggatcatcgagtgcaatgacggcgtcttccagcggctccgggactgggccccacggcagacacacaaggtcatccccttgaaaggcctgtgggaggatgtggcacccaccctgcctgacggtcactttgatgggatcctgtacgacacgtacccactctcggaggagacctggcacacacaccagttcaacttcatcaagaaccacgcctttcgcctgctgaagccggggggcgtcctcacctactgcaacctcacctcctggggggagctgatgaagtccaagtactcagacatcaccatcatgtttgaggtgcgcccacctgaagttccccatgggtctccaggaagtgaccttggatgggggtgggaaggggctgctggagccaccttgctacctggggagggtcccttcctgaccccctgggtgggctggactgtgctggttcatttagaaatcaaagtcctttgcctggcgcagtggctgccaggagcagtggctcaggtctataatcccagcactgtggaaggccgaggtgggcagattgcttgagcctaggagttcaagaccagcctgggctacagagcaagacctcatctttcctaaaaaaaaaaaatacaaaaaa

SEQ ID NO: 5125 - protein, 269 aa, Homo sapiens
MSAPSATPIFAPGENCSPAWGAAPAAYDAADTHLRILGKPVMERWETPYMHALAAAASSKGGRVLEVGFGMAIAASKVQEAPIDEHWIIECNDGVFQRLRDWAPRQTHKVIPLKGLWEDVAPTLPDGHFDGILYDTYPLSEETWHTHQFNFIKNHAFRLLKPGGVLTYCNLTSWGELMKSKYSDITIMFEVRPPEVPHGSPGSDLGWGWEGAAGATLLPGEGPFLTPWVGWTVLVHLEIKVLCLAQWLPGAVAQVYNPSTVEGRGGQIA

SEQ ID NO: 5126 - DNA, 515 bp, Rattus norvegicus
ctgcgcaggcgcggaccaaagcgatctcttctgaggatccggcaagatggcagaagtagagcagaagaagaagcggaccttccgcaagttcacctaccgcggcgtggacctcgaccagctgctggacatgtcctacgagcagctgatgcagctgtacagtgcgcgccagcggcggcggctgaaccggggcctgcggcggaagcagcactccctgctgaagcgcctgcgcaaggccaagaaggaggcgccgcccatggagaagccggaagtggtgaagacgcacctgcgggacatgatcatcctacccgagatggtgggcagcatggtgggcgtctacaacggcaagaccttcaaccaggtggagatcaagcccgagatgatcggccactacctgggcgagttctccatcacctacaagcccgtaaagcatggccggcccggcatcggggccacccactcctcccgcttcatccctctcaagtaatggctcagctaataaaggcgcacatgactcc

SEQ ID NO: 5127 - protein, 145 aa, Rattus norvegicus [sequence omitted]

SEQ ID NO: 5128 - DNA, 2314 bp, Homo sapiens
agcatgcagttcggtcacctgagggtgctggggccgtggtttgagcttcatgggctcaggtccatggccgttgagtgtggcgaaactgaggcacgctgtgcgggggacggggggcgctcacagaaggtagggggcctcctgtgccttcatccaggcactgcccggcctttcccaccctgttgctaaagcaggtgatgacagaggtgatttgatcagcccagacccgtgcggcacgtggagccttcgtccgtgggagaccacactgccgaggggcaggccagagccgaggggcccctgacgcttctctgagtgaccctgaagtcggtgctgcttcagccctgctgcactgggcttgcatacgtgggggagcagggagccatacgtagtttctgctgaatgtgggagtcaccaggacgtcaatgcccacctctcaccttcgccacccctgcctccctaagtgtgtgctccaggaggttgcacggcccctggagaggttttcggtggcgggcttgttgcgtctctggcttccagagacagcaggaatgagagccaggccagctcagtggagtccatcccggtgggtgccacggcttttgcaggaatggaagccccgcccccaggagggccactgctggcgaggcttgagctctttctgtgacccgatccccctggtcacacgctttgctaaggcgggtagcctagagctggaagcccctcctgccacccagccactgtgcctctcccagctgatggacgaggaagcctccattacttgatttttgtttttatttatttttgagacagggtctcattctgtcacccaggctggagtaccgtggcacgatcatagcttattgcagcctcggcctcccagtctcaagcgatcctcctgcctctgcctccagagaagtagggaccacagatgcgtgctaccacgcccagctaatttttgtatttgtattttttggtagagatgggggtgtcactatgttgtccaggctggtctctaactcttgggctcaagtgttcctcccgcctcggcctcccaaagtgctggattacaggcgtgagccaccacacctggctgcatccgtcatgttaagaagaccccggctggcaagctcactcggggactgcagggaaccctgccctttgggggcagtagtgaggggtgcccaggaggatggggtggtcagcaggcagtgatgctgctgtgtcctgtctcagaccccccagttcccttcaggatgatggaggatgcggaggccccgggagagcagctctaccagcaaagccgggcctacgtggctgccaaccagcggctgcagcaggcgggcaacgtgctgaggcagaggtgtgagctcctgcagcgagccggcgaggacctggagcgggaggtggcccagatgaagcaggcagcattaccggcagccgaggctgcctcctcaggctgacctctcggggcctgcaggcttgggcagcgcacaaggtggcctgcacccaggctttccctgggggtccgtcggccccagactggcattcacggggtcccagcccacgtgggtgttgacacaggcgcccctcctgatgctggggctgcggttcatccgtcgtctcattcatgccgagttggtgggacccacccagctggctccgtcctgcgtgacctgagggccccactggggttctggaagaggatagggacattattgctgtactgtgattctgtcgtcagctcacagtggccgtgctctgcagtggggcccctgggagcaggtgccacctccttcctctcccggggcaggcactcgcctgtccacttctgagtccaggtgttgggatcgaggtgttaactgtgattccatccagcgagtgcccacccaatgtcagagcagcccgagggccagcctgagcccctgaccccacttccttctgggccccgggctcctcccacaagccacgttgatcttcacaacgaccctgggccgctggggtcacccaagagaagcagccctgagacccagccaggctgggcctagctccacggcacgggtgtctcccagccactgcccttgctggaggaccgctgtgagtcactggccaggagcccagggtgtcctgagtctcatagccaccctgccagctgcagcaggtcctgggcctgcttccctgcgggttctggccctgggggagggggcgttagtgcggcggagggtcttgccaaaggcttttcatcctaaatagcaacttgagtggaaacctgggcaaggcggcccagaggctgggccctgcacataaagctttcgtgtgtgtc

SEQ ID NO: 5129 - protein, 118 aa, Homo sapiens
MGSKAKKRVLLPTRPAPPTVEQILEDVRGAPAEDPVFTILAPEDPPVPFRMMEDAEAPGEQLYQQSRAYVAANQRLQQAGNVLRQRCELLQRAGEDLEREVAQMKQAALPAAEAASSG

SEQ ID NO: 5130 - DNA, 492 bp, Homo sapiens
cgcggggaaactgaggcagagagatgggctccaaggcaaagaagcgcgtgctgctgcccacccgcccagcgccccccacggtggagcagatcctggaggatgtgcggggtgcgccggcagaggatccagtgttcaccatcctggccccggaaggtagggggagcccggtcccggggaaaagcggacctgagaccccggcagcaaggggacgggagagaagcacacccctaactcctgaccccacgccctgggaacccccgcaacatgggcacggtccgtatcctctccgagtctccctctactcctccgtagagtgggaccgattttcagagggttcttctgacaggggtggaggccgggcgctgtggttcaggcctgtaagcccagcactttcggaggatgaggcgggaggatcgcttgagcccaggagttcgagaccagcctggccaacatggtgaaaccccgtctctgctaaaaatgaaaaaacaaaac

SEQ ID NO: 5131 - DNA, 2559 bp, Homo sapiens
gcgggccgaggagccgggcgcaatggagcggaagaggtgggagtgcccggcgctcccgcagggctgggagagggaagaagtgcccagaaggtcggggctgtcggccggccacagggatgtcttttactatagcccgagcgggaagaagttccgcagcaagccgcagctggcgcgctacctgggcggctccatggacctgagcaccttcgacttccgcacgggcaagatgctgatgagcaagatgaacaagagccgccagcgcgtgcgctacgactcctccaaccaggtcaagggcaagcccgacctgaacacggcgctgcccgtgcgccagacggcgtccatcttcaagcagccggtgaccaagattaccaaccaccccagcaacaaggtcaagagcgacccgcagaaggcggtggaccagccgcgccagctcttctgggagaagaagctgagcggcctgaacgccttcgacattgctgaggagctggtcaagaccatggacctccccaagggcctgcagggggtgggacctggctgcacggatgagacgctgctgtcggccatcgccagcgccctgcacactagcaccatgcccatcacgggacagctctcggccgccgtggagaagaaccccggcgtatggctcaacaccacgcagcccctgtgcaaagccttcatggtgaccgacgaggacatcaggaagcaggaagagctggtgcagcaggtgcggaagcggctggaggaggcgctgatggccgacatgctggcgcacgtggaggagctggcccgtgacggggaggcgccgctggacaaggcctgcgctgaggacgacgacgaggaagacgaggaggaggaggaggaggagcccgacccggacccggagatggagcacgtctagggcaggtgctgcggggccacgggggctccctggagtcgggtcctggcagtggggactgcctggtgaacacagatgtgcttgggatgacgggtgcctcccaagagcttcccatctccctagaagagcccaagcgtccccgtcccgtggagtcgctaaagccagccctccctgtcctttccagaggccctgccgagagcccgtgctgcctgctggagccgcctgcagacgcggtcctcggccccacgtgaaccaggctcggcggcgaagcccagccttggagacacccaggaggaaggccgtgctcctggctccctcctcggcccgtccccacttcccggggcctcggggcacacagctggggctgcccccacccgaaagaccctccacgctcgtcctctacagagtccggcttcgggaagtgccgggtgctcctgggccctgcctggctccctacgacctttgggctcgaggccagctcctccccatgcccgctgtcccagctccttgagactggagagcagccagcaggtgcccggcagctcggcgccacggcttgctgacagctgggagggtttctcggtctggaggcgtagttttgaaactcacatcacccactgtgcagcgtgaggacgggactctggtctgctgtggggggcatgcaggacggcgccactctctgccctgccatgcggctggtggtgccacagagcctcaccgtgcctgagtggcatgcccaggaggccgctctccttcagtaaatgtaacacagtcgaggcacgtcatcgggcagccttccctgtgtgccaacgccagccttcgcttctgaaaaccaaactccagccgctgccagtcgggacttggtcgcccggcgctgccagaatgctccactgccagccggcccccctgcctcggtttcccttctgtttagtggcgacacaggcacccagctttggggtggtgctgacgctcccaggggtgccaggagccactgggacagggtgaggctcccagacgctcctcgaggtgcccagctctccagggagcttctggcccaaggccgtctgagggatctgctccttaaccccccagtgccttggcgagggcaggttccaagccacagacgcctgccccgagtggactctgcggccagtccctggtgccctcctggccctgctgcccagtgagggctcctacgggtgggttcattggcctgggcccagcgagcccccacctgcattgaccttaggcccatagagagggcctgtcccggtgctgccccagccaggatctggtcgctgccccagggggactgatgggcagagtcgcccctgtggctggactgtgaccatccctgatggggcctgaccgcgggagctgaggaagcgccgctccaccgtctgccctccaaggacccgcatggaggcagtgggctggcagcttcctgctgctccctgtcagagtcaaagcacaaatcctcaggacgggctcaagggccagggcagccgagggaagctccaggtggggaccacgtcttcctgaggttggtgcccactggctgggaccctttgcagtggggtggcctcccctctgtctgcctggtggagggagccgtgggcgtggggacgtgactgaataaagccaccatgggtggatgtgcttgg

SEQ ID NO: 5132 - DNA, 4408 bp, Homo sapiens
gcctgaggtgcccgccctggccccaggagaatgaaccagccgcagaggatggcgcctgtgggcacagacaaggagctcagtgacctcctggacttcagcatgatgttcccgctgcctgtcaccaacgggaagggccggcccgcctccctggccggggcgcagttcggaggttcaggtcttgaggaccggcccagctcaggctcctggggcagcggcgaccagagcagctcctcctttgaccccagccggaccttcagcgagggcacccacttcactgagtcgcacagcagcctctcttcatccacattcctgggaccgggactcggaggcaagagcggtgagcggggcgcctatgcctccttcgggagagacgcaggcgtgggcggcctgactcaggctggcttcctgtcaggcgagctggccctcaacagccccgggcccctgtccccttcgggcatgaaggggacctcccagtactacccctcctactccggcagctcccggcggagagcggcagacggcagcctagacacgcagcccaagaaggtccggaaggtcccgccgggtcttccatcctcggtgtacccacccagctcaggtgaggactacggcagggatgccaccgcctacccgtccgccaagacccccagcagcacctatcccgcccccttctacgtggcagatggcagcctgcacccctcagccgagctctggagtcccccgggccaggcgggcttcgggcccatgctgggtgggggctcatccccgctgcccctcccgcccggtagcggcccggtgggcagcagtggaagcagcagcacgtttggtggcctgcaccagcacgagcgtatgggctaccagctgcatggagcagaggtgaacggtgggctcccatctgcatcctccttctcctcagcccccggagccacgtacggcggcgtctccagccacacgccgcctgtcagcggggccgacagcctcctgggctcccgagggaccacagctggcagctccggggatgccctcggcaaagcactggcctcgatctactccccggatcactcaagcaataacttctcgtccagcccttctacccccgtgggctccccccagggcctggcaggaacgtcacagtggcctcgagcaggagcccccggtgccttatcgcccagctacgacgggggtctccacggcctgcagagtaagatagaagaccacctggacgaggccatccacgtgctccgcagccacgccgtgggcacagccggcgacatgcacacgctgctgcctggccacggggcgctggcctcaggtttcaccggccccatgtcactgggcgggcggcacgcaggcctggttggaggcagccaccccgaggacggcctcgcaggcagcaccagcctcatgcacaaccacgcggccctccccagccagccaggcaccctccctgacctgtctcggcctcccgactcctacagtgggctagggcgagcaggtgccacggcggccgccagcgagatcaagcgggaggagaaggaggacgaggagaacacgtcagcggctgaccactcggaggaggagaagaaggagctgaaggccccccgggcccggaccagcccagacgaggacgaggacgaccttctccccccagagcagaaggccgagcgggagaaggagcgccgggtggccaataacgcccgggagcggctgcgggtccgtgacatcaacgaggcctttaaggagctggggcgcatgtgccaactgcacctcaacagcgagaagccccagaccaaactgctcatcctgcaccaggctgtctcggtcatcctgaacttggagcagcaagtgcgagagcggaacctgaatcccaaagcagcctgtttgaaacggcgagaagaggaaaaggtgtcaggtgtggttggagacccccagatggtgctttcagctccccacccaggcctgagcgaagcccacaaccccgccgggcacatgtgaaaggtatgcctccgtgggacgagccacccgctttcagccctgtgctctggccccagaacggccactcgagaccccgggcttcatccacatccacacctcacacacctgttgtcagcatcgagccaacaccaacctgacaaggttcggagtgatgggggcggccaaggtgacactgggtccaggagctccctggggccctggcctaccactcactggcctcgctccccctgtccccgaatctcagccaccgtgtcactctgtgacctgtcccatggatcctgaaactgcatcttggccctgttgcctgggctgacaggagcattttttttttttccagtaaacaaaacctgaaagcaagcaacaaaacatacactttgtcagagaagaaaaaaatgccttaactataaaaagcggagaaatggaaacatatcactcaagggggatgctgtggaaacctggcttattcttctaaagccaccagcaaattgtgcctaagcgaaatattttttttaaggaaaataaaaacattagttacaagattttttttttcttaatgtagatgaaaattagcaaggatgctgcctttggtctctggtttttttaagctttttttgcatatgttttgtaagcaacaaatttttttgtataaaagtcccgtgtctctcgctatttctgctgctgttcctagactgagcattgcatttcttgatcaaccagatgattaaacgttgtattaaaaagaccccgtgtaaacctgagcccccccgtccccccccccccccggaagccactgcacacagacagaacggggacaggcggcgggtcttttgtttttttgatgttgggggttctcttggttttgtcatgtggaaagtgatgcgtgggcgttccctgatgaaggcaccttggggcttccctgccgcatcctctcccctcaggaaggggactgacctgggcttgggggaagggacgtcagcaaggtggctctgaccctcccaggtgactctgccaagcagctgtggcccccagggctaccctacacaacgccctccccaggcccccctaagctgctctcccttggaacctgcacagctctctgaaatggggcattttgttgggaccagtgacccctggcatggggaccacaccctggagcccggtgctggggacctcctggacaccctgtccttcactcctttgccccagggacccaggctcatgctctgaactctggctgagaggatgctgctcaggagccagcacaggacaccccccaccccaccccaccatgtccccattacaccagagggccatcgtgacgtagacaggatgccaggggcctggccagcctcccccaatgctggggagcatccctgggcctggggccacacctgctgccctccctctgtgtggtccaagggcaagagtggctggagccgggggactgtgctggtctgagccccacgaaggccttgggctgtgcgtccgaccctgctgcagaaccagcagggtgtcccctcgggcccatctgtgtcccatgtcccagcacccaggcctctctccaggtctccttttctggtcttttgccatgagggtaaccagctcttcccagctggctggggactgtcttgggtttaaaactgcaagtctcctaccctgggatcccatccagttccacacgaactagggcagtggtcactgtggcacccaggtgtgggcctggctagctgggggccttcatgtgcccttcatgcccctccctgcattgaggccttgtggacccctgggctggctgtgttcatccccgctgcaggtcgggcgtctccccccgtgccactcctgagactcccaccgttacccccaggagatcctggactgcctgactcccctccccagactggcttgggagcctgggccccatggtagatgcaagggaaacctcaaggccagctcaatgcctggtatctgcccccagtccaggccaggcggaggggaggggctgtccggctgcctctcccttctcggtggcttcccctacgccctgggagtttgatctcttaagggaacttgcctctccctcttgttttgctcctggccctgcccctaggtctgggtgggcagtggccccatagcctctggaactgtgcgttctgcatagaattcaaacgagattcacccagcgcgaggaggaagaaacagcagttcctgggaaccacaattatggggggtggggggtgtgatctgagtgcctcaagatggttttcaaaaaaatttttttaaagaaaataattgtatacgtgtcaacacagctggctggatgattgggactttaaaacgaccctctttcaggtggattcagagacctgtcctgtatataacagcactgtagcaataaacgtgacattttataacg

SEQ ID NO: 5133 - protein, 654 aa, Homo sapiens
MNQPQRMAPVGTDKELSDLLDFSMMFPLPVTNGKGRPASLAGAQFGGSGLEDRPSSGSWGSGDQSSSSFDPSRTFSEGTHFTESHSSLSSSTFLGPGLGGKSGERGAYASFGRDAGVGGLTQAGFLSGELALNSPGPLSPSGMKGTSQYYPSYSGSSRRRAADGSLDTQPKKVRKVPPGLPSSVYPPSSGEDYGRDATAYPSAKTPSSTYPAPFYVADGSLHPSAELWSPPGQAGFGPMLGGGSSPLPLPPGSGPVGSSGSSSTFGGLHQHERMGYQLHGAEVNGGLPSASSFSSAPGATYGGVSSHTPPVSGADSLLGSRGTTAGSSGDALGKALASIYSPDHSSNNFSSSPSTPVGSPQGLAGTSQWPRAGAPGALSPSYDGGLHGLQSKIEDHLDEAIHVLRSHAVGTAGDMHTLLPGHGALASGFTGPMSLGGRHAGLVGGSHPEDGLAGSTSLMHNHAALPSQPGTLPDLSRPPDSYSGLGRAGATAAASEIKREEKEDEENTSAADHSEEEKKELKAPRARTSPDEDEDDLLPPEQKAEREKERRVANNARERLRVRDINEAFKELGRMCQLHLNSEKPQTKLLILHQAVSVILNLEQQVRERNLNPKAACLKRREEEKVSGVVGDPQMVLSAPHPGLSEAHNPAGHM

SEQ ID NO: 5134 - DNA, 1991 bp, Homo sapiens
cagcaactccgtggccaagctgaggaggcccagggcccgctcctgcttctccacgggtgtgctctgtggcccccgatggaagggggaaggatccaagcaggccctccctgcccagggcagaagattctggagtcctgggcgttgcctgtgagtgttctgagagataagggccccgcccgccccgccccgggaccaaggtcctcgtcccgtcccttgctgcgccgggaactcctgccccacgcaggcttctggtctccacactgggcttgttcctgggtgatgagattcggctccaccctcacgggctgccagcctcctgcccgatgggtgagcctctgctgctgcttcagcaaagggcggccccacttcccacactggcaggtggggacagggagaccctgggcctccccagagctcatgggttagcttccacaccctcatgctgtcatgagcctttctcacagggtcagaagagtctgcatctgacacagagaccccagtccacatagtcagggctgggccagagggagggacttggggctgatggggaggaggctcggcgtgagagtgaggtctttgcccaaggagggtatgaaagctggggctttagtgggtgggtaggagttggccagcagagagccgacggaagagttaatttaagtttatggacctgtaagtgctccgagtcccagggtgtctgggtgttagctgctgactggtgtcctcatgagtcgggctgggtgaggctgggttaggaagggttccacaagccccccgggtccactgaggtttgcccctgagatgatgaaccgaagcttttagagctgggcaggcgtgagggtgacccataactctctctgtcctgcctgcaggtcttgaggaccggcccagctcaggctcctggggcagcggcgaccagagcagctcctcctttgaccccagccgggtaggagtccccgtgaggcctgagaccctgagtttcctgtccccagagttgggggcgaggggtgtggggaaactgaggctgagagaaggggccagccttccaggggtttggactgggggacatgggtttgagtcctgcctctccagctgtaatgcggggtggagggggggcctgtgaagccccagcacctctcatccccaccccatctcccctagaccttcagcgagggcacccacttcactgagtcgcacagcagcctctcttcatccacattcctgggaccgggactcggaggtgagtgcctggcctggtgcggtccctctgctgtgcacagatgtgcagacgtgggccttggcatggtcagtgcacgcacagcgccaggcaagtccccagcgttcacccagagggtgtggacagccgaagcctctgcccgtcctgggagcagctgcggggaggtgcaggggacgtggcccggactccctggcacggcactctgcaactaggcttccccgcctgagcgtagaggcagggaggccgttccagaccccacttcctccctgggatttctgcagggctcctcctgcttcccggggaggggtcagccgggctggcctgtgcccgctgggaaggaggcgtaggagttctggagactcgggagggcggccagagtgtgcggtggtcagagcccatgcccttccgcagaccgcccgcccgccctctttccctggggggccctcctgttaaccgagagaatcgtgactcaggttgggctcggtggctcacgcctgtaataccagcactttgggagagcgaggtgggtggatcacctgaggtcaggagtttgagaccagcctggccaacatggtgaaaccccgcttctaccaaaaacacaaaaattagccggtcatggtgttggatgcttatagtgccaactactcaggaggctgaggcaggagaattgcttgaacccaggaggtggaggctgcagtgagccgagatcacgccattgccctccagcctgggtgatggagcgagattccatctt

SEQ ID NO: 5135 - DNA, 4566 bp, Homo sapiens
gcgggcggcggcgaccgcggcgccagtgagggggccctggggcccgggcggctccgggccggggccccgccgcgggacggaccatgctacgctccactggcttcttccgggccattgactgcccctattggtctggggcgcccggggggccctgccggcggccctactgccacttccggcaccgcggggcccggggctccggcgcgcccggtgacggcggagaggcgccccccgcagcagggctgggttacgacccctacaaccctgagctgcccaagccccccgcgcagagggagaatggcaccctgggcctgggggaggagccgcgcccggatgtgctggagttggagctggtcaaccaggccatcgaggccgtgcgcagtgaggtggagctggagcagcggcgctaccgggagctgctggagacgacccgtgagcaccgctccgccgaggcccccgccctggcgccccgcggccccaacgccagccccactgtgggcccggacgaggatgccttcccactggccttcgactacagccccggcagccacggcctattaagccctgatgccggctaccagcccaccccactggccgcccctgccgagccgggcagcaagtactcgctggcgtccctggacaggggtcagggcagaggtggagggggtggcggtgccctggaatacgtccccaaggctgtgagccagccccggcggcacagccgccccgttcccagtggcaagtacgtggtggacaactccaggccacccacagacctggagtatgaccctctctccaactactcggcccggcacctcagcagggccagctcccgggatgagcgggccgccaagcggccccggggctcccgcggcagtgagccctacacacctgctcccaagaagctctgtgacccctttggcagttgcgatgcaaggttctcagactcagaagatgaggccgccacggtcccaggtaacgagcccaccacggccagcacccccaaagccagggccgaccctgagatcaaggccaccgggcagccaccctccaaagagggcctggaggccgaggggggcggcctgcgggagaccaaggagacggccgtgcagtgcgacgtgggggacctccagccgcccccagccaagcccgcctccccagcccaggtccagtcctcacaggatgggggctgccccaaggagggaaaacccaagaagaaaaaaaccggggccccacctgcccccagctgcaaagacggggcccaggggaaggacaagaccaaggacaagggccgagggcggcctgtggagaagccccgtgcggacaagaagggcccgcaggccagcagcccccggcgcaaggcagagcggccggaagggaccaagaagaagccatcttcggccactcctgtggccacctcagggaaagggaggcctgaccggccagcgcggcggccgagccccacaagcggggactcccgaccggcggccggcagaggcccaccccgccccctccagctgcccgacaggaagagcaccaaggccccgtcggggaagctagtggagcggaaagcccgctcactagacgagggcgcctcccaggacgcccccaagctgaagaagcgggccctgagccacgccgacctctttggggacgagagtgaggacgaggccgcagggccaggggtgccgagcgtgtggccctctgccctccccagcctcagctcggactcagactccgactcagactccagcctgggcttcccggaggcgcaggggccgcccaagcggctcaaggcctccccgcccccctcccccgccccatcctcctcctcctcctcctcctcctccacctccagcgcgggggcggatgtggactactcggccctggagaaggaggtggactttgactccgaccccatggaggagtgcctgcggatcttcaacgagtccaccagcgtcaagacggaggacagaggccggctggcccggcagccccccaaggaagagaagagtgaggagaaggggctttcgggtctgaccactctgttccccgggcagaagaggaggatctcccacctttccaagcaaggccaggaggtggagcccccgaggaggggtcccgcggtgcccccggcccggcccccgacggcgcaggaggtgtgctacctgcgggcccagcaggcgcagagggcatcggcgagcttgctgcaggcccccgccaggctggcagagaagtcgccctccgtccacatttccgcccctggcgagaagaggaggatcgcccacatccccaacccccgcctggctgcagcccccacaggtgccaagaggacccttgcggccagcggcagccagtcctccaacggccctgagccaggtggccagcagctgaaaacacgcacattgtcggggatggcgtccaagactaccaccaccatcatccctaagcgaatcgcccacagtccatccttacagagtttaaagaaacccattatccccaaagagtttgggggcaaagtccccaccgtcatccgccagcgctatctcaacctgttcatcgaggagtgtctcaagttctgtacctccaaccaggaggccatagagaaggcactgaacgaggagaaggtggcctatgaccgcagccccagcaagaacatctacctgaatgtggccgtgaacaccctcaagaagctcaggggcctggcccccagcgctgtgcccggcctcagcaaaaccagtggccgcagggttgtgtcccacgaggtggtgttggggggcaggttggccgccaagaccagcttctcgctcagccgtccaagcagcccccgggtggaggacctgaaaggggctgccctgtacagccgcctcagggagtacctgctcacccaggaccagctcaaggagaacggctaccccttcccgcacccagagcggcccgggggcgcaatcatcttcacagctgaggagaagaggcccaaggactcttcctgcaggacctgctgccgctgtggcaccgagtacctcgtgtcctcttcaggccgctgcatccgggacgaggagtgttattaccactggggacggctgcgccggaaccgggtggccggaggctgggagacccagtacatgtgctgctcggctgccgccggctctgtcggctgccaagtcgcaaagcaacacgtgcaggatggccggaaggagcgccttgagggcttcgtgaagacctttgagaaagagctctcaggagacacccacccggggatctacgccctggactgcgagatgtcctacaccacatatggcctggagctgacgcgcgtcacggtggtcgacacggacgtgcacgtggtttatgacaccttcgtgaagcctgacaacgagatcgtggactacaacaccaggttttcgggggtgacggaggctgaccttgccgacacaagtgtcacgctgcgtgacgtccaggccgttctgctgagcatgttcagcgctgacaccatcctcatcggacacagcctggagagcgacctcctggccctgaaggtcatccacagcaccgtggtggacacgtctgtgctcttcccccaccgcctgggcctcccctacaagcggtccctgcggaacctcatggccgactacctcagacagatcatccaggacaatgtggatgggcacagctccagcgaggacgccggcgcctgcatgcacctggtgatctggaaggttcgagaagacgccaagaccaagcgatgacgcctgcccgcctcccacccgcctctcctgccgtcccgctggtccttagccccatgcctcttccaaaacagtgcaataaatctccggtaacccgtccacctggccgaggcagcccagagcagcgggatgagctggcggccagagaacgcccagcccagcccacccccgctcacgtcctgccgcacccctccgccggtccccaccctctgccccccagccctctggcgtctctagaaactgctgctgatggagaccaggacagagcccgcccccacccggcccgcagcccctcctgcccctcctgccaggccctccctcccgggtggtggccggcacctctgctcctcacgtgggtcgcggggcgggcttgtcccaggtttgtttgagacagtctttttttattttgtattgttatttttattatttttaatttaaacctgatgacttgcacagcatctttcccaccgggaagagcgggcctgctgccttccctcctgcggggtgggggtgggacagaccccagtgggggccagggccacactcagcgcagtgtgggctggacccgcctctgtgctccaggggctggccggtcttcgggggcgccggcttccaccactcgccgccccacccctgcactccgtgacctctgagaacccagctggcccctcgttagccccagggtctgccgtctagagggagcccaccggcctccggacactgtcttcccgctagagccccgtcctcctctgcggggctctccggacccccttccccctcacctccaggcagggacagaataaatgtttgtatggatttt

SEQ ID NO: 5136 - protein, 1221 aa, Homo sapiens
MLRSTGFFRAIDCPYWSGAPGGPCRRPYCHFRHRGARGSGAPGDGGEAPPAAGLGYDPYNPELPKPPAQRENGTLGLGEEPRPDVLELELVNQAIEAVRSEVELEQRRYRELLETTREHRSAEAPALAPRGPNASPTVGPDEDAFPLAFDYSPGSHGLLSPDAGYQPTPLAAPAEPGSKYSLASLDRGQGRGGGGGGALEYVPKAVSQPRRHSRPVPSGKYVVDNSRPPTDLEYDPLSNYSARHLSRASSRDERAAKRPRGSRGSEPYTPAPKKLCDPFGSCDARFSDSEDEAATVPGNEPTTASTPKARADPEIKATGQPPSKEGLEAEGGGLRETKETAVQCDVGDLQPPPAKPASPAQVQSSQDGGCPKEGKPKKKKTGAPPAPSCKDGAQGKDKTKDKGRGRPVEKPRADKKGPQASSPRRKAERPEGTKKKPSSATPVATSGKGRPDRPARRPSPTSGDSRPAAGRGPPRPLQLPDRKSTKAPSGKLVERKARSLDEGASQDAPKLKKRALSHADLFGDESEDEAAGPGVPSVWPSALPSLSSDSDSDSDSSLGFPEAQGPPKRLKASPPPSPAPSSSSSSSSSTSSAGADVDYSALEKEVDFDSDPMEECLRIFNESTSVKTEDRGRLARQPPKEEKSEEKGLSGLTTLFPGQKRRISHLSKQGQEVEPPRRGPAVPPARPPTAQEVCYLRAQQAQRASASLLQAPARLAEKSPSVHISAPGEKRRIAHIPNPRLAAAPTGAKRTLAASGSQSSNGPEPGGQQLKTRTLSGMASKTTTTIIPKRIAHSPSLQSLKKPIIPKEFGGKVPTVIRQRYLNLFIEECLKFCTSNQEAIEKALNEEKVAYDRSPSKNIYLNVAVNTLKKLRGLAPSAVPGLSKTSGRRVVSHEVVLGGRLAAKTSFSLSRPSSPRVEDLKGAALYSRLREYLLTQDQLKENGYPFPHPERPGGAIIFTAEEKRPKDSSCRTCCRCGTEYLVSSSGRCIRDEECYYHWGRLRRNRVAGGWETQYMCCSAAAGSVGCQVAKQHVQDGRKERLEGFVKTFEKELSGDTHPGIYALDCEMSYTTYGLELTRVTVVDTDVHVVYDTFVKPDNEIVDYNTRFSGVTEADLADTSVTLRDVQAVLLSMFSADTILIGHSLESDLLALKVIHSTVVDTSVLFPHRLGLPYKRSLRNLMADYLRQIIQDNVDGHSSSEDAGACMHLVIWKVREDAKTKR

SEQ ID NO: 5137 - DNA, 1811 bp, Homo sapiens
tgcaacggggcccccccagggcagctaggaggtcctcccctctcctctccaccaccccctgctgcccccctcccggggtggggtttgggggggtggagtggacttctgggagccggcccggggaaagcaccccctgccccatccctgcagattgggatgaagtgttcagacagccatagaggagtcgggggttgacacggcccctgcctctccccaccccacccccaccccaccgaaagccatgggagtagttcagggaaatgggggtgcagcccagccaccccccattcgggtactcaatctcaggtgtccacaagttctgcccacggtaggggctgcctggccccccagacctcgggggtagagccaggagtggggcagcgttaggatgcccggaggggctccaggtgttgcttctgagacctgggatggggagggaggggacctctgggttcttccaaagaacatttgactcagtggggtcgggagggaatcctggcttatttattttcctctgtcctcgggtgtgggggccctagctcgccctctctgggtgggtgggtgagagaggctgcaggggaggctggcaccgggcttgggcctccagtccctgccttgctgactttggccgttgcggtatcacgtgacaatcaactctcccttaacgacgactgcggctgttgggctgcgctgccctccctggcctgcaggtggggccgtggagcccatgcccgccggggttgcaggctcttccgggcctgggctgcagcctggcccggccctgcttccctggcctcccctccttctcctgggtgcttggaagaggtgggtcctggcccgtggttgaggtcttgcctcgtggactggaagcagagggctggctgtgcagcctcctggggtagctcgttttttttgcaccgggtagaatattttttcaggcacggattcctttttttctgggcccccatgggtggtccggcatcctcagggggtgtgagtgtgtgtggggggtctctgagctgaacttgggtggggtggggacttgttcctcgggggccacctttgtgtccttgtcagcggtcgtcctgctgtggcctgggttgcatttcctcttggggggggtattgaggacccccagcctggaatgagaagggtccccggttccatgtcagacccagaaaggtggatccccccactgttggctgcaggaggtttttggtacccccttttgttccagaaccgtcctgcctctcgcttggggacaggggggctttggatggcactggtgtgcacctggacccagccccggcctggcaggatccagggatgggtgcctgggatcctggggggagggaggcaggggacgcccttctggagctgggctcggagggtcctgccccatccagccctcggctctctgtgttctctgtccctagcctcaaaccctcttctggcagcgctagtgagatgccttagtctgtgggggtgggtgggggactggggccccgttttcctttgtgagtcttggttggccccagccctggcaggggcctgtctggagcaggggtaggtagggctgtgggttccagaactctataactgggcccctctccagtgtccaggggcttggagagacctgcgcccacccctccactctcccaggagtcgctgatcactgggacctggttccagccgtttgcaggggaggcggctccgagaggcgtgtgctttccgtgggtggcgcccctcccccgccctgcctggcctcatccttgtatttaattaattaaacaagcccctttttaaaccct

SEQ ID NO: 5138 - DNA, 1645 bp, Homo sapiens
gcggagggaccgacggacgcacgggcgggcggccgggagccatggagcgcggccctggggccccggggcgcgggccggggtgggcttcccacggcacgacatggagacctgtggttgcgaggctccctggggctcggcttggaccgcgatggggctgggccctggcctcctaacggggctgctgtctggggcggtagctgggggggcgctctcccccctgcccgcgactcggagcacccccacccctcccctgccgggccaggccgggcggcgttgttggcgggggccccggtggaggcccggcctgggcggcgcccgccatgaatgggctgtcgctgagtgagctctgctgcctcttctgctgcccgccctgccccggccgcatcgctgccaagctcgccttcctgccgccggaggccacctactccctggtgcctgagcccgagccggggcctggtggggccggggccgcccccttggggaccctgagagcctcctcgggcgcacccgggcgctggaagctgcacctgacggagcgtgccgacttccagtacagccagcgcgagctggacaccatcgaggtcttccccaccaagagcgcccgcggcaaccgcgtctcctgcatgtatgttcgctgcgtgcctggtgccagacaaggacaccaggctcagggaggccatccccagctggcatgggtgggcaggctgggcgactccaacaacccagcgcctggtggttgcctgctgggcgagagctggggcacaggggctgccctggcctgcgggtacatccaccttctcgccaggtacacggtcctcttctcgcacggcaatgccgtggacctgggccagatgagcagcttctacattggcctgggctcccgcctccactgcaacatcttctcctacgactactccggctacggtgccagctcgggcaggccttccgagaggaacctctatgccgacatcgacgccgcctggcaggccctgcgcaccaggtacggcatcagcccggacagcatcatcctgtacgggcagagcatcggcacggtgcccaccgtggacctggcctcgcgctacgagtgtgccgcggtggtgctgcactcgccgctcacctcgggcatgcgcgtcgccttccccgacaccaagaagacctactgcttcgacgccttccctaacatcgagaaggtgtccaagatcacgtctcccgtgctcatcatccacggcacggaggacgaggtgatcgacttctcgcacgggctggcgctctacgagcgctgccccaaggcggtggagccgctgtgggtggagggcgccgggcacaacgacatcgagctctacagccagtacctggagcgcctgcgtcgcttcatctcccaggagctgcccagccagcgcgcctagcggcggccccaaccggccggacctcagcaataaggcggcccccggacctcaccccgcgccggcccccacccaggggctgcatgtggaccccccgggcggcccaggggaccccgccccgacccaggggctgtggacgatgtacaggcaacagagctacgcactcctttccttttggaagcaagaagaaaatacgtgaaaacggaaattaaagatttaaaattttaaaaaaaaaaaaaaaa

SEQ ID NO: 5139 - protein, 361 aa, Homo sapiens
MNGLSLSELCCLFCCPPCPGRIAAKLAFLPPEATYSLVPEPEPGPGGAGAAPLGTLRASSGAPGRWKLHLTERADFQYSQRELDTIEVFPTKSARGNRVSCMYVRCVPGARQGHQAQGGHPQLAWVGRLGDSNNPAPGGCLLGESWGTGAALACGYIHLLARYTVLFSHGNAVDLGQMSSFYIGLGSRLHCNIFSYDYSGYGASSGRPSERNLYADIDAAWQALRTRYGISPDSIILYGQSIGTVPTVDLASRYECAAVVLHSPLTSGMRVAFPDTKKTYCFDAFPNIEKVSKITSPVLIIHGTEDEVIDFSHGLALYERCPKAVEPLWVEGAGHNDIELYSQYLERLRRFISQELPSQRA

SEQ ID NO: 5140 - DNA, 531 bp, Homo sapiens
atgaatgggctgtcgctgagtgagctctgctgcctcttctgctgcccgccctgccccggccgcatcgctgccaagctcgccttcctgccgccggaggccacctactccctggtgcctgagcccgagccggggcctggtggggccggggccgcccccttggggaccctgagagcctcctcgggcgcacccgggcgctggaagctgcacctgacggagcgtgccgacttccagtacagccagcgcgagctggacaccatcgaggtcttccccaccaagagcgcccgcggcaaccgcgtctcctgcatgtatgttcgctgcgtgcctggtgccaggtacacggtcctcttctcgcacggcaatgccgtggacctgggccagatgagcagcttctacattggcctgggctcccgcctccactgcaacatcttctcctacgactactccggctacggtgccagctcgggcaggccttccgagaggaacctctatgccgacatcgacgccgcctggcaggccctgcgcaccaggtga

SEQ ID NO: 5141 - DNA, 2446 bp, Homo sapiens
gggatttgcacggcagcagagtcaccgtggagaggccagggtatcacaaacttatggattttgacaagaaaggagggaaaggggagacggaggagggccggagaatgtccaaggccggcgggggccggagcagccacggcatccggagctcggggaccagctcgggggtcctgatggtgggccccaacttccgcgtcggcaagaagatcggctgcggcaacttcggggagctccgcctaggaaagaatctctatacaaatgaatacgtggctatcaaattggagccgatcaagtcccgggccccgcagctgcacctggagtaccggttctacaagcagctcagcgccacagagggcgtccctcaggtctactacttcggtccgtgcgggaattacaacgccatggtgctggagctgctggggcccagcctggaggacctgttcgacctgtgcgaccggaccttcacgctcaagacggtgctgatgatcgccatccagctgatcacgcgcatggagtatgtgcacaccaagagcctaatctaccgggacgtgaagcccgagaacttcctggtgggccgcccggggaccaagcggcagcatgccatccacatcatcgacttcgggctggccaaggagtacatcgaccccgagaccaagaagcacatcccgtaccgcgagcacaagagcctgacgggcacggcgcgctacatgagcatcaacacgcacctgggcaaggagcagagccgccgcgacgacctggaggcgctgggccacatgttcatgtacttcctgcgcggcagcctcccctggcaggggctcaaggccgacacgctcaaggagcggtaccagaagatcggggacaccaaacgcgccacgcccatcgaggtgctctgcgagaacttcccagaggagatggccacgtacctgcgctatgtgcggcgcctggacttcttcgagaagcccgactatgactacctgcggaagctcttcaccgacctcttcgaccgcagtggcttcgtgttcgactatgagtacgactgggccgggaagcccctgccgacccccatcggcaccgtccacaccgacctgccctcccagcctcagctccgggacaaaacccagccgcacagcaaaaaccaggcgttgaactccaccaacggggagctgaatgcggacgaccccacggccggccactccaacgccccgatcacagcgcctgcagaggtggaggtggccgatgaaaccaaatgctgctgtttcttcaagaggagaaagagaaaatcgctgcagcgacacaagtgaccctgggcgcgtgcagccccctgaatcttctccgtgcagccccttggggcgcgaccttgtgcgaggccctcggggcccacccacagcggcccagggccagaccctggctggaagccagaacgcagactgcaggggccgcgcctggctcaggcggccccacccccgggacgtggggtcacttccttcatgtaagactttggccgaaatttctacacctgtgtctagtcctcccctccaagagcattaactatttaaaacaaggaaaagaggaaaaaaaaaacagaggcccgccctaccccactcctgcccctccgtttctttgctgaagtgagtagtgtgatcctggaggccccccggcctggccccgccccgccagccgcccccgttagcgtcataaagtccagcttgtctccctcgatccaaaggccgttttctcgaggggagggcaggcccggcctggaggggtgctgtggagctgtcttgcccaggccctcctgggagggggacaggcattgttgccaggggtgaggccgtgccccaggcctccccgaaaccaaaggggaaggcaggggtggggccgtggctgaagccggctccccaaccaaaatgctgcaccaaagctcgggcgccgcgggcacggctgctgcagtctcttcccagcctggccctggcaaggggcgggtgggcgctgccaggcgggtgcttctcgacgcacttgctcccggaggctgcgccccggcgcctggaacccgaggtgggaggaccggttggtgtcaccctgctcggccctcagccctgccgcgtggggcgcgtgggcacggagcttcctgcctctgctccgacacccggcaagcagccggagacaaaacgccttaaagcccccggcccagccctgcaggtatattgcaggggcctgggggcggccctggactggcgggcggttccccagtggggtgccctggaggctgccgggcagagtggagcagcttggggccgtgcccagggcggtggctgtgagtctagtttttgctttaccaagtgtacagaaatggcatttacgtttctctgatgctcccttgaagccatagaatttaggggcttttttaaaaaaataaaagaaaaatgaaaccaaaaaaaaaaaaaaa

SEQ ID NO: 5142 - protein, 415 aa, Homo sapiens
MDFDKKGGKGETEEGRRMSKAGGGRSSHGIRSSGTSSGVLMVGPNFRVGKKIGCGNFGELRLGKNLYTNEYVAIKLEPIKSRAPQLHLEYRFYKQLSATEGVPQVYYFGPCGNYNAMVLELLGPSLEDLFDLCDRTFTLKTVLMIAIQLITRMEYVHTKSLIYRDVKPENFLVGRPGTKRQHAIHIIDFGLAKEYIDPETKKHIPYREHKSLTGTARYMSINTHLGKEQSRRDDLEALGHMFMYFLRGSLPWQGLKADTLKERYQKIGDTKRATPIEVLCENFPEEMATYLRYVRRLDFFEKPDYDYLRKLFTDLFDRSGFVFDYEYDWAGKPLPTPIGTVHTDLPSQPQLRDKTQPHSKNQALNSTNGELNADDPTAGHSNAPITAPAEVEVADETKCCCFFKRRKRKSLQRHK

SEQ ID NO: 5143 - DNA, 2668 bp, Homo sapiens
atggcggcgggtgggagcggcgggcgtgcgtcgtgcccgccgggggtcggggtcggcccgggcacggggggcagtcccgggcccagcgccaacgccgccgccaccccggcccccggcaacgcggccgccgccgccgccgccgccgccgccgccgccgccgcccctgggccgacgccgcccgccccgccgggccccgggacagacgcgcaggccgcgggcgcggagcgggcggaggaggcggcgggcccgggggcggcggcgctgcagcgcgaggccgcgtacaactggcaggccagcaagcccaccgtgcaggagcgcttcgccttcctcttcaacaacgaggtgctgtgcgacgtgcacttcctggtgggcaaggggctcagctcgcagcgcatccccgcgcacaggttcgtgctggccgtgggcagcgccgtctttgatgccatgttcaacgggggaatggccacaacatccacggagattgagctgcccgacgtggaacccgccgccttcctcgcactgctcaagtttctctactcggacgaggtgcagattggcccggagacggtgatgaccacgctatacaccgccaagaagtacgcggtgccagcgctcgaggcccattgcgtggagttcctgaagaagaacctgcgagccgacaacgccttcatgctgctcacgcaggcgcgactcttcgatgaaccgcagctggccagcctgtgcctggagaacatcgacaaaaacactgcagacgccatcaccgcggagggcttcaccgacattgacctggacacgctggtggctgtcctggagcgcgacacactgggcatccgtgaggtgcggctgttcaatgccgttgtccgctggtccgaggccgagtgtcagcggcagcagctgcaggtgacgccagagaacaggcggaaggttctgggcaaggccctgggcctcattcgcttcccgctcatgaccatcgaggagttcgctgcaggtcccgcacagtcgggcatcctggtggaccgcgaggtggtcagcctcttcctgcacttcaccgtcaaccccaagccacgagtggagttcattgaccggccccgctgctgcctgcgtgggaaggagtgcagcatcaaccgcttccagcaggtggagagtcgctggggctacagcgggaccagtgaccgcatcaggttctcagtcaacaagcgcatcttcgtggtgggatttgggctgtatggatccatccacgggcccaccgactaccaagtgaacatccagattattcacaccgatagcaacaccgtcttgggccagaacgacacgggcttcagctgcgacggctcagccagcaccttccgcgtcatgttcaaggagccggtggaggtgctgcccaacgtcaactacacggcctgtgccacgctcaagggcccagactcccactacggcaccaaaggcctgcgcaaggtgacacacgagtcgcccaccacgggcgccaagacctgcttcaccttttgctacgcggccgggaacaacaatggcacatccgtggaggacggccagatccccgaggtcatcttctacacctaggctgcccgacaccgacaccgccctccctccgcggggatagccgcagccccaggccatcatctgctgctggggtccccccaccacgcggtgccaggcccagtgtcccccaggccgtctgtccactccatgccacctttctcagcatcaggacggggttgccctgtgttcaccacgagtgtggctgctggatcagggcagccggggaggtggccaggccagtggccaggccctgtggagacaatccctcaggactagggacagggctgtgccggcctgggccagggcccacggacccgcagctcagggcgcctgcccacgtcgtctgccggcggtgcgccgcgggcgtccctcgcgtctcttcactgcacattgcaatgcatttgcgattcccatttctctgctaggagccagcctgggtggcgctgctcccagagccgtgggtcccagaccttgcgttccttttgttcctgtccgtttatcaggacacgggccccacctgtcacgtgcccgaggccacccaagcccagcctgcggggcgttcccactgcctggatgccggcttgagttctgcgcacgcaggattcagtgtggggacggcccctgccggataggcctagccctggcccaggtggtgagcggtttgcagtgtccgttctcatccacctgatgggcccagataaaggcccccgctgtccagcctccctggacggccctcgcggtccctgcagcccaagatgggactcagaccctgtgccccagagctcccctgccgcagaatggggccccagccggccccgaccgggtccaggagcactgctcgcctgtacatactgttgccctagcccacctggtgccgtgggagccacccccaggtgctgggggcacagcccctccccactccggccacgcccccacccaccccgcgtgtttctgccctgtgactcctggaacctgcgtcctccccaaagccatgggaggggtgtcctcctcagaccatgcccccagatgatttttttaaataaagaaacaaatgcacctgcaaaaaaaaaaaatagaaaataaaaaaaaaaaaaaaaaaaaaaaaaaaaaa

SEQ ID NO: 5144 - protein, 525 aa, Homo sapiens
MAAGGSGGRASCPPGVGVGPGTGGSPGPSANAAATPAPGNAAAAAAAAAAAAAAPGPTPPAPPGPGTDAQAAGAERAEEAAGPGAAALQREAAYNWQASKPTVQERFAFLFNNEVLCDVHFLVGKGLSSQRIPAHRFVLAVGSAVFDAMFNGGMATTSTEIELPDVEPAAFLALLKFLYSDEVQIGPETVMTTLYTAKKYAVPALEAHCVEFLKKNLRADNAFMLLTQARLFDEPQLASLCLENIDKNTADAITAEGFTDIDLDTLVAVLERDTLGIREVRLFNAVVRWSEAECQRQQLQVTPENRRKVLGKALGLIRFPLMTIEEFAAGPAQSGILVDREVVSLFLHFTVNPKPRVEFIDRPRCCLRGKECSINRFQQVESRWGYSGTSDRIRFSVNKRIFVVGFGLYGSIHGPTDYQVNIQIIHTDSNTVLGQNDTGFSCDGSASTFRVMFKEPVEVLPNVNYTACATLKGPDSHYGTKGLRKVTHESPTTGAKTCFTFCYAAGNNNGTSVEDGQIPEVIFYT

SEQ ID NO: 5145 - DNA, 934 bp, Homo sapiens
tatttataaacacactcacagggccagatttgggccacgggccatagttgccagcccggctttaactgctggtcctcacgttagtctcactgcctcctgcagggtgggcatgtgggtgtcgtgttcacgcagccccttcctccaccccacagacacgctggtggctgtcctggagcgcgacacactgggcatccgtgaggtgcggctgttcaatgccgttgtccgctggtccgaggccgagtgtcagcggcagcagctgcaggtgacgccagagaacaggcggaaggttctgggcaaggccctgggcctcattcgcttcccgctcatgaccatcgaggagttcgctgcaggtaacagagctcgggctcaggggctggtttgggaggggagtggcacacaggtgggcatctgggtaccgaggatagtgcccccgagttcactgcggaaagcctggcagatgcctggcatatacagataggaagaaacctggcttgtgaggacgcgtccacagggccatctgttagccccggcccggctctgtccccaccgtgcacactgccagaccccgcctctcgtgtctgtccagctgttttggtggcatcttcccaggagggaagggagtccccgtctcgcgcccttgtgctacctgctggtgcaggtaccagtgtctgtgacgagctcaggagggctctgacatggccggggtggctgtcatgcgcccgagtgggccttggggtcccctgctgcagggcctgggttccagggtgacgtgaaggggcagcgctaacgatgcctcctgccctcgtggctgctcactgcctgacgccatccagctctggagcaaaacaggcctggaactttccagaaggggctgggacagagccctggggctggtgcacactcgccgtctggccttccccaggtccacgcggcc

SEQ ID NO: 5146 - DNA, 1549 bp, Homo sapiens
gctggcggggcccggacagaagatggtgcagaagaaaccagccgaacttcagggtttccaccgttcgttcaaggggcagaaccccttcgagctggccttctccctagaccagcccgaccacggagactctgactttggcctgcagtgctcagcccgccctgacatgcccgccagccagcccattgacatcccggacgccaagaagaggggcaagaagaagaagcgcggccgggccaccgacagcttctcgggcaggtttgaagacgtctaccagctgcaggaagatgtgctgggggagggcgctcatgcccgagtgcagacctgcatcaacctgatcaccagccaggagtacgccgtcaagatcattgagaagcagccaggccacattcggagcagggttttcagggaggtggagatgctgtaccagtgccagggacacaggaacgtcctagagctgattgagttcttcgaggaggaggaccgcttctacctggtgtttgagaagatgcggggaggctccatcctgagccacatccacaagcgccggcacttcaacgagctggaggccagcgtggtggtgcaggacgtggccagcgccttggactttctgcataacaaaggcatcgcccacagggacctaaagccggaaaacatcctctgtgagcaccccaaccaggtctcccccgtgaagatctgtgacttcgacctgggcagcggcatcaaactcaacggggactgctcccctatctccaccccggagctgctcactccgtgcggctcggcggagtacatggccccggagttagtggaggccttcagcgaggaggctagcatctacgacaagcgctgcgacctgtggagcctgggcgtcatcttgtatatcctactcagcggctacccgcccttcgtgggccgctgtggcagcgactgcggctgggaccgcggcgaggcctgccctgcctgccagaacatgctgtttgagagcatccaggagggcaagtacgagttccccgacaaggactgggcccacatctcctgcgctgccaaagacctcatctccaagctgctggtccgtgacgccaagcagaggctgagtgccgcccaagtcctgcaacacccctgggttcaggggtgcgccccggagaacaccttgcccactcccatggtcctgcagaggtgggacagtcacttcctcctccctccccacccctgtcgcatccacgtgcgacctggaggactggtcagaaccgttactgtgaatgagtgaagatcctggaggaccctggccccaggccagctcccatcgctgggggacggtgaacggccatgtgttaatgttacgatgtttttaaaagacaaaaaaaaaaaaaaaacctcaaaagtttttttaaagtgggggaaaaacatccaagcactttaattccaatgtaccaggtgaactgacggagctcagaagttttcctttacaccaactgtcaatgccggaattttgtattctgttttgtaaagatttaataaaagtcaaaaaacttgcaaaaaaaaaaaaaaa

SEQ ID NO: 5147 - protein, 414 aa, Homo sapiens
MVQKKPAELQGFHRSFKGQNPFELAFSLDQPDHGDSDFGLQCSARPDMPASQPIDIPDAKKRGKKKKRGRATDSFSGRFEDVYQLQEDVLGEGAHARVQTCINLITSQEYAVKIIEKQPGHIRSRVFREVEMLYQCQGHRNVLELIEFFEEEDRFYLVFEKMRGGSILSHIHKRRHFNELEASVVVQDVASALDFLHNKGIAHRDLKPENILCEHPNQVSPVKICDFDLGSGIKLNGDCSPISTPELLTPCGSAEYMAPELVEAFSEEASIYDKRCDLWSLGVILYILLSGYPPFVGRCGSDCGWDRGEACPACQNMLFESIQEGKYEFPDKDWAHISCAAKDLISKLLVRDAKQRLSAAQVLQHPWVQGCAPENTLPTPMVLQRWDSHFLLPPHPCRIHVRPGGLVRTVTVNE

SEQ ID NO: 5148 - DNA, 4950 bp, Homo sapiens
ccaagcctgagtgttaatttaactctatgttgtccgccgtgtaaacatccgaggtcatttgttgcgttgaattatctgaccatccttttttactgtgactcttcccattctctttggcaagaagtccccttctcgcccccaaaccagcaagggactcccccacctgggtctgtgccctgccccgcgctgggggccgagtccttgaatgtggcttcaggggctcctgtcctgacggttgcgtccgggggaggggaaggaagggccgctgtcgccaaggttttctctcccagaacccacagtgggccgccgcgatggccctcaagatggtgaagggcagcatcgaccgcatgttcgacaagaatctgcaggacttggtccgcggcatccgtaaccacaaggaggacgaggcaaaatacatatctcagtgcattgatgagatcaagcaggagctgaagcaggacaacatagcggtgaaggcgaacgcggtctgcaagctgacgtatttacagatgttgggatacgacatcagctgggccgccttcaacatcatagaagtgatgagtgcctccaagttcaccttcaagcgaattggctacctcgctgcttcccagagctttcacgaaggcaccgacgtcatcatgctgaccaccaatcagatccgtaaggacttgagcagccccagccagtacgacacaggtgttgcactgacgggtctgtcctgcttcgtcaccccagaccttgccagagacctggcaaatgacatcatgacactgatgtcacacaccaagccctacatcaggaagaaggctgtgctgatcatgtacaaggtgttcctgaagtaccccgagtcgctgcgccctgcctttccccggctgaaggagaagctggaggaccccgaccccggggttcagtcggctgccgtcaatgtcatctgcgagctggccagacgcaaccctaagaactacctgtccctggccccgctctttttcaagctgatgacgtcctccaccaacaactgggtcctcatcaagatcatcaagctgttcggtgctcttactcctttggaaccgcggctgggcaagaagctgatcgagcccctcaccaatctcatccacagcacgtctgccatgtctctcctctatgaatgtgtgaacaccgtgattgcagtgctcatctcgctgtcctccggcatgcccaaccacagcgccagcatccagctttgtgttcagaaattaaggatattgatcgaggactccgatcagaacttgaagtacctggggctgctggcaatgtccaagatcctgaagacccaccccaagtccgtgcagtcccacaaggacctcatcctgcagtgcctggacgacaaggacgagtccatccggctgcgggccctggacctgctctatgggatggtgtccaagaagaacctgatggagatcgtgaagaagctgatgacccacgtagacaaggcagagggtaccacctaccgtgacgagctgctcaccaagatcattgacatctgcagccagtccaactaccagtacatcaccaacttcgagtggtacatcagcatcctggtggagctgacccggctggagggcacacggcacggccacctcatcgccgcccaaatgctggacgtggccatccgcgtgaaggccatccgcaagttcgccgtgtcccagatgtctgcgctgcttgacagtgcacacctgctggccagcagcacccagcggaacgggatctgtgaggtgctgtacgctgccgcctggatctgcggggagttctcagagcatctgcaggaaccacaccacactttggaggccatgctgcggcccagagtcaccacgctgccaggccacatccaggccgtgtatgtgcagaacgtggtcaagctctacgcctccatcctgcagcagaaggagcaggccggggaggcagagggcgctcaggccgtcacccagctcatggtggaccggctgccccagtttgtgcagagcgcagacctggaggtgcaggagcgggcgtcctgcatcctgcagctggtcaagcacatccagaagcttcaggccaaggacgtgcctgtggcagaggaggtcagcgctctctttgctggggagctgaacccagtggcccccaaggcccagaagaaggttccagtccccgaaggcctggacctggacgcctggatcaatgagccactctcggacagcgagtcagaggacgagaggcccagggccgtcttccacgaggaggagcagcggcgtcccaagcaccggccgtcggaggcggacgaggaggagctggctcggcgccgagaggcccggaagcaggagcaggccaacaaccccttctacatcaagagctcgccatcgccacagaagcggtaccaggacaccccgggcgtggagcacattcccgtggtgcagattgacctctccgtccccttgaaggttccagggctgcctatgtcagatcagtatgtgaagctggaggaggagcggcggcaccggcagaagctggagaaggacaagaggaggaaaaagaggaaggagaaggagaagaagggcaagcgccgccacagctcgctgcccacggagagcgacgaggacatcgcccctgcccagcaggtggacatcgtcacagaggagatgcctgagaatgctctgcccagcgacgaggatgacaaagaccccaacgacccctacagggctctggatattgacctggataagcccttagccgacagcgagaaactgcctattcagaaacacagaaacaccgagacctcaaaatcccctgagaaggacgttcccatggtagaaaagaagagcaagaaacccaagaagaaagagaaaaaacacaaagagaaagagagagacaaggagaagaagaaggagaaggagaagaagaaatctcccaagcctaagaagaagaaacacaggaaggagaaggaggagcggaccaaaggcaagaagaagtccaagaagcagcctccaggcagcgaggaggcagcgggggagccggtgcagaatggcgcgccagaggaggagcagctcccgcctgagtccagctactccctcctcgctgaaaattcctatgttaaaatgacctgtgacatccggggcagtctgcaggaggacagccaggtcactgtggccatcgtgctggagaacaggagcagcagcatcctcaagggcatggagctcagcgtgctggactcactcaatgccaggatggcccggccgcagggctcctccgtccacgatggcgtccccgtgcctttccagctgcccccaggcgtctccaacgaagcccagtatgtgttcaccatccagagcatcgtcatggcgcagaagctcaaggggaccctgtccttcattgccaagaatgacgagggtgcgacccacgagaagctggacttcaggctgcacttcagctgcagctcctacttgatcaccactccctgctacagtgacgcctttgctaagttgctggagtctggggacttgagcatgagctcaatcaaagtcgatggcattcggatgtccttccagaatcttctggcgaagatctgttttcaccaccatttttccgttgtggagcgagtggactcctgcgcctccatgtacagccgctccatccagggccaccatgtctgcctcctggtgaaaaagggtgagaactctgtctcagtcgacgggaagtgcagtgactccacgctactgagcaacttgttagaagagatgaaggcgacgctggccaagtgttgagagctgcctgcgagccccgcaccaccccgcggagcacgtacccagggaccgcagccctgacgtgtctcgcctctcctcagtcgtgtgtactgtacccaagcctgagtgttaatttaactctatgttgtccgccgtgtagacatccgaggtcatttgttgcgttgaattatctgaccatccttttttactgtgactcttcccattctctttggcaagaagtccccttctcgcccccaaaccagcaagggactcccccacctgggtctgtgccctgccccgcgctgggggccgagtccttgaatgtggcttcaggggctcctgtcctgggccagggcctgatgggcaccacgtgaggggcacttggtggacagggcggggctgacgtggcctcctctggggtcgcctgcttttgacccaaaggtcctgacggttgcgtccgggggaggggaaggaagggccgctgtcgccaaggttttctctcccagaacccacagtgggaaagcggtcttgccaggcgttgtccattgtcagtgtgctcgtgggctggtgactgggtcttgggatcccaggccacgcgccagccaggctgtgggcagggcggggccagggacgccaaagagaggttgcagtcagaaccgtggacggggtgggttgaggcctctctgccacccgtcttcctggtcagcagaagtgcatctcggcttgggtttggggtggtccgcatcccctgcttgccactatgcgcaccaaggtttccccacatccttcccagcacccttaggaaggcccaggcagggcctggaagcagcggacctgggctgttctgtgttgaaggagtgtgcccagtgcccttgggcaggacctgtgagagccacctcacaggcagagcccccaccaggcagggcaaggagactccgctcactccccacggccagcgtgggcacaggactgacccttcttcagagataatgacattttatcttctccttttgatgaaaactgtcactttagcatgtaatccattacagaatcccatgcagtgattccaggatttgaaattgtatgatgtgttacataagaatttatttgctatcgacattcccgtataaagagagagacatatcacgctgctgtcatgattttgtgtcaagatgatccaataaagttgtaaaacagg

SEQ ID NO: 5149 - protein, 1153 aa, Homo sapiens
MALKMVKGSIDRMFDKNLQDLVRGIRNHKEDEAKYISQCIDEIKQELKQDNIAVKANAVCKLTYLQMLGYDISWAAFNIIEVMSASKFTFKRIGYLAASQSFHEGTDVIMLTTNQIRKDLSSPSQYDTGVALTGLSCFVTPDLARDLANDIMTLMSHTKPYIRKKAVLIMYKVFLKYPESLRPAFPRLKEKLEDPDPGVQSAAVNVICELARRNPKNYLSLAPLFFKLMTSSTNNWVLIKIIKLFGALTPLEPRLGKKLIEPLTNLIHSTSAMSLLYECVNTVIAVLISLSSGMPNHSASIQLCVQKLRILIEDSDQNLKYLGLLAMSKILKTHPKSVQSHKDLILQCLDDKDESIRLRALDLLYGMVSKKNLMEIVKKLMTHVDKAEGTTYRDELLTKIIDICSQSNYQYITNFEWYISILVELTRLEGTRHGHLIAAQMLDVAIRVKAIRKFAVSQMSALLDSAHLLASSTQRNGICEVLYAAAWICGEFSEHLQEPHHTLEAMLRPRVTTLPGHIQAVYVQNVVKLYASILQQKEQAGEAEGAQAVTQLMVDRLPQFVQSADLEVQERASCILQLVKHIQKLQAKDVPVAEEVSALFAGELNPVAPKAQKKVPVPEGLDLDAWINEPLSDSESEDERPRAVFHEEEQRRPKHRPSEADEEELARRREARKQEQANNPFYIKSSPSPQKRYQDTPGVEHIPVVQIDLSVPLKVPGLPMSDQYVKLEEERRHRQKLEKDKRRKKRKEKEKKGKRRHSSLPTESDEDIAPAQQVDIVTEEMPENALPSDEDDKDPNDPYRALDIDLDKPLADSEKLPIQKHRNTETSKSPEKDVPMVEKKSKKPKKKEKKHKEKERDKEKKKEKEKKKSPKPKKKKHRKEKEERTKGKKKSKKQPPGSEEAAGEPVQNGAPEEEQLPPESSYSLLAENSYVKMTCDIRGSLQEDSQVTVAIVLENRSSSILKGMELSVLDSLNARMARPQGSSVHDGVPVPFQLPPGVSNEAQYVFTIQSIVMAQKLKGTLSFIAKNDEGATHEKLDFRLHFSCSSYLITTPCYSDAFAKLLESGDLSMSSIKVDGIRMSFQNLLAKICFHHHFSVVERVDSCASMYSRSIQGHHVCLLVKKGENSVSVDGKCSDSTLLSNLLEEMKATLAKC

SEQ ID NO: 5150 - DNA, 5709 bp, Homo sapiens
gcggccgtccactggactcctgcgccatatcctgcagcaggtctacaaccactcggtgaccgaccccgagaagctcaacaactacgagcccttctcccccgaggtgtacggggagacctccttcgacctggtggcccagatgattgatgagatcaagatgaccgacgacgacctgtttgtggacttggggagcggtgtgggccaggtcgtgctccaggttgctgctgccaccaactgcaaacatcactatggcgtcgagaaagcagacatcccggccaagtatgcggagaccatggaccgcgagttcaggaagtggatgaaatggtatggaaaaaagcatgcagaatacacattggagagaggcgatttcctctcagaagagtggagggagcgaatcgccaacacgagtgttatatttgtgaataattttgcctttggtcctgaggtggatcaccagctgaaggagcggtttgcaaacatgaaggaaggtggcagaatcgtgtcctcgaaaccctttgcacctctgaacttcagaataaacagtagaaacttgagtgacatcggcaccatcatgcgcgtggtggagctctcgcccctgaagggctcggtgtcgtggacggggaagccagtctcctactacctgcacactatcgaccgcaccatacttgaaaactatttttctagtctgaaaaacccaaaactcagggaggaacaggaggcagcccggcgccgccagcagcgcgagagcaagagcaacgcggccacgcccactaagggcccagagggcaaggtggccggccccgccgacgcccccatggactctggtgctgaggaagagaaggcgggagcagccaccgtgaagaagccgtctccctccaaagcccgcaagaagaagctaaacaagaaggggaggaagatggctggccgcaagcgcgggcgccccaagaagatgaacactgcgaaccccgagcggaagcccaagaagaaccaaactgcactggatgccctgcacgctcagaccgtgtctcagacggcggcctcctcaccccaggatgcctacagatcccctcacagcccgttctaccagctacctccgagcgtgcagcggcactcccccaacccgctgctggtggcgcccaccccgcccgcgctgcagaagcttctagagtccttcaagatccagtacctgcagttcctggcatacacaaagaccccccagtacaaggccagcctgcaggagctgctgggccaggagaaggagaagaacgcccagctcctgggtgcggctcagcagctcctcagccactgccaggcccagaaggaggagatcaggaggctgtttcagcaaaaattggatgagctgggtgtgaaggcgctgacctacaacgacctgattcaagcgcagaaggagatctccgcccataaccagcagctgcgggagcagtcggagcagctggagcaggacaaccgcgcgctccgcggccagagcttgcagctgctcaaggctcgctgcgaggagctgcagctggactgggccacgctgtcgctggagaagctgttgaaggagaagcaggccctgaagagccagatctcggagaagcagaggcactgcctggagctgcagatcagcattgtggagctagagaagagccagcggcagcaggagctcctgcagctcaagtcctgtgtgccgcctgacgacgccctgtccctgcacctgcgtgggaagggcgccctgggccgcgagctggagcctgacgccagccggctgcacctggagctggactgcaccaagttctcgctgcctcacttgagcagcatgagcccggagctctccatgaacggccaggctgctggctatgagctctgcggtgtgctgagccggccttcgtcgaagcagaacacgccccagtacctggcctcacccctggaccaggaggtggtgccctgtacccctagccacgtcggccggccgcgcctggagaagctgtctggcctagccgcacccgactacactaggctgtccccggccaagattgtgctgaggcggcacctgagccaggaccacacggtgcccggcaggccggctgccagtgagctgcattcgagagctgagcacaccaaggagaacggccttccctaccagagccccagcgtgcctggcagcatgaagctgagccctcaggacccgcggcccctgtcccctggggccttgcagcttgctggagagaagagcagtgagaagggcctgagagagcgcgcctacggcagcagcggggagctcatcaccagcctgcccatcagcatcccgctcagcaccgtgcagcccaacaagctcccggtcagcattcccctggccagcgtggtgctgcccagccgcgccgagagggcgaggagcacccccagtcccgtgctgcagccccgtgacccctcgtccacacttgaaaagcagattggtgctaatgcccacggtgctgggagcagaagccttgccctggcccccgcaggcttctcctacgctggctcggtggccatcagcggggccttggcgggcagcccggcctctctcacacctggagccgagccggccaccttggatgagtcctccagctctgggagcctttttgccaccgtggggtcccgcagctccacgccacagcaccccctgctgctggcacagccccggaactcgcttcctgcctctcccgcccaccagctctcctccagtccccggcttggtggggccgcccagggcccgttgcccgaggccagcaagggagacctgccctccgattccggcttctcagatcctgagagtgaagccaagaggaggattgtgttcaccatcaccactggtgcgggcagtgccaagcagtcgccctccagcaagcacagccccctgaccgccagcgcccgtggggactgtgtgccgagccacgggcaggacagtcgcaggcgcggccggcggaagcgagcatctgcggggacgcccagcttgagcgcaggcgtgtcccccaagcgccgagccctgccgtccgtcgctggccttttcacacagccttcggggtctcccctcaacctcaactccatggtcagtaacatcaaccagcccctggagattacagccatctcgtccccggagacctccctgaagagctcccctgtgccctaccaggaccacgaccagccccccgtgctcaagaaggagcggcctctgagccagaccaatggggcacactactccccactcacctcagacgaggagccaggctctgaggacgagcccagcagtgctcgaattgagagaaaaattgcaacaatctccttagaaagcaaatctcccccgaaaaccttggaaaatggtggtggcttggcgggaaggaagcccgcgcccgccggcgagccagtcaatagcagcaagtggaagtccaccttctcgcccatctccgacatcggcctggccaagtcggcggacagcccgctgcaggccagctccgccctcagccagaactccctgttcacgttccggcccgccctggaggagccctctgccgatgccaagctggccgctcaccccaggaaaggctttcccggctccctgtcgggggctgacggactcagcccgggcaccaaccctgccaacggctgcaccttcggcgggggcctggccgcggacctgagtttacacagcttcagtgatggtgcttctcttccccacaagggccccgaggcggccggcctgagctccccgctgagcttcccctcgcagcgcggcaaggagggctcggacgccaaccctttcctgagcaagaggcagctggacggcctggctgggctgaagggcgagggcagccgcggcaaggaggcaggggagggcggcctaccgctgtgcgggcccacggacaagaccccactgctgagcggcaaggccgccaaggcccgggaccgcgaggtcgacctcaagaatggccacaacctcttcatctctgcggcggccgtgcctcccggaagcctcctcagcggccccggcctggccccggcggcgtcctccgcaggcggcgcggcgtcctccgcccagacgcaccggtccttcctgggccccttcccgccgggaccgcagttcgcgctcggccccatgtccctgcaggccaacctcggctccgtggccggctcctccgtgctgcagtcgctgttcagctctgtgccggccgccgcaggcctggtgcacgtgtcgtccgctgccaccagactgaccaactcgcacgccatgggcagcttttccggggtggcaggcggcacagttggaggtaactaggatttctacctcaaccgcgagacctatgcaaggacggtgtggaccaactcgcgcccgcggcatggtgcccgccggcctgccgggctcccacccctggacggcagaggcaaggacggacgggagctccactgtgaatcggcggcacgcgccgcaggaggctgggactggtccagtttgtactgtcgatagttttagataaagtatttatcattttttaaaaagtataaacaattctgacttattttattccatctaagtggtaaaaggcaacttattgagaaatataaatatctatatatgagagctctatataaagacacgtgtctgcagggcgggcccgccagcggattcgccacagcctgccccggtgctatctcgtccccaggcccgcgcctgcctccacccgcttggtgctgactagacgctgacaacgccgaaccccgttctcggaaacgccgcccggccggctcccccgacgcgctgctcccgtaccaaaggcaggcccgtcgccaccacattcctcggaggcctccccgcggcctgagccccttcctgagcgccctggcgcctgccctgagctcttcacctttaccccggcactgtgaacccccagactgttcaccctccggggcgtgggttgcgcccttgcatgtgaaggggcctgcgcggtgacgcagctggccatgtgctgcgcgatggtgctgtgaggacggcgcgggcacgttgaacaagtgcatttacttttgtatttctcggctgtccatggctcgcagcatgccctgcgatgcggggcaggcctgtcgtgggtcccttggtgtttctgtacaggagagagtcacactaatgagtggcagtattttatagagatgtgatgagaatttataaatttcatagatttgacagcttttatttttagatggtataatgcacagtgaagaggaaagaaaagcgaggggaaaaaaccttatttattcaaacagtgcacaaaatggccccagcgtcagccccgaccctagacccctcagttgcagctcccagcagcccagacagagctgccggcgcccctgcctgccccacatcccttcctgtcagggccacgcctggcacccatcccttggagcctgtgctggttctcccagctgctgtgggtgtgctggggccagggtgcactgctgaaacctggcctctctggccctaggccccagggtgacgtcggccccccactctgcagccttggcgggtgcctgggactgggtgtggaaggagaggagctgaggccggggtgtagcaggcaggcagggccactccagtgcttctggagccctgagcagtcagggcctgggttgtctgagcagtggtggctctgtgccctccctggaggatgggatctggga

SEQ ID NO: 5151 - protein, 1592 aa, Homo sapiens
MIDEIKMTDDDLFVDLGSGVGQVVLQVAAATNCKHHYGVEKADIPAKYAETMDREFRKWMKWYGKKHAEYTLERGDFLSEEWRERIANTSVIFVNNFAFGPEVDHQLKERFANMKEGGRIVSSKPFAPLNFRINSRNLSDIGTIMRVVELSPLKGSVSWTGKPVSYYLHTIDRTILENYFSSLKNPKLREEQEAARRRQQRESKSNAATPTKGPEGKVAGPADAPMDSGAEEEKAGAATVKKPSPSKARKKKLNKKGRKMAGRKRGRPKKMNTANPERKPKKNQTALDALHAQTVSQTAASSPQDAYRSPHSPFYQLPPSVQRHSPNPLLVAPTPPALQKLLESFKIQYLQFLAYTKTPQYKASLQELLGQEKEKNAQLLGAAQQLLSHCQAQKEEIRRLFQQKLDELGVKALTYNDLIQAQKEISAHNQQLREQSEQLEQDNRALRGQSLQLLKARCEELQLDWATLSLEKLLKEKQALKSQISEKQRHCLELQISIVELEKSQRQQELLQLKSCVPPDDALSLHLRGKGALGRELEPDASRLHLELDCTKFSLPHLSSMSPELSMNGQAAGYELCGVLSRPSSKQNTPQYLASPLDQEVVPCTPSHVGRPRLEKLSGLAAPDYTRLSPAKIVLRRHLSQDHTVPGRPAASELHSRAEHTKENGLPYQSPSVPGSMKLSPQDPRPLSPGALQLAGEKSSEKGLRERAYGSSGELITSLPISIPLSTVQPNKLPVSIPLASVVLPSRAERARSTPSPVLQPRDPSSTLEKQIGANAHGAGSRSLALAPAGFSYAGSVAISGALAGSPASLTPGAEPATLDESSSSGSLFATVGSRSSTPQHPLLLAQPRNSLPASPAHQLSSSPRLGGAAQGPLPEASKGDLPSDSGFSDPESEAKRRIVFTITTGAGSAKQSPSSKHSPLTASARGDCVPSHGQDSRRRGRRKRASAGTPSLSAGVSPKRRALPSVAGLFTQPSGSPLNLNSMVSNINQPLEITAISSPETSLKSSPVPYQDHDQPPVLKKERPLSQTNGAHYSPLTSDEEPGSEDEPSSARIERKIATISLESKSPPKTLENGGGLAGRKPAPAGEPVNSSKWKSTFSPISDIGLAKSADSPLQASSALSQNSLFTFRPALEEPSADAKLAAHPRKGFPGSLSGADGLSPGTNPANGCTFGGGLAADLSLHSFSDGASLPHKGPEAAGLSSPLSFPSQRGKEGSDANPFLSKRQLDGLAGLKGEGSRGKEAGEGGLPLCGPTDKTPLLSGKAAKARDREVDLKNGHNLFISAAAVPPGSLLSGPGLAPAASSAGGAASSAQTHRSFLGPFPPGPQFALGPMSLQANLGSVAGSSVLQSLFSSVPAAAGLVHVSSAATRLTNSHAMGSFSGVAGGTVGGVFNHAVPSASAHPFGARVGRGAACGSATLGPSPLQAAASASASSFQAPASVETRPPPPPPPPPPPLPPPAHLGRSPAGPPVLHAPPPPNAALPPPPTLLASNPEPALLQSLASLPPNQAFLPPTSAASLPPANASLSIKLTSLPHKGARPSFTVHHQPLPRLALAQAAPGIPQASATGPSAVWVSLGMPPPYAAHLSGVKPR

SEQ ID NO: 5152 - DNA, 1645 bp, Homo sapiens
ggcacgaggctttctttgcccgccgttcgccaaacgaagtcgtggaggtggcgaaacgaggaggagataacgcggccttgggctctggtgtctcccagtctgctaaagccctaaggccatcaccatggacttccagcatcgccccgggggcaagaccgggagcgggggcgtggcctcctcctccgagagcaaccgtgaccgcagggagcgcctccggcagctggccctggagaccatcgacatcaacaaggacccgtacttcatgaagaaccacctgggctcctatgaatgcaaactctgcctgacacttcacaacaatgaggggagctacctggcacatacgcaggggaagaagcaccagaccaacctggcccggcgagcagccaaggaggccaaggaggcccctgcccagcccgcgcctgagaaggtcaaggtggaggtgaagaagtttgtgaagatcggccgcccgggctacaaagtgaccaagcagagagactcggagatgggccagcagagcctcctcttccagattgactaccctgagatcgccgagggcatcatgccacgtcaccgcttcatgtctgcgtacgagcagaggatcgagcctccggaccggcgctggcagtacctgctcatggccgccgagccctacgagaccattgccttcaaggtgccgagcagagagatcgacaaggcggagggcaagttctggacacactggaaccgggagaccaagcagttcttcctccagttccactttaagatggagaagcccccggctccacccagcctccctgctggcccccctggggtgaagcggcctccacccccgctgatgaacggtctgccccctcggccaccgctgcctgagtctttgccaccgcccccgccaggaggcctgcctctgccacccatgccccccacagggcctgcgccctcagggcccccgggaccaccccagctacccccgccagctccaggggtccaccccccggccccagtggtgcatccccctgcatctggggtccatcccccagctcctggcgtccaccccccagctcctggcgtccatcccccagcccctggggtccacccaccaacctctggggtccaccccccagctcctggagtccaccctccagcccccggggttcacccaccagcccccggagtccacccaccagcccctggggttcacccaccagccccaggggtccatcctcccccatcagcgggggttcacccccaggccccgggggtgcacccagcagcccccgccgttcaccctcaggccccaggggtgcacccaccagccccagggatgcaccctcaggccccgggggtccacccccaacctcccggggtccatccgtcggctcctggggtccaccctcagcctccgggagttcacccctcaaatcctggggtgcaccccccaactcccatgcccccaatgctgaggcccccacttccctccgaaggcccagggaacatacctccccctcccccaaccaactgagaagctgctccctcccccagcaagcccagcgccaggtgctcttgccttttcccactgagagaaggctgctcttttgtactgccccccgctcattaaacagcctcccccaaaaaaaaaaaaaaaaaa

SEQ ID NO: 5153 - protein, 464 aa, Homo sapiens
MDFQHRPGGKTGSGGVASSSESNRDRRERLRQLALETIDINKDPYFMKNHLGSYECKLCLTLHNNEGSYLAHTQGKKHQTNLARRAAKEAKEAPAQPAPEKVKVEVKKFVKIGRPGYKVTKQRDSEMGQQSLLFQIDYPEIAEGIMPRHRFMSAYEQRIEPPDRRWQYLLMAAEPYETIAFKVPSREIDKAEGKFWTHWNRETKQFFLQFHFKMEKPPAPPSLPAGPPGVKRPPPPLMNGLPPRPPLPESLPPPPPGGLPLPPMPPTGPAPSGPPGPPQLPPPAPGVHPPAPVVHPPASGVHPPAPGVHPPAPGVHPPAPGVHPPTSGVHPPAPGVHPPAPGVHPPAPGVHPPAPGVHPPAPGVHPPPSAGVHPQAPGVHPAAPAVHPQAPGVHPPAPGMHPQAPGVHPQPPGVHPSAPGVHPQPPGVHPSNPGVHPPTPMPPMLRPPLPSEGPGNIPPPPPTN

SEQ ID NO: 5154 - DNA, 986 bp, Homo sapiens
tgcgaacggcgagcagcggcggcggcgcggagagacgcagcggaggttttcctggtttcggaccccagcggccggatggtgaaatcctccctgcagcggatcctcaatagccactgcttcgccagagagaaggaaggggataaacccagcgccaccatccacgccagccgcaccatgccgctccttagcctgcacagccgcggcggcagcagcagtgagagttccagggtctccctccactgctgtagtaacccgggtccggggcctcggtggtgctcctgatgcccctcacccacccctgaagatcccaggtgggcgagggaatagtcagagggatcacaatctttcagctaacttattctactccgatgatcggctgaatgtaacagaggaactaacgtccaacgacaagacgaggattctcaacgtccagtccaggctcacagacgccaaacgcattaactggcgaacagtgctgagtggcggcagcctctacatcgagatcccgggcggcgcgctgcccgaggggagcaaggacagctttgcagttctcctggagttcgctgaggagcagctgcgagccgaccatgtcttcatttgcttccacaagaaccgcgaggacagagccgccttgctccgaaccttcagctttttgggctttgagattgtgagaccggggcatccccttgtccccaagagacccgacgcttgcttcatggcctacacgttcgagagagagtcttcgggagaggaggaggagtagggccgcctcggggctgggcatccggcccctggggccaccccttgtcagccgggtgggtaggaaccgtagactcgctcatctcgcctgggtttgtccgcatgttgtaatcgtgcaaataaacgctcactccgaattagcggtgtatttcttgaagtttaatattgtgtttgtgatactgaagtatttgctttaattctaaataaaaatttatattttacttttt

SEQ ID NO: 5155 - DNA, 763 bp, Homo sapiens
accattctgatgttggagcggcctcggtccggttgactttgcggacatggagggcggcttcggctccgatttcgggggctccggcagcgggaagctggacccagggctcataatggagcaggtgaaagtgcagatcgccgtggccaacgcgcaggagctgctgcagaggatgacggacaagtgtttccggaagtgtatagggaaacctgggggctccctggacaactccgagcagaagtgcatcgccatgtgcatggaccgctacatggacgcctggaacaccgtgtctcgcgcctacaactcgcggctgcagcgggaacgagccaacatgtgaccggcgagcgcgggccaccccaccctgttcatttccataaacgtgctttgagaggcggggtccgcatgtacgtactgcctgcccggggcttaggagggtggcaccggtgctgggacacacgggactgtgtcctcgccaccccccgccctgccccctgccagccagtgcagcttggatctcgggggtgtggggccctgtgccttcctgaagtgctggcagcccagtggcacctccttcaggcctttggggtattcccctagtgtgcccaagtcagcctcatattctgggcggacagcttgtctggacttcggagttgggggtggtcagacaccacaggagctgtcacctcctgcggatgggcaaataaattggtggaggacggaaaaaaaaaaaaaaaaaaaaaaaaaaaaaaaaaaaaaaaaaaaaaaa

SEQ ID NO: 5156 - protein, 95 aa, Homo sapiens
MEGGFGSDFGGSGSGKLDPGLIMEQVKVQIAVANAQELLQRMTDKCFRKCIGKPGGSLDNSEQKCIAMCMDRYMDAWNTVSRAYNSRLQRERANM

SEQ ID NO: 5157 - DNA, 1665 bp, Homo sapiens
ggcacgaggcctcgtgccgttttaatggatatttatttttttacattggtcagtacacaggtcaggagctcacgccagggccttgaggacaggctgaccctcctccccggggtggcgtggggctggggcaccctccgacggcagagcctccttcagaaagtgcagctcaagtcttaaagacaccaaaactgagccatgggcacgcgccgtctccgggccatggcgttcactgcagggcgggggcggcaccgctcccctgtgactgcatcccgcctccctggggacctgcctgtggcaggaaggaatggggggccccagccccaggccgggaaggagccagcggccgacaaagcagaaacacccgctgctccacgtagcccctgctcgctgtccttgctctcagaagtcccggtcccatgtagatagaggggggcgcatcttaccaaagcatttcctcctggaggctacgccgctgtgctcccagtcaggcggctggtagggagctttgcctgccccggggataccctctgccagccgctggaagtgggaatgctggcgacagactgtgtcctctttcccaccttcatagcaggaatcacccggacccgactggctgggcttcgtgctagcgagggttctgggggtgggtcttggtgatcttgtcctatggggagtctgcagtggtctcagccacatcctatgtattttggctctggaggagcaaagctgtatcctggagttggtctgtgatttgccgacagccttgcaggctgggctcagggacaaagtcccccccaaaacccgcaggtcctcatgtccagacgctgcccagtcctgtcctgaaaacagcacgccccaggcccacagaaccccccaccctacatttgccttgggtggagctgggggtggtcctaggactgcgggtgcccttagctgaagggggtggggagaagcgtggactgggcagcctgtgggtaattggaggttcattgagaattgagtctttggaaacactaagaaaatcaaatttttaaaagttatttatggcctgggaaacaatttgcatttgtccccaaatacgcttagctgtgtgccgcttagaacgatgcgaaaccatccctctgtgtaagcccgtgccgtgtgactcgaagcctagcgccctccctgcgaagcatcagacgccacccagccctggggggaggcccacgcctgctggaccaacgcgggttctggggtgcacagcgccaggttaacgctgaagcctgccccgctgagcccaggagccgggaggcctgcgggctgacccagaatccgatcatgcacctgtcctcatgccagcggctttggctggggttggtctgaagcctgcacgcggcagttctttgttaaagatctgagggactcctcagtcctggggcgtcgccgcctgcagcctcttccaagccctgcgtccagcgagcgtcacagcacaacctgcaaaaacggagctgggctgcagctggggctggcatggactttcatttcagagattcggtttttaagaagatgcatgcctaatgtgttcttttttttttccaatgatttgtaatatacattttatgactggaaacttttttgtacaacactccaataaacattttgattttaaaaaaaaaaaaaaaaaaa

SEQ ID NO: 5158 - protein, 68 aa, Homo sapiens
MAFTAGRGRHRSPVTASRLPGDLPVAGRNGGPQPQAGKEPAADKAETPAAPRSPCSLSLLSEVPVPCR

SEQ ID NO: 5159 - DNA, 1359 bp, Homo sapiens
cgtcggactaccgttggtttccgcaacttcctggattatcctcgccaaggactttgcaatatatttttccgccttttctggaaggatttcgctgcttcccgaaggtcttggacgagcgctctagctctgtgggaaggttttgggctctctggctcggattttgcaatttctccctggggactgccgtggagccgcatccactgtggattataattgcaacatgacgctggaagagctcgtggcgtgcgacaacgcggcgcagaagatgcagacggtgaccgccgcggtggaggagcttttggtggccgctcagcgccaggatcgcctcacagtgggggtgtacgagtcggccaagttgatgaatgtggacccagacagcgtggtcctctgcctcttggccattgacgaggaggaggaggatgacatcgccctgcaaatccacttcacgctcatccagtccttctgctgtgacaacgacatcaacatcgtgcgggtgtcgggcatgcagcgcctggcgcagctcctgggagagccggccgagacccagggcaccaccgaggcccgagacctgcattgtctcctggtcacgaaccctcacacggacgcctggaagagccacggcttggtggaggtggccagctactgcgaagaaagccggggcaacaaccagtgggtcccctacatctctcttcaggaacgctgaggcccttcccagcagcagaatctgttgagttgctgccacaaacaaaaaatacaataaatatttgaaccccctcccccccagcacaacccccccaaaacaacccaacccacgaggaccatcgggggcagagtcgttggagactgaagaggaagaggaggaggagaaggggagtgagcggccgcccccagggcggagatccaggagctggcggccgccgatccgatggagaaggggggacccaggccagcaggagacaggacccccgaagctgaggccttgggatggagcagaagccggagtggcggggcacgctgccgccttccccatcacggagggtccagactgtccactcgggggtggagtgagactgactgcaagccccaccctccttgagactggagctggcgtctgcatacgagagacttggttgaacttggttggtccttgtctgcaccctcgacaagaccacactttgggacttgggagctggggctgaagttgctctgtacccatgaactcccagtttgcgaattatagagacaatctattttgttacttgcacttgttattcgaaccactgagagcgagatgggaagcatagatatctatatttttatttctactatgagggccttgtaataaatttctaaagcctc

SEQ ID NO: 5160 - DNA, 1423 bp, Homo sapiens
gggcaggggcgtgggcggggcgtggaccagccgcgccgagcggggcctctccgggccgcgtctgtggggtcgagactgcgcggccgttgggcgtgcagcggcgccagtcggcggacgaggggcccccgggagttgctggactgagacatgagcctccaactgtgtggttgggctcggtagcacatcgtgggacttgggtgtgcgcccacagatggtttggccctgcagtgaccagagcagcccaagccgccaccatggtgaaattgctagtggccaaaatcctgtgcatggtgggcgtgttcttcttcatgctgctcggctccctgctccccgtgaagatcatcgagacagattttgagaaggcccatcgctcgaaaaagatcctctctctctgcaacacctttggaggaggggtgtttctggccacgtgcttcaacgctctgctgcccgctgtgagggaaaagctccagaaggtcctgagcctcggccacatcagcaccgactacccgctggccgaaaccatcctcctgctgggcttcttcatgaccgtcttcctggagcagctgatcctgaccttccgcaaggagaagccgtccttcatcgacctggagaccttcaacgccggatcggacgtgggcagcgactcggagtatgagagccccttcatggggggcgcgcggggccacgcgctgtacgtggagccccacggccacggccccagcctgagcgtgcagggcctctcgcgcgccagccccgtgcgcctgctcagcctggccttcgcgctgtcggcccactcggtctttgagggcctggccctgggcctgcaggaggagggggagaaagtggtgagcctgttcgtgggggtggccgtccacgagacactggtggccgtggccctgggcatcagcatggcccggagtgccatgcccctgcgggacgcggccaagctggcggtcaccgtaagcgccatgatccccctgggcatcggcctgggcctgggcattgagagcgcccagggcgtgccgggcagcgtggcgtccgtgctgctgcagggcctggcgggcggcaccttcctcttcatcaccttcctggagatcctggccaaggagctggaggagaagagtgaccgtctgctcaaggtcctcttcctggtgctgggctacaccgtcctggccgggatggtcttcctcaagtggtgagcggcctcgccattgtccctgccgccggagcccgccgggagccccgggccggacacaggccgcgtcccccggccgcgcgtcccccaagagcgagcactgtggccctgggccaccacctgtgcacaaggggcctcccgggaccaggctgtgcccccgatcctacaccctgagcctcagagcactgctactttttaaaatacttctttctcttaaaagtctttacc

SEQ ID NO: 5161 - DNA, 2294 bp, Homo sapiens
gggcgtcgcgccctggggccggggccgggcggcaccgcggtgcgcaagcgcaaccgtcggtgggtcggggatcggtcgcctgagaggtatcacctcttctgggctcaagatggacaacaagaagcgcctggcctacgccatcatccagttcctgcatgaccagctccggcacgggggcctctcgtccgatgctcaggagagcttggaagtcgccatccagtgcctggagactgcgtttggggtgacggtagaagacagtgaccttgcgctccctcagactctgccggagatatttgaagcggctgccacgggcaaggagatgccgcaggacctgaggagccccgcgcgaaccccgccttccgaggaggactcagcagaggcagagcgcctcaaaaccgaaggaaacgagcagatgaaagtggaaaactttgaagctgccgtgcatttctacggaaaagccatcgagctcaacccagccaacgccgtctatttctgcaacagagccgcagcctacagcaaactcggcaactacgcaggcgcggtgcaggactgtgagcgggccatctgcattgacccggcctacagcaaggcctacggcaggatgggcctggcgctctccagcctcaacaagcacgtggaggccgtggcttactacaagaaggctctggagctggaccccgacaacgagacatacaagtccaacctcaagatagcggagctgaagctgcgggaggcccccagccccacgggaggcgtgggcagcttcgacatcgccggcctgctgaacaaccctggcttcatgagcatggcttcgaacctaatgaacaatccccagattcagcagctcatgtccggcatgatttcgggtggcaacaaccccttgggaactcccggcaccagcccctcgcagaacgacctggccagcctcatccaggcgggccagcagtttgcccagcagatgcagcagcagaacccagagttgatagagcagctcaggagccagatccggagtcggacgcccagcgccagcaacgacgaccagcaggagtgacgctgcctgctcccggtgtgaccgcgtccttccctggccgacccgaaggaagccttctggttgtctgccacttcctcctgttggactgcctgagagaggggaagagagagacctcggacctgcatgtcaagatggattttccccttttatctctgccctcctccactccctttttgtaactcccttacagcccccagacccttcttgaaacgagagccagcaagctgagcacagaccagcagcgacctcccttccagcccccagaaagctcggtcacttgagtgttttctagaatcctggggtgctcccgggccgctctcagagaagtggcaggtttcacgttcagccgtgtggcggatcgtgtggcttccaaagccttttacagcccccgccccccatcccgtggtctgtctgcaggaactctcccgtctgtgagaagcctctttccgagtcgacctcccggccaccccggccctgtgcctgctcggaagagctcactgccagctgcggcctgggcaccgcgggccatgtgtgtttgcatgaggaactctttagtggcagacacctaagagacggctgcggtcaccccacgcctccgcggctcaggagccgtcctgggtgcataggaccagtttctgtgacttttctccagttgggcatgttgacagacatgtttcccctcctcccaccctcattttctggtcctcgcgactgagagccaggggcgacatcatgaccttctgtcccggccgccttagccccgggcacagggaaggcagctgggccgtttctgtctgtgtcccatcctgctgtccttctgtcctggatgtttcatgggcccggggccccccagggaagcttacccctcctgtgctgggtggaggccacgggacacctcaggtgccacccaccttggccctaaaacagccaccaggaaagcagccggagagccggacagcaggcagcctgtctgggttcctgaggcctgggggtggcagacgagcccacggcgccgtggtcccagcagcagggttgtcagtcggagcatcctggggctccctggctcctggccgtctgtgaggtaggcgcagtaccgtgtatcgtaggtagcagtaggaacgggggccgccgcggccctgcagccgctcatggcggtgaggtgtgtgccaagcccacccggggtgcagggcgtgacgtgtggggaataaataggcgttgtgacctctaaaaaaaaaaaaaaaaa

SEQ ID NO: 5162 - protein, 313 aa, Homo sapiens
MDNKKRLAYAIIQFLHDQLRHGGLSSDAQESLEVAIQCLETAFGVTVEDSDLALPQTLPEIFEAAATGKEMPQDLRSPARTPPSEEDSAEAERLKTEGNEQMKVENFEAAVHFYGKAIELNPANAVYFCNRAAAYSKLGNYAGAVQDCERAICIDPAYSKAYGRMGLALSSLNKHVEAVAYYKKALELDPDNETYKSNLKIAELKLREAPSPTGGVGSFDIAGLLNNPGFMSMASNLMNNPQIQQLMSGMISGGNNPLGTPGTSPSQNDLASLIQAGQQFAQQMQQQNPELIEQLRSQIRSRTPSASNDDQQE

SEQ ID NO: 5163 - DNA, 2486 bp, Homo sapiens
gtggcggcggttgggccgaggcaggcggcctcagtggccgaggtggctggacgcgtagcaggtggaaggagggagggagccgcaggcgcagacccacccgccatgaagccccccgcagcctgtgcaggagacatggcggacgcagcatctccgtgctctgtggtaaacgacctgcggtgggacctgagtgcccagcagatagaggagcgcaccagggagctcatcgagcagaccaagcgcgtgtatgaccaggttggcacccaggagtttgaggacgtgtcctacgagagcacgctcaaggcgctggccgatgtggaggtcacctacacagttcagaggaatatccttgacttcccccagcatgtttccccctccaaggacatccggacagccagcacagaggccgacaagaagctctctgagttcgacgtggagatgagcatgagggaggacgtgtaccagaggatcgtgtggctccaggagaaagttcagaaggactcactgaggcccgaggctgcgcggtacctggagcggctaatcaagctgggccggagaaatgggcttcacctccccagagagactcaggaaaacatcaaacgcatcaagaagaagctgagccttctgtgcatcgacttcaacaagaacctgaacgaggacacgaccttcctgcccttcacgctccaggagctaggagggctccccgaggactttctgaactccctggagaagatggaggacggcaagttgaaggtcaccctcaagtacccccattacttccccctcctgaagaaatgccacgtgcctgagaccaggaggaaagtggaggaggccttcaactgccggtgcaaggaggagaactgcgctatcctcaaggagctggtgacgctgcgggcccagaagtcccgcctgctggggttccacacgcacgccgactatgtcctggagatgaacatggccaagaccagccagaccgtggccaccttcctagatgagctggcgcagaagctgaagcccctgggggagcaggagcgtgcggtgattctggagctgaagcgtgcggagtgcgagcgccggggcctgcccttcgacggccgcatccgtgcctgggacatgcgctactacatgaaccaggtggaggagacgcgctactgcgtggaccagaacctgctcaaggagtacttccccgtgcaggtggtcacgcacgggctgctgggcatctaccaggagctcctggggctggccttccaccacgaggagggcgccagtgcctggcatgaggacgtgcggctctacaccgcgagggacgcggcctcgggggaggtggtcggcaagttctacctggacctgtacccgcgggaaggaaagtacgggcacgcggcctgctttggcctgcagcccggctgcctgcggcaggatgggagccgccagatcgccatcgcggccatggtggccaacttcaccaagcccacagccgacgcgccctcgctgctgcagcatgacgaggtggagacctacttccatgagtttggccacgtgatgcaccagctctgctcccaggcggagttcgccatgttcagcgggacccacgtggagcgggactttgtggaggcgccgtcgcagatgctggagaactgggtgtgggagcaggagccgctgctgcggatgtcgcggcactaccgcacaggcagcgccgtgccccgggagctcctggagaagctcattgagtcccggcaggccaacacaggcctcttcaacctgcgccagatcgtcctcgccaaggtggaccaggccctgcacacgcagacggacgcagaccccgccgaggagtatgcgcggctctgccaggagatcctcggggtcccggccacgccaggaaccaacatgcctgcaaccttcggccatctggcaggtggctacgacgcccagtactacgggtacctgtggagcgaggtgtattccatggacatgttccacacgcgcttcaagcaggagggtgtcctgaacagcaaggttggcatggattacagaagctgcatcctgagacccggcggttccgaggatgccagcgccatgctgaggcgcttcctgggccgtgaccccaagcaggacgccttcctcctgagcaaggggctgcaggtcgggggctgcgagcccgagccgcaggtctgctgaggcctggcactgcgactgcccagtctggcctgcgctcccgccgccctggtgccttagcccccggcacaggatggggcaggctctggcacagtgcctgggactggcagggtggctgagcggctgtcttgcctcttgtcattgtctgtccccacccggtcgtggcccacccggctagagacggcgtcctcaaggcatctggagggctttcgtggctgccagggcctggtctttgttgcactaacacgtctcctctctgggaaacgtcccttgtcaggagacggctcttctttgaaatgaggtcattaaaaggaaac

SEQ ID NO: 5164 - protein, 689 aa, Homo sapiens
MKPPAACAGDMADAASPCSVVNDLRWDLSAQQIEERTRELIEQTKRVYDQVGTQEFEDVSYESTLKALADVEVTYTVQRNILDFPQHVSPSKDIRTASTEADKKLSEFDVEMSMREDVYQRIVWLQEKVQKDSLRPEAARYLERLIKLGRRNGLHLPRETQENIKRIKKKLSLLCIDFNKNLNEDTTFLPFTLQELGGLPEDFLNSLEKMEDGKLKVTLKYPHYFPLLKKCHVPETRRKVEEAFNCRCKEENCAILKELVTLRAQKSRLLGFHTHADYVLEMNMAKTSQTVATFLDELAQKLKPLGEQERAVILELKRAECERRGLPFDGRIRAWDMRYYMNQVEETRYCVDQNLLKEYFPVQVVTHGLLGIYQELLGLAFHHEEGASAWHEDVRLYTARDAASGEVVGKFYLDLYPREGKYGHAACFGLQPGCLRQDGSRQIAIAAMVANFTKPTADAPSLLQHDEVETYFHEFGHVMHQLCSQAEFAMFSGTHVERDFVEAPSQMLENWVWEQEPLLRMSRHYRTGSAVPRELLEKLIESRQANTGLFNLRQIVLAKVDQALHTQTDADPAEEYARLCQEILGVPATPGTNMPATFGHLAGGYDAQYYGYLWSEVYSMDMFHTRFKQEGVLNSKVGMDYRSCILRPGGSEDASAMLRRFLGRDPKQDAFLLSKGLQVGGCEPEPQVC

SEQ ID NO: 5165 - DNA, 2270 bp, Homo sapiens
ctggggggcttttcggatcggcaggatgtacccccagggaaggcacccgaccccgctccagtccggccagcccttcaagttctcgatcttggagatctgcgaccgcatcaaagaagaattccagtttcttcaggctcaataccacagcctcaagctagaatgtgagaagctggccagcgagaagacggaaatgcagcgacattatgtcatgtattatgagatgtcgtacgggctcaacattgaaatgcataagcaggcggagattgtgaagcgtctgagcggtatctgcgctcagattatccccttcctgacccaggagcatcagcagcaggtgctccaggccgtagaacgcgccaagcaggtcaccgtgggggagctgaacagcctcatcgggcagcagctccagccgctgtcccaccacgcaccccctgtgcccctcaccccccgcccagccgggctggtgggcggcagtgctacggggctgcttgctctgtctggagccctggctgcccaggctcagctggcggcggctgtcaaggaggaccgtgcgggcgtggaggccgaggggtccagagtggagagagccccgagcaggagtgcatctccctcgccccctgagagtctcgtggaggaggagcgaccgagtggccctggtggtggcgggaagcagagagcagatgagaaggagccatcaggaccttatgaaagcgacgaagacaagagtgattacaatctggtggtggacgaggaccaaccctcagagccccccagcccggctaccaccccctgcggaaaggtacccatctgcattcctgcccgtcgggacctggtggacagtccagcctccttggcctctagccttggctcaccgctgcctagagccaaggagctcatcctgaatgaccttcccgccagcactcctgcctccaaatcctgtgactcctccccgccccaggacgcttccacccccgggcccagctcggccagtcacctctgccagcttgctgccaagccagcaccttccacggacagcgtcgccctgaggagccccctgactctgtccagtcccttcaccacgtccttcagcctgggctcccacagcactctcaacggagacctctccgtgcccagctcctacgtcagcctccacctgtccccccaggtcagcagctctgtggtgtacggacgctcccccgtgatggcatttgagtctcatccccatctccgagggtcatccgtctcttcctccctacccagcatccctgggggaaagccggcctactccttccacgtgtctgcggacgggcagatgcagccggttcccttcccctcggatgcactggtaggcgcgggcatcccgcggcacgcccggcagctgcacacgctggcccatggcgaggtggtctgcgcggtcaccatcagcggctccacacagcatgtgtacacgggcggcaagggctgtgtgaaggtgtgggacgtgggccagcctggggccaagacgcccgtggcccagctcgactgcctgaaccgagacaactacattcgttcctgcaagttgctgccggatggccggagtctgatcgtgggcggtgaggccagcaccttgtccatttgggacctggcggcgcccaccccccgtatcaaggccgagctgacttcctcagccccagcctgctacgccctggccgtcagccccgacgccaaggtttgcttctcctgctgcagcgatggcaacattgtggtctgggacctgcagaatcagactatggtcaggcagttccagggccacacggacggcgccagctgcattgatatttccgattacggcactcggctctggacagggggcctggacaacacggtgcgctgctgggacctgcgggagggccgccagctgcagcagcatgacttcagctcccagattttctccctgggccactgccctaaccaggactggctggcggtcggaatggagagtagcaacgtggagatcctgcacgtccgcaagccggagaaataccagctgcacctccacgagagctgcgtgctgtccctgaagtttgcctcctgcggacggtggtttgtgagcaccgggaaggacaacctgctcaacgcctggaggacgccgtacggggccagcattttccagtccaaggagtcgtcctcagtcctgagttgtgacatctccagaaataacaaatacatcgtgacaggctcgggggacaagaaggccaccgtgtatgaggtggtctactgagacatgacccccc

SEQ ID NO: 5166 - DNA, 1435 bp, Homo sapiens
gccgcactgagccacagccccgggggccgcctcccggggccccttgaggcactgaggcaccgagactggttctccccgagagactcggaaggtggggaacgaggggactgtgtttggggaggtggctttttcgtctgctgttgactgaacactacagcgccctgtggttccgggcttcgcacagctgtcccagggatggatcgcctgtgctgccttcgcccgccgccacaccgggaccctgcacggctgcttctggcctcgacagatgacaaaagaaacagccccaaaatacgaccactccaaccagcagttcccgcctgcctgcccgccactgtcaggcctgccctggcctcctcgtccgcagggctgtctgctggcttctgggggcagaagagcggggagccccgtggaagggtcaggggagaccaggtcagggcagctacatttctggtgatcagccccatggggagacggggctggcgggataccccccccccggcttccccacaccacttctgtctcacccggaagcgtcctttttttgtgccaggtgtctacctaagagggttggtgccagaagccccccatggcgagtgctggggcccggcggtgccctgggggagcagatggggccacccctggcagggccgctacaaccttttccagcagcggagccctctggggggcctgtgcttgtggcatctctgagggcctagattgcacaaggtgacctggccgtggcctgagggtggagtcgcccagcacgcaggccggggcgctgcggggctaagtattaggccttcccagggagggggcgtgccaagcatcccagagccgggctgggaccgccaaaacgtcgtggcctggatcctctgggtctgagtgcctgatcccctgccccccaaaaaagcagaggtaggtgttgcaggcccagggcaggggtgcctgccccaggagagtcccaggcagtggttctcgtgccagtggcacccaggggcaaggacagccaacccccacccttgccacgtgtggggccacgtgggcatgtggggtgtgtgtttttaccttggtgaatctcacctgccaacgatttctcgtgagtgccaatgtcccccagtggtggcagcagatcctgtggccggcctggcggacgggacccagtgatacttgtatattacacagtcctgatttcagacaatttcaaccttaatctatttaaaaaagaatattctatacaagctgtttttaagccttttaccatttgaaatgcatgtgttgtgcgcgttggggatgggaggaggggctgaggagcggctcagtgtcacctcccacagccaccggccctgacccttaatccagacaccgatggaagtcgacttttcatatctttctcctgaaatgaactctgttttaaattggaataaattttgttcct

SEQ ID NO: 5167 - protein, 170 aa, Homo sapiens [sequence omitted]

SEQ ID NO: 5168 - DNA, 1327 bp, Homo sapiens
ggccgcccggcgcccccagcagcccgagccggggcgcacagccggggcgcagcccgcgccccccgccgcgattgacatgatgtttccacaaagcaggcattcgggctcctcgcacctaccccagcaactcaaattcaccacctcggactcctgcgaccgcatcaaagacgaatttcagctactgcaagctcagtaccacagcctcaagctcgaatgtgacaagttggccagtgagaagtcagagatgcagcgtcactatgtgatgtactacgagatgtcctacggcttgaacatcgagatgcacaaacaggctgagatcgtcaaaaggctgaacgggatttgtgcccaggtcctgccctacctctcccaagagcaccagcagcaggtcttgggagccattgagagggccaagcaggtcaccgctcccgagctgaactctatcatccgacagcagctccaagcccaccagctgtcccagctgcaggccctggccctgcccttgaccccactacccgtggggctgcagccgccttcgctgccggcggtcagcgcaggcaccggcctcctctcgctgtccgcgctgggttcccaggcccacctctccaaggaagacaagaacgggcacgatggtgacacccaccaggaggatgatggcgagaagtcggattagcagggggccgggacagggaggttgggaggggggacagaggggagacagaggcacggagagaaaggaatgtttagcacaagacacagcggagctcgggattggctaaactcccatagtatttatggtggccgccggcgggggccccagcccagcttgcaggccacctctagctttcttcctaccccattcccggcttccctcctcctcccctgcagcctggttaggtggatacctgccctgacatgtgaggcaagctaaggcctggagggtcagatgggagaccaggtcccaagggagcaagacctcgcgaagcgcagcagccccggcccttcccccgttttgaacatgtgtaaccgacagtctgcctgggccacagccctctcaccctggtactgcatgcacgcaatgctagctgcccctttcccgtcctgggcaccccgagtctcccccgaccccgggtcccaggtatgctcccacctccacctgccccactcaccacctctgctagttccagacacctccacgcccacctggtcctctcccatcgcccacaaaagggggggcacgagggacgagcttagctgagctgggaggagcagggtgagggtgggcgacccaggattccccctccccttcccaaataaagatgagggtact

SEQ ID NO: 5169 - DNA, 1491 bp, Homo sapiens
atggaccaggactatgagcggcgcctgcttcgccagatcgtcatccagaatgagaacacgatgccacgcgtcacagagatgcggcggaccctgacgcctgccagctccccagtgtcctcgcccagcaagcacggagaccgcttcatcccctccagagccggagccaactggagcgtgaacttccacaggattaacgagaatgagaagtctcccagtcagaaccggaaagccaaggacgccacctcagacaacggcaaagacggcctggcctactctgccctgctcaagaatgagctgctgggtgccggcatcgagaaggtgcaggacccgcagactgaggaccgcaggctgcagccctccacgcctgagaagaagggtctgttcacgtattcccttagcaccaagcgctccagccccgatgacggcaacgatgtgtctccctactccctgtctcccgtcagcaacaagagccagaagctgctccggtccccccggaaacccacccgcaagatctccaagatccccttcaaggtgctggacgcgcccgagctgcaggacgacttctacctcaatctggtggactggtcgtccctcaatgtgctcagcgtggggctaggcacctgcgtgtacctgtggagtgcctgtaccagccaggtgacgcggctctgtgacctctcagtggaaggggactcagtgacctccgtgggctggtctgagcgggggaacctggtggcggtgggcacacacaagggcttcgtgcagatctgggacgcagccgcagggaagaagctgtccatgttggagggccacacggcacgcgtcggggcgctggcctggaatgctgagcagctgtcgtccgggagccgcgaccgcatgatcctgcagagggacatccgcaccccgccactgcagtcggagcggcggctgcagggccaccggcaggaggtgtgcgggctcaagtggtccacagaccaccatctcctcgcctcggggggcaacgacaacaagctgctggtctggaatcactcgagcctgagccccgtgcagcagtacacggagcacctggcggccgtgaaggcaatcgcctggtccccacatcagcacgggctgctggcctcggggggcggcacagctgaccgctgtatccgcttctggaacacgctgacaggacaaccactgcagtgtatcgacacgggctcccaagtgtgcaatctggcctggtccaagcacgccaacgagctggtgagcacgcacggttactcacagaaccagatccttgtctggaagtacccctccctgacccaggtggccaagctgaccgggcactcctaccgcgtgctgtacctggcaatgtcccctgatggggaggccatcgtcactggtgctggagacgagaccctgaggttctggaacgtctttagcaaaacccgttcgacaaaggtaaagtgggagtctgtgtctgtgctcaacctcttcaccaggatccggtaa

SEQ ID NO: 5170 - protein, 496 aa, Homo sapiens
MDQDYERRLLRQIVIQNENTMPRVTEMRRTLTPASSPVSSPSKHGDRFIPSRAGANWSVNFHRINENEKSPSQNRKAKDATSDNGKDGLAYSALLKNELLGAGIEKVQDPQTEDRRLQPSTPEKKGLFTYSLSTKRSSPDDGNDVSPYSLSPVSNKSQKLLRSPRKPTRKISKIPFKVLDAPELQDDFYLNLVDWSSLNVLSVGLGTCVYLWSACTSQVTRLCDLSVEGDSVTSVGWSERGNLVAVGTHKGFVQIWDAAAGKKLSMLEGHTARVGALAWNAEQLSSGSRDRMILQRDIRTPPLQSERRLQGHRQEVCGLKWSTDHHLLASGGNDNKLLVWNHSSLSPVQQYTEHLAAVKAIAWSPHQHGLLASGGGTADRCIRFWNTLTGQPLQCIDTGSQVCNLAWSKHANELVSTHGYSQNQILVWKYPSLTQVAKLTGHSYRVLYLAMSPDGEAIVTGAGDETLRFWNVFSKTRSTKVKWESVSVLNLFTRIR

SEQ ID NO: 5171 - DNA, 1232 bp, Homo sapiens
tttcccgagatcaccaagatgctgggcgccgagtggagcaagctgcagccaacggaaaagcagcggtacctggatgaggccgagagagagaagcagcagtacatgaaggagctgcgggcgtaccagcagtctgaagcctataagatgtgcacggagaagatccaggagaagaagatcaagaaagaagactcgagctctgggctcatgaacactctcctgaatggacacaagggtggggactgcgatggcttctccaccttcgatgttcccatcttcactgaagagttcttggaccaaaacaaagcgcgtgaggcggagcttcggcgcttgcggaagatgaatgtggccttcgaggagcagaacgcggtactgcagaggcaaaacgcagagcatgagcagcgcgcgcgagcgtctggagcaggagctggcgctggaggagcggaggacgctggcgctgcagcagcagctccaggccgtgcgccaggcgctcaccgccagcttcgcctcactgccggtgccgggcacgggcgaaacgcccacgctgggcactctggacttctacatggcccggcttcacggagccatcgagcgcgaccccgcccagcacgagaagctcatcgtccgcatcaaggaaatcctggcccaggtcgccagcgagcacctgtgaggagtgggcgggcccacgatgcagaggagaagctgtgggcgcggccctgccacaccccaccccgtggacgagaggctgggggtccaccctttggggcctggtcccatcctgcacctttgggggctccagcccccctaaaattaaatttctgcagcatccctttagctttcaatctccccagccccctgaacccggaaaaagcactcgctgcgcgatacacccagaagaacctcacagccgagggtgcccctcctcggaggacagccacgcgctacactggctctccgggccacccccaggacacagggcagacgaaacccacccccagcacacggcaggaccccccaaattactcactacggggggctgtgccataggccacacaggaagctgccttgtggggacttacctggggtgtcccccgcatgcctgtaccccagatgggtgggggccggctttgcccatcctgctctcctccagccgagggaccctggtgggggtggctccttctcactgctggatccggactttttaaataaaaacaagtaaaatttgtgttttaaaa

SEQ ID NO: 5172 - protein, 341 aa, Homo sapiens
MLGAEWSKLQPTEKQRYLDEAEREKQQYMKELRAYQQSEAYKMCTEKIQEKKIKKEDSSSGLMNTLLNGHKGGDCDGFSTFDVPIFTEEFLDQNKAREAELRRLRKMNVAFEEQNAVLQRQNAEHEQRARASGAGAGAGGAEDAGAAAAAPGRAPGAHRQLRLTAGAGHGRNAHAGHSGLLHGPASRSHRARPRPAREAHRPHQGNPGPGRQRAPVRSGRAHDAEEKLWARPCHTPPRGREAGGPPFGAWSHPAPLGAPAPLKLNFCSIPLAFNLPSPLNPEKALAARYTQKNLTAEGAPPRRTATRYTGSPGHPQDTGQTKPTPSTRQDPPNYSLRGAVP

SEQ ID NO: 5173 - DNA, 2451 bp, Homo sapiens
gcgccaggcccgctggggcaggtgtcccgtggaaatcgacggaggggctgccgtgggcggccgtgacagtcacagagaggggaagagaaaacagggacggtgacacacacagagagaaggaagagcagacagaggcacagcaggagacccccccaagcccgaggaggacagcctggggatgcagagcacatgccggccccagtggagggaaccgatttccccggagccgggaggcaagcctggggctcccctgccctgtccctgccggtagcccccccagccgtctccccaccatctgtcccgctgccgtcccaccaggtgggagccatgttcctgagcccgggcgaggggccggcaaccgagggtgggggtctggggccgggcgaggaggcccccaagaagaagcaccggaggaaccgcaccaccttcaccacctaccagctgcaccagctggagcgggcgttcgaggcctctcactacccggatgtgtacagccgtgaggagctggcagccaaggtgcacctacctgaggtgcgcgtgcaggtgtggttccagaaccgccgggccaagtggcgccgccaggagcggctggagtcaggctcgggtgccgtggcagctccgagactccccgaggccccagcgctgccgttcgcccgccccccggccatgtcgctgcccctggagccctggttgggccccggaccgccggccgtgccaggcctcccccgcctcctgggcccgggcccggggctgcaagcgtccttcgggcctcatgcctttgctcccaccttcgcagatggcttcgccctggaggaggcgtccctgcggctgctggccaaggaacatgcacaggctctggacagggcctggccgccagcctgagcctgccgccctcccgggccccctcctcggcccaacccgagaaccggggacgtgccctggtgacagccaccacgccttggcctaggccgaggtcatggagcaaccgtggtcaggccaggccaccaccactggggagcgggaccagagagacaggctgctgggttccctgcccccatcccgtctcccaccccatcgccacccgtcctgctggcagcggactggcccccagtgtcaggcaggaggtgacccaagtattctcaggccaggtgcggggacctcctcccctcctggggcctcagtctcctgtctgttaattgggcgtgggggcctccgaggttcgagggctgcgaggctgtgggtggcgggaccgctgactctgtaagatgagtgtaaatctctctgcttctcctaatccccatcagcagagctgcccactctccaggctcccagtcccctggaaataacaaatagcagcagctcccgcgagcctggtctcctctcaccgtgtgctcgccatgtgagcactcccctctccgttgtgccctggacctcgggcacagctgtcagcccattctatagagagggaaaccggggcttaggcaggaagccaggtccccaaagtcgcacggccaggagtggatggagctgcctttcagacccatcaccggtcctaccgtccggggcacagcgacaggttctggagagagggtgggtcccgggccaggtgctggtgggcctccaggtggaggcgggctgatgctgggtgtgtcgtcatcgtcagaccgttcctcacgtccccacagaccccaggccctgtgcatgtccccagtggaggcatggccagcatctgctctgtccaacccagtcgcatcgcccaagagctctgagcaaggaggctgtcgcggggccgagaacccgctgggactggcaagcacggctggcccagtgcagcaggagggggccctgaggcatgggatgggacagtctgggccagcgccacctcccgggacagaagtgcggcaccagggcaggagctgcagtagctaccctccccgtctccagcctgggctccccagatcactcccagatcaccaggtcaccccatctctaggcggcacctcacacaccagtcctgtggtccaacgccccgccatcacccaatgtcaccgcacaccaggcagtggggacacggcagtaagcacaagaaagatttttttttttttaaagctaaaccaggccaggtgcggtggctcatgcctgtaatcccagtgctttgggaggctgaggtgggaggattgcttgagaccagcctgggtgacacagcaagaccccatctccacaaacgtttttaaaatgtgccgggtgtactggtgcacacctgtcatcccagctacccaagaagctgaggcaagaggatcacttgagcccagaaggtcgaggctgcagggagctgtgatcacactgctgcactccagcctgtgcaacagagccagaccctgactcaatacaaataaaaaccaaatctaaaccaaaaaaaaaaaaaaaaaaaaaaaaaaaaaaaaaaaaaaa

SEQ ID NO: 5174 - protein, 184 aa, Homo sapiens
MFLSPGEGPATEGGGLGPGEEAPKKKHRRNRTTFTTYQLHQLERAFEASHYPDVYSREELAAKVHLPEVRVQVWFQNRRAKWRRQERLESGSGAVAAPRLPEAPALPFARPPAMSLPLEPWLGPGPPAVPGLPRLLGPGPGLQASFGPHAFAPTFADGFALEEASLRLLAKEHAQALDRAWPPA

SEQ ID NO: 5175 - DNA, 2131 bp, Homo sapiens
ggccggcggcggcggcggcgcgcggaggagaccgcagtgcggccggcgctaggacccgcgggggcctcccaggccgcggcgcctcccgctttcccccactccccgacccttcttcgcccccaaaatgaggaaacggagcaactcgctccaagttgtgcagccgggaccgcctcggggtgtgcagccggctcgcggaggccctcctgggggcgggcgcggggcgcggctcgggggcgccccctgagcagaaaacaggaagaaccaggctcggtccagtggcacccagctccctacctcctgtgccagccgactggcctgtggcaggccattcccagcgtccccgactgtgaccacttgctcagtgtgcctctcacctgcctcagtttccctctgggggcgatggcggggcgaggctctctggtttcctggcgggcatttcacggctgtgattctgctgaggaacttccccgggtgagcccccgcttcctccgagcctggcacccccctcccgtctcagccaggatgccaacgaggcgctgggccccgggcacccagtgtatcaccaaatgcgagcacacccgccccaagccaggggagctggccttccgcaagggcgacgtggtcaccatcctggaggcctgcgagaacaagagctggtaccgcgtcaagcaccacaccagtggacaggaggggctgctggcagctggggcgctgcgggagcgggaggccctctccgcagaccccaagctcagcctcatgccgtggttccacgggaagatctcgggccaggaggctgtccagcagctgcagcctcccgaggatgggctgttcctggtgcgggagtccgcgcgccaccccggcgactacgtcctgtgcgtgagctttggccgcgacgtcatccactaccgcgtgctgcaccgcgacggccacctcacaatcgatgaggccgtgttcttctgcaacctcatggacatggtggagcattacagcaaggacaagggcgctatctgcaccaagctggtgagaccaaagcggaaacacgggaccaagtcggccgaggaggagctggccagggcgggctggttactgaacctgcagcatttgacattgggagcacagatcggagagggagagtttggagctgtcctgcagggtgagtacctggggcaaaaggtggccgtgaagaatatcaagtgtgatgtgacagcccaggccttcctggacgagacggccgtcatgacgaagatgcaacacgagaacctggtgcgtctcctgggcgtgatcctgcaccaggggctgtacattgtcatggagcacgtgagcaagggcaacctggtgaactttctgcggacccggggtcgagccctcgtgaacaccgctcagctcctgcagttttctctgcacgtggccgagggcatggagtacctggagagcaagaagcttgtgcaccgcgacctggccgcccgcaacatcctggtctcagaggacctggtggccaaggtcagcgactttggcctggccaaagccgagcggaaggggctagactcaagccggctgcccgtcaagtggacggcgcccgaggctctcaaacacgggaagttcaccagcaagtcggatgtctggagttttggggtgctgctctgggaggtcttctcatatggacgggctccgtaccctaaaatgtcactgaaagaggtgtcggaggccgtggagaaggggtaccgcatggaaccccccgagggctgtccaggccccgtgcacgtcctcatgagcagctgctgggaggcagagcccgcccgccggccacccttccgcaaactggccgagaagctggcccgggagctacgcagtgcaggtgccccagcctccgtctcagggcaggacgccgacggctccacctcgccccgaagccaggagccctgaccccacccggtggggcccttggccccagaggaccgagagagtggagagtgcggcgtgggggcactgaccaggcccaaggagggtccaggcgggcaagtcatcctcctggtgcccacagcaggggctggcccacgtagggggctctgggcggcccgtggacaccccagacctgcgaaggatgatcgcccgataaagacggattctaagg

SEQ ID NO: 5176 - DNA, 4978 bp, Homo sapiens
ggaagccgagcctctgccagccctgagctgggaagaagcagctacctcggaggcagggcgcgcaggcgggcggcgatgagagggggcgcagccgcagccccgcgctggggagcccaccgctaaccctgcaccccacccacccctgcacaaaagagctggcgggcgctggccacgtcgccctgggtgaccttcctcggatgcagaatccgcccctgcgagcatcctcttcctcctaggctctgaaggcccggggagcgtgagcgatgcccagctgcacccgggcagggctcgcctttgtttgccagtaaggaggagaggctgtctcagctgcagaggggtcatccctgcttcaagccagtgcctcttcccagctcccatggggaccaccgaagccacgctccggatggaaaacgtggacgtgaaggaggaatggcaggacgaagatcttcccaggccactcccagaagagacgggggtggaactgcttggcagcccggtggaagacacatcctctcctcccaacacgctaaatttcaacggagcgcatcgtaagaggaagacgctggtggccccagagatcaacatttctctggatcagagtgaggggtccctgctgtccgatgacttcttggatacccctgatgacctggatattaacgtggatgacatcgagacccccgatgagaccgactcgctggagttcctggggaatggcaacgaactggagtgggaagacgacacccccgtggccaccgccaagaacatgcccggggacagcgcggatctatttggggacggcacgacggaggacggcagcgccgccaacgggcgcctgtggcggacagtgatcatcggggagcaagagcaccgtatagacctgcacatgatccggccttacatgaaagtggtcacccacggagggtactacggcgaaggcctcaacgccatcatcgtcttcgcagcctgcttccttccagacagcagcctccccgactaccactacatcatggagaacctcttcctgtacgtcatcagcagcttagagctcctggtggctgaggactacatgatcgtgtacctgaacggtgccacgccccggcggaggatgcctggaatcggctggctgaagaagtgctaccagatgatcgaccggaggttgcggaaaaacctgaagtccttgatcatcgtccacccctcgtggttcattcggactgtgctggccatctctcgccctttcatcagcgtcaagttcatcaacaagatccagtacgtgcacagcttggaagacctggagcaactcatccctatggaacacgtccagatcccagactgcgtcctgcaatacgaagaggaaagactgaaggccaggagggagagcgcgaggccccagccggagtttgtgctgcccaggtctgaagagaagccagaggtggcaccagtggaaaacaggtctgctctggtctcagaagatcaggaaacaagcatgtcctgaggcgacgtgagcataacaaaggacatggaagaagattccagatgccagaaaacctctgtcagacgcccactggccccagatctcatcctgcctcatcctgagtcccaatcttccaagggtgccagcccctccgttcatctctgaaacccagcatccttttcagctgcttgaaaacattgtattttttttttttaacgatgcagtatttgtgcgttccagaaaagggcccagctctgagcccctcacccttccacactcacgaactctcagccgaggaaggcaagaagcgcagggggtggcccgcgtggcgtcggtggcctccgctcctgctcgcagcctctgtggtcagagctggatacaagattcaagacccttctcttgcttgtcacccgctccaggttggagccacagacacccaccgccaccccggctgggtctgcgtcctttcctgtgcctttccctccagaatgcggcctcagacctagaagctcaacccccctatgagggccacgtcctggggtagctcctgacctccgaccttatgtccaaatttcacacccatggtttttcatttgacccgcccccttctcgctcataatgacacccagctcctttgagaggatcagagcccattgcacaagaagagccgctgccaaccatccttgtcctccgattgcaaaatgacaccccagtaatctagaacattctcaagcccctttaactcagatgtcaagccaccgggcaaaccccgtcaatacctcccaccaaggaatgagatatgtggacctcactgctcccccaacccagcgtcaggctgggacacgccaacgctgttccgggttggaacagcagaggctcagaaactggctctgaaataggcagacctagcaagaggaagatacagggtatcgggcgtttgagtgtttcagaagtcattcgggaagataaatccagtgcgctggccgcagccacctgcattcaaagcttggaccagcgggttcttgttcgggaggcaaatttccctaggaaaaagaagacagacttttctaatgtggtccaaatgcggatcactggtcagatggactctagaagcactgagctccctgtctctggaagtatttaagaaaaggctgggccaggcacgatggctcacgcctgtaatcccagactttgggaggccgaggcaggcggatcacctgaggtgaggagtttgagaacagcctggccaacatggtgaaacctcatctctactaaaaatacaaaaattagccaggcgtggtggcaggtgcctgtaatcccagctacttgggaggctgaggcatgagaatcacttaaacctgagaggcagaggttacagtgagccaagatcgtgccactgcattccagcctgggcgacagagcaagactctgtctcaaaaaaaataaaaaataatcagggcacagtggctcatgcctgtaatcccagcactctgggaggctgaggtgggtggatcacctgaggtcaggagttcaagaccagcctggtgaacatggcgaaaccccgtctctaataaaaatacaaaaattagccgggcatggtggtgcatgcctgtaatcccagctactcgggaggctgaggcaggagaactgcttgaacccaggaggcagaggttgcagtgatccaagatcatgccactgcactccagcctgggcaacaagagcaaaactccgtctcaaaataaaaagaaaagaaaagaatggacagtgtttgcagagagttgctcacgagtttccctctaatcctaaatgtcttcatgtctatcagtctgagcagacggtgagtagggcgggcacattctccaggcccttcttcctagctctgtggttgacctctcagcaagtgctatccaggctgggccaaccagacccacaattaactgagcctcagtgaaagcgtccagtgcatcttgacctgagacagcaaggaattgcatttggggttattccaacgatgatggcagggaactggtggtatttagtgctgaggggcagtgatacagaaagatttgccctgtgggacagggtcctgcgcgagtcccatccccaaaagccagcagctcctgccatgaggaagacggggtttctgagcaggcttatgcctgcaggttcctgtggagccaccggctgtgacgggacacctctgggtctcagcattgccctggggaggctgggacatttagggacatggtagggttttaacatttgtttcccaaatgtcaaatcccgggcacaggggcaagaccctgtcccgaattcccaccccagtgaatggtgtcgctgccaaagccaacacaagatgacaaaagtggctgggtacggtggctcacgcctataatcccagcactttgggagaccgagacaggtggatcacctgaggtcaggagttcgagaccaggctggccaacatggtgaaaccccatctctactaaaaatacaaaaattagctgggtgtggtggcgcgcacctgtagtcccagctactcaggaggctgaggtagaagaatagctggaacccaggaggcagagattgcagtcagccgagattgcaccactgcactccagcctgggagacagagcaagactgactcaaaagaaaaaaaatgacagaagcctgattatcagactgcccggaggagacaggctccagcagatagatgccagccaggcccagctgccacgatttgtcccaggtgaccaaaggcacgcagctccagcatgaatcgttctaacccaacagtgacaagaactgctgggccttaaccgtcatggaagactggggccgcttccaagtcacagacaggagacggggacaggaaagaactcattccacccaatcggacacctaataattgagtgtctacagcagcaatcaagtgacaagtgaggccctacctgacccagaaggtgcctgccggctaaacattctgcccccaccagaaactccagggggtccgcccgttatgccgtggcccacccacgcccctttggatcaccagcagtcacagacaacaggcaggcgaaactgaagaccccaactcagccccagcggaccctccagagcaaaagaggcccccggcgaggccacctgtcggcaggcatgccgaggtcaaacagccggggccaccgttcccagctgggccacgacctgcaccgtccacagatgggctttgagatggatttgtatcagggtggggggtgtggtttggccaaaatgcaatggaccccgacccctcctcgtaaaaggatgttgggtttccctctggtgacacatgggatgcgtcataaaccctcccccaaagtcctggtcagcagcccatccttccaacgatgagttttgcggtttttcagaacagaaatgatcactacgattgacgacggtcgtgatgttaagacgtcgtctccatgagctttggggggacttttatgtggaataaagaaactatcactg

SEQ ID NO: 5177 - protein, 371 aa, Homo sapiens
MGTTEATLRMENVDVKEEWQDEDLPRPLPEETGVELLGSPVEDTSSPPNTLNFNGAHRKRKTLVAPEINISLDQSEGSLLSDDFLDTPDDLDINVDDIETPDETDSLEFLGNGNELEWEDDTPVATAKNMPGDSADLFGDGTTEDGSAANGRLWRTVIIGEQEHRIDLHMIRPYMKVVTHGGYYGEGLNAIIVFAACFLPDSSLPDYHYIMENLFLYVISSLELLVAEDYMIVYLNGATPRRRMPGIGWLKKCYQMIDRRLRKNLKSLIIVHPSWFIRTVLAISRPFISVKFINKIQYVHSLEDLEQLIPMEHVQIPDCVLQYEEERLKARRESARPQPEFVLPRSEEKPEVAPVENRSALVSEDQETSMS

SEQ ID NO: 5178 - DNA, 3075 bp, Homo sapiens
atggttaattttacggtggatcagatccgcgccatcatggacaagaaggccaacatccgcaacatgtctgtcatcgcccacgtggaccatggcaagtccacgctgacagactccctggtgtgcaaggcgggcatcatcgcctcggcccgggccggggagacacgcttcactgatacccggaaggacgagcaggagcgttgcatcaccatcaagtcaactgccatctccctcttctacgagctctcggagaatgacttgaacttcatcaagcagagcaaggacggtgccggcttcctcatcaacctcattgactcccccgggcatgtcgacttctcctcggaggtgactgctgccctccgagtcaccgatggcgcattggtggtggtggactgcgtgtcaggcgtgtgcgtgcagacggagacagtgctgcggcaggccattgccgagcgcatcaagcctgtgctgatgatgaacaagatggaccgcgccctgctggagctgcagctggagcccgaggagctctaccagactttccagcgcatcgtggagaacgtgaacgtcatcatctccacctacggcgagggcgagagcggccccatgggcaacatcatgatcgatcctgtcctcggtaccgtgggctttgggtctggcctccacgggtgggccttcaccctgaagcagtttgccgagatgtatgtggccaagttcgccgccaagggggagggccagttggggcctgccgagcgggccaagaaagtagaggacatgatgaagaagctgtggggtgacaggtactttgacccagccaacggcaagttcagcaagtcagccaccagccccgaagggaagaagctgccacgcaccttctgccagctgatcctggaccccatcttcaaggtgtttgatgcgatcatgaatttcaagaaagaggagacagcaaaactgatagagaaactggacatcaaactggacagcgaggacaaggacaaagaaggcaaacccctgctgaaggctgtgatgcgccgctggctgcctgccggagacgccttgttgcagatgatcaccatccacctgccctcccctgtgacggcccagaagtaccgctgcgagctcctgtacgaggggcccccggacgacgaggctgccatgggcattaaaagctgtgaccccaaaggccctcttatgatgtatatttccaaaatggtgccaacctccgacaaaggtcggttctacgcctttggacgagtcttctcggggctggtctccactggcctgaaggtcaggatcatggggcccaactatacccctgggaagaaggaggacctctacctgaagccaatccagagaacaatcttgatgatgggccgctacgtggagcccatcgaggatgtgccttgtgggaacattgtgggcctcgtgggcgtggaccagttcctggtgaagacgggcaccatcaccaccttcgagcacgcgcacaacatgcgggtgatgaagttcagcgtcagccctgttgtcagagtggccgtggaggccaagaacccggctgacctgcccaagctggtggaggggctgaagcggctggccaagtccgaccccatggtgcagtgcatcatcgaggagtcgggagagcatatcatcgcgggcgccggcgagctgcacctggagatctgcctgaaggacctggaggaggaccacgcctgcatccccatcaagaaatctgacccggtcgtctcgtaccgcgagacggtcagtgaagagtcgaacgtgctctgcctctccaagtcccccaacaagcacaaccggctgtacatgaaggcgcggcccttccccgacggcctggccgaggacatcgataaaggcgaggtgtccgcccgtcaggagctcaagcagcgggcgcgctacctggccgagaagtacgagtgggacgtggctgaggcccgcaagatctggtgctttgggcccgacggcaccggccccaacatcctcaccgacatcaccaagggtgtgcagtacctcaacgagatcaaggacagtgtggtggccggcttccagtgggccaccaaggagggcgcactgtgtgaggagaacatgcggggtgtgcgcttcgacgtccacgacgtcaccctgcacgccgacgccatccaccgcggagggggccagatcatccccacagcacggcgctgcctctatgccagtgtgctgaccgcccagccacgcctcatggagcccatctaccttgtggagatccagtgtccagagcaggtggtcggtggcatctacggggttttgaacaggaagcggggccacgtgttcgaggagtcccaggtggccggcacccccatgtttgtggtcaaggcctatctgcccgtcaacgagtcctttggcttcaccgctgacctgaggtccaacacgggcggccaggcgttcccccagtgtgtgtttgaccactggcagatcctgcccggagaccccttcgacaacagcagccgccccagccaggtggtggcggagacccgcaagcgcaagggcctgaaagaaggcatccctgccctggacaacttcctggacaaattgtaggcggcccttcctgcagcgcctgccgccccggggactcgcagcacccacagcaccacgtcctcgaattctcagacgacacctggagactgtcccgacacagcgacgctcccctgagaggtttctggggcccgctgcgtgccatcactcaaccataacacttgatgccgtttctttcaatatttatttccagagtccggaggcagcagacacgccctcttagtagggacttaatgggccggtcggggagggggaggcgggatgggacacccaacactttttccatttcttcagagggaaactcagatgtccaaactaattttaacaaacgcattaagaggtttatttgggtacatggcccgcagtggcttttgccccagaaaggggaaaggaacacgcgggtagatgatttctagcaggcaggaagtcctgtgcggtgtcaccatgagcactcagctgtactagtgccattggaataataaatttgataaggtgtgaaaa

SEQ ID NO: 5179 - protein, 858 aa, Homo sapiens
MVNFTVDQIRAIMDKKANIRNMSVIAHVDHGKSTLTDSLVCKAGIIASARAGETRFTDTRKDEQERCITIKSTAISLFYELSENDLNFIKQSKDGAGFLINLIDSPGHVDFSSEVTAALRVTDGALVVVDCVSGVCVQTETVLRQAIAERIKPVLMMNKMDRALLELQLEPEELYQTFQRIVENVNVIISTYGEGESGPMGNIMIDPVLGTVGFGSGLHGWAFTLKQFAEMYVAKFAAKGEGQLGPAERAKKVEDMMKKLWGDRYFDPANGKFSKSATSPEGKKLPRTFCQLILDPIFKVFDAIMNFKKEETAKLIEKLDIKLDSEDKDKEGKPLLKAVMRRWLPAGDALLQMITIHLPSPVTAQKYRCELLYEGPPDDEAAMGIKSCDPKGPLMMYISKMVPTSDKGRFYAFGRVFSGLVSTGLKVRIMGPNYTPGKKEDLYLKPIQRTILMMGRYVEPIEDVPCGNIVGLVGVDQFLVKTGTITTFEHAHNMRVMKFSVSPVVRVAVEAKNPADLPKLVEGLKRLAKSDPMVQCIIEESGEHIIAGAGELHLEICLKDLEEDHACIPIKKSDPVVSYRETVSEESNVLCLSKSPNKHNRLYMKARPFPDGLAEDIDKGEVSARQELKQRARYLAEKYEWDVAEARKIWCFGPDGTGPNILTDITKGVQYLNEIKDSVVAGFQWATKEGALCEENMRGVRFDVHDVTLHADAIHRGGGQIIPTARRCLYASVLTAQPRLMEPIYLVEIQCPEQVVGGIYGVLNRKRGHVFEESQVAGTPMFVVKAYLPVNESFGFTADLRSNTGGQAFPQCVFDHWQILPGDPFDNSSRPSQVVAETRKRKGLKEGIPALDNFLDKL

SEQ ID NO: 5180 - DNA, 1725 bp, Homo sapiens
cccctgcctctcggactcgggctgcggcgtcagccttcttcgggcctcggcagcggtagcggctcgctcgcctcagccccagcgcccctcggctaccctcggcccaggcccgcagcgccgcccgccctcggccgccccgacgccggcctgggccgcggccgcagccccgggctcgcgtaggcgccgaccgctcccggcccgccccctatgggccccggctagaggcgccgccgccgccggcccgcggagccccgatgctggcccggaggaagccggtgctgccggcgctcaccatcaaccctaccatcgccgagggcccatcccctaccagcgagggcgcctccgaggcaaacctggtggacctgcagaagaagctggaggagctggaacttgacgagcagcagaagaagcggctggaagcctttctcacccagaaagccaaggtcggcgaactcaaagacgatgacttcgaaaggatctcagagctgggcgcgggcaacggcggggtggtcaccaaagtccagcacagaccctcgggcctcatcatggccaggaagctgatccaccttgagatcaagccggccatccggaaccagatcatccgcgagctgcaggtcctgcacgaatgcaactcgccgtacatcgtgggcttctacggggccttctacagtgacggggagatcagcatttgcatggaacacatggacggcggctccctggaccaggtgctgaaagaggccaagaggattcccgaggagatcctggggaaagtcagcatcgcggttctccggggcttggcgtacctccgagagaagcaccagatcatgcaccgagatgtgaagccctccaacatcctcgtgaactctagaggggagatcaagctgtgtgacttcggggtgagcggccagctcatcgactccatggccaactccttcgtgggcacgcgctcctacatggctccggagcggttgcagggcacacattactcggtgcagtcggacatctggagcatgggcctgtccctggtggagctggccgtcggaaggtaccccatccccccgcccgacgccaaagagctggaggccatctttggccggcccgtggtcgacggggaagaaggagagcctcacagcatctcgcctcggccgaggccccccgggcgccccgtcagcggtcacgggatggatagccggcctgccatggccatctttgaactcctggactatattgtgaacgagccacctcctaagctgcccaacggtgtgttcacccccgacttccaggagtttgtcaataaatgcctcatcaagaacccagcggagcgggcggacctgaagatgctcacaaaccacaccttcatcaagcggtccgaggtggaagaagtggattttgccggctggttgtgtaaaacctgcggtgaaccagcccggcacacccacgcgcaccgccgtgtgacagtggccgggctccctcggtcccgctggtgacctgcccaccgtccctgtccatgccccgcccttccagctgaggaccgtggcgcctccacccaccctcctgcctcaccctgcggagagcaccgtggcggggcgacagcgcatgcaggaacgggggtctcctctcctgccgtcctggccggggtgcctctggggacgggcgacgctgctgtgtgtggtctcagaggctctgcttccttaggttacaaaacaaaacagggagagaaaaagc

SEQ ID NO: 5181 - DNA, 1638 bp, Homo sapiens
gcttccggcggaagcggcctcaacaagggaaactttattgttcccgtggggcagtcgaggatgtcggtgaattacgcggcggggctgtcgccgtacgcggacaagggcaagtgcggcctcccggagatcttcgaccccccggaggagctggagcggaaggtgtgggaactggcgaggctggtctggcagtcttccagtgtggtgttccacacgggtgccggcatcagcactgcctctggcatccccgacttcaggggtccccacggagtctggaccatggaggagcgaggtctggcccccaagttcgacaccacctttgagagcgcgcggcccacgcagacccacatggcgctggtgcagctggagcgcgtgggcctcctccgcttcctggtcagccagaacgtggacgggctccatgtgcgctcaggcttccccagggacaaactggcagagctccacgggaacatgtttgtggaagaatgtgccaagtgtaagacgcagtacgtccgagacacagtcgtgggcaccatgggcctgaaggccacgggccggctctgcaccgtggctaaggcaagggggctgcgagcctgcaggggagagctgagggacaccatcctagactgggaggactccctgcccgaccgggacctggcactcgccgatgaggccagcaggaacgccgacctgtccatcacgctgggtacatcgctgcagatccggcccagcgggaacctgccgctggctaccaagcgccggggaggccgcctggtcatcgtcaacctgcagcccaccaagcacgaccgccatgctgacctccgcatccatggctacgttgacgaggtcatgacccggctcatggagcacctggggctggagatccccgcctgggacggcccccgtgtgctggagagggcgctgccacccctgccccgcccgcccacccccaagctggagcccaaggaggaatctcccacccggatcaacggctctatccccgccggccccaagcaggagccctgcgcccagcacaacggctcagagcccgccagccccaaacgggagcggcccaccagccctgccccccacagaccccccaaaagggtgaaggccaaggcggtccccagctgaccagggtgcttggggagggtggggctttttgtagaaactgtggattctttttctctcgtggtctcactttgttacttgtttctgtccccgggagcctcagggctctgagagctgtgctccaggccaggggttacacctgccctccgtggtccctccctgggctccaggggcctctggtgcggttccgggaagaagccacaccccagaggtgacagctgagcccctgccacaccccagcctctgacttgctgtgttgtccagaggtgaggctgggccctccctggtctccagcttaaacaggagtgaactccctctgtccccagggcctcccttctgggccccctacagcccaccctacccctcctccatgggccctgcaggaggggagacccaccttgaagtgggggatcagtagaggcttgcactgcctttggggctggagggagacgtgggtccaccaggcttctggaaaagtcctcaatgcaataaaaacaatttctttcttgcaaa

SEQ ID NO: 5182 - protein, 355 aa, Homo sapiens
MSVNYAAGLSPYADKGKCGLPEIFDPPEELERKVWELARLVWQSSSVVFHTGAGISTASGIPDFRGPHGVWTMEERGLAPKFDTTFESARPTQTHMALVQLERVGLLRFLVSQNVDGLHVRSGFPRDKLAELHGNMFVEECAKCKTQYVRDTVVGTMGLKATGRLCTVAKARGLRACRGELRDTILDWEDSLPDRDLALADEASRNADLSITLGTSLQIRPSGNLPLATKRRGGRLVIVNLQPTKHDRHADLRIHGYVDEVMTRLMEHLGLEIPAWDGPRVLERALPPLPRPPTPKLEPKEESPTRINGSIPAGPKQEPCAQHNGSEPASPKRERPTSPAPHRPPKRVKAKAVPS

SEQ ID NO: 5183 - DNA, 1131 bp, Homo sapiens
tccataacctgctgtggctccccattgccaggcagtgtagagttctgaataccttgtgctggaagctgaagcccttcctgccccagccctgaatcacctctccaacttcagcccctcctgctcctgctgcagcccccaaaacacttgcattttctcctaaactcatgggctcttcccagcacccaggcctttgtttaccccttctgtctgatcttccctctcacccttcaagaaactgcttagcctcctccaggaagcccttccacgtgccccagggcccccacctccacggggcttccccaggcccaggtacctcctctgatccaggcttgactcttggggccagaggatctgtgtccacctgtctcccccaagatcaagggcttctggagggcagggcttgggcccatgtgagcatcgtcaggctcattgcagcagcagtgttggttgaatagaataagtcatttttgccttcgtgtgaattcatctctctctctctgcctctccctctctctgtctctctccaattctgtctctgacttgctttgtctttaactctttatctctctgtctgtgtcttgttctatccccctctccctgttcttgcaactcaccctctatttctgtttctgattccctctctctgtctccctgtctctctctgtctcctgattttctctctctccaactttctctctatacctctctgattctccctctgtctctttttctgttcccctctccccgtccatctctcccggcctgccaccttcaggggtccccacggagtctggaccatggaggagcgaggtctggcccccaagttcgacaccacctttgagagcgcgcggcccacgcagacccacatggcgctggtgcagctggagcgcgtgggcctcctccgcttcctggtcagccagaacgtggacgggctccatgtgcgctcaggcctcccttctgggccccctacagcccaccctacccctcctccatgggccctgcaggaggggagacccaccttgaagtgggggatcagtagaggcttgcactgcctttggggctggagggagacgtgggtccaccaggcttctggaaaagtcctcaatgcaataaaaacaatttctttcttgc

SEQ ID NO: 5184 - DNA, 2575 bp, Homo sapiens
caaaaggacagatgcagaggacaggcgccaggcacagataccatctcccttccccaagccagctgcccccaaccctccccctgcccgcaattagtcctctggggcgggagcggggcacagagcagagccctcttgggggaggggaagcccgatccgcacccacccttcctttgcccccctcttccttctgctgctccaatatcaatttcagccagtgacctctccaccaatttgcacatccccactctcccggtccgtttcaccgccagacatcggttccatttcgaccctcactggcggtcattcccaccccctctgctggtcaatttcaccccttttggcggtcaagtgcagtcccccatttcccgggcaatttccccctcccctccttctccctctcccctcccctccccagcagtgtcactcccagctgctccccacctcccgcgctccgcgctcgctgcggccagtctcgggcgtcccggtcagtgtccagctgccgcggcctcggccccggcgactcccgcccccagccccccttccctccgcgggcagcggctccctccctccccagaacagctgaaggtctcagtcacctccgaggggagcgcagggggaggggaggggcgggggacgcggcggaggggaggtgggggagccttgacgctgctgcccgggacgcggcccggggctggtgggaacaggggcgtcctcctgcgcgcccccctccccagcgtcccacctcccggcggcggcggggaaagtctctccgaaagcgtgaagggggattggaggaggtttttatttccctttgtgcgggtggctggggccggatcgaggcggcgggggccgcgggactgggggctccccgctgagccgagaggagcgcgacaaaggatgcgtcccgccggggtcacagtctccgcggcccaactttgcgcgcggcgcccgcgcccctggggagcccgcccgctgcgctgagaacccaggcgtccgggctgggagaggggccgggagcgtccgcaggtggcgctggcccggatctcccgaccccaggaagggatcccggagcttcctggaggcggcgggcggccgtgtcgctccagggaaccgcgctgcccgcggaaactccgcgcgcctccgcggatgcccctcgccctagcccccagcgcgcggggttcggggccctgcgaggtccccccttcccccgcggtgcttcccaagctgggctaaggcgggcttctcttcctccctcctctgtcgcctccttttcctccccctcgttcaccttttccttccctctatccatccagagccccgccaaagggcgcacctgatctttctcatccttccctgctcttcccttcctctccacctcctcctcctccttggggaaaggggcccggagaagggcatgtgggggcccctctgacagtggcccgattggggtgacaggcgcccaaatggccaagtggctacgggactacctgagctttgggggtcggaggccccctccgcagccgcccaccccggactacaccgagagcgacatcctgagggcctaccgcgcgcagaagaacctggacttcgaggacccctatgaggacgcggagagccgcttggagccggaccccgcgggccctggggactccaagaaccccggagatgccaagtatggttctcccaagcaccggctcatcaaggtggaggctgcggatatggccagagccaaggcccttctgggcggccccggggaggagctggaagccgacactgagtatttagacccctttgatgctcagcctcatcctgcacccccggatgatgggtacatggagccctacgatgcccaatgggtcatgagtgaacttcccggcagaggggtgcagctctatgacaccccttatgaggaacaggacccagagacagcagatggacccccttctgggcagaagcctcggcagagccggatgccccaggaagatgaacggccagcagatgagtatgatcagccctgggagtggaagaaagaccacatctccagggcgtttgcagtgcagtttgacagtccagagtgggagaggactccaggctcagccaaggagctccggagacctccgcccagaagcccccagcctgcggagcgtgtggacccagccctgcccctggagaaacagccgtggtttcatggccccctgaacagggcggatgcagagagcctcctgtccctctgcaaggaaggcagctacctagtgcggctcagtgagaccaacccccaggactgctccttgtctctcaggagcagccagggcttcctgcatctgaagttcgcgcggacccgtgagaaccaggtggtgctgggccaacacagcgggcccttccccagcgtgcccgagctcgtcctccactacagttcacgcccactgccggtgcagggtgccgagcatctggctctgctgtaccccgtggtcacgcagaccccctgacagtgaccctcggcccccttttgagtcctcgggcccagaatcgtatcccaaagccctcccatggcctagaaaataaataagttattgtt

SEQ ID NO: 5185 - protein, 340 aa, Homo sapiens
MAKWLRDYLSFGGRRPPPQPPTPDYTESDILRAYRAQKNLDFEDPYEDAESRLEPDPAGPGDSKNPGDAKYGSPKHRLIKVEAADMARAKALLGGPGEELEADTEYLDPFDAQPHPAPPDDGYMEPYDAQWVMSELPGRGVQLYDTPYEEQDPETADGPPSGQKPRQSRMPQEDERPADEYDQPWEWKKDHISRAFAVQFDSPEWERTPGSAKELRRPPPRSPQPAERVDPALPLEKQPWFHGPLNRADAESLLSLCKEGSYLVRLSETNPQDCSLSLRSSQGFLHLKFARTRENQVVLGQHSGPFPSVPELVLHYSSRPLPVQGAEHLALLYPVVTQTP

SEQ ID NO: 5186 - DNA, 1760 bp, Homo sapiens
acccagcgtgcgcggggcccgcgggccgggccggggtgacctgggctgcagccatggaagaacagagggaggccctgaggaagatcatcaaaacactggctgtgaagaatgaagaaattcagagctttatctactccctgaaacagatgctgctgaacgtggaggcgaactcggcgaaggtgcaggaggacctcgaagcagagttccagtccctcttctccctcctggaggagctgaaagaaggcatgcttatgaagataaaacaggaccgtgccagccgcacctacgagctgcagaaccagctggctgcctgcacgcgggccctggagagctccgaggagcttctggagacagccaaccagactctgcaggccatggacagcgaggactttcctcaggctgccaagcaaatcaaagatggagtgaccatggcccctgccttccggctatcattgaaagcgaaggtcagtgacaacatgagtcacctcatggtggacttcgcgcaagagcggcagatgctacaggcactcaagttcctgcctgtgcccagcgcacccgtgatcgacctggctgagtccctggtggcagataactgtgtgaccctggtgtggcgcatgccggatgaggacagcaagattgaccactacgtgctggagtaccggcggaccaacttcgagggcccgccccgcctcaaggaggaccagccctggatggtcatcgagggcatccggcagacagagtacaccctgacaggtctcaagtttgacatgaaatacatgaacttccgtgtgaaggcctgtaacaaggcagttgcaggagagttctctgagccggtgactctggagacaccagcgttcatgttccgcctggatgcgtccacatcccaccagaacctgcgggtggatgatctctccgtggagtgggacgctatgggcgggaaggtgcaggatatcaaggctcgcgagaaagatggcaaggggcggacggcgtctcccatcaactccccagccagaggtactccatctcccaagaggatgccctcaggtcgtgggggacgggaccgcttcaccgctgagtcctacacagttctgggggacacgctgatcgacggcggggagcattactgggaggtgcgctacgagccggacagcaaggcgttcggcgtgggcgtggcctaccgcagcctgggccgcttcgagcaactgggcaagacggccgcctcctggtgcctgcacgtcaacaattggctgcaggtcagcttcacggccaagcacgccaacaaggtcaaggtgctggacgcccccgtgcccgactgcctgggtgtgcactgtgacttccaccaaggcctcctgtccttctacaatgcccgcaccaaacaagtgctgcacactttcaagaccaggttcacacagccgctgctgcctgctttcacggtatggtgtggcagcttccaggtgacgacaggcctgcaggtccccagtgctgtgcgctgcctgcaaaagcgaggcagtgctaccagcagctccaacaccagcctcacctaggcccccaggcacccacccagctggggtgtttttgggggagtcgccgccaagcccaggctgctggagccaggcaccctcctctgtcacttgctgcttggagccttaactccagatgggggggtcaccaagagggagtgggcaccctggcgggccctctccccacctcacctcttaataaaggtcagacactggccaggcaaaaaaaaaaaaaaaaaa

SEQ ID NO: 5187 - protein, 496 aa, Homo sapiens
MEEQREALRKIIKTLAVKNEEIQSFIYSLKQMLLNVEANSAKVQEDLEAEFQSLFSLLEELKEGMLMKIKQDRASRTYELQNQLAACTRALESSEELLETANQTLQAMDSEDFPQAAKQIKDGVTMAPAFRLSLKAKVSDNMSHLMVDFAQERQMLQALKFLPVPSAPVIDLAESLVADNCVTLVWRMPDEDSKIDHYVLEYRRTNFEGPPRLKEDQPWMVIEGIRQTEYTLTGLKFDMKYMNFRVKACNKAVAGEFSEPVTLETPAFMFRLDASTSHQNLRVDDLSVEWDAMGGKVQDIKAREKDGKGRTASPINSPARGTPSPKRMPSGRGGRDRFTAESYTVLGDTLIDGGEHYWEVRYEPDSKAFGVGVAYRSLGRFEQLGKTAASWCLHVNNWLQVSFTAKHANKVKVLDAPVPDCLGVHCDFHQGLLSFYNARTKQVLHTFKTRFTQPLLPAFTVWCGSFQVTTGLQVPSAVRCLQKRGSATSSSNTSLT

SEQ ID NO: 5188 - DNA, 2349 bp, Homo sapiens
gcggcgggcggcagcatgtcggtggcggggctgaagaagcagttctacaaggcgagccagctggtcagtgagaaggtcggaggggccgaggggaccaagctggatgatgacttcaaagagatggagaagaaggtggatgtcaccagcaaggcggtgacagaagtgctggccaggaccatcgagtacctgcagcccaacccagcctcgcgggctaagctgaccatgctcaacacggtgtccaagatccggggccaggtgaagaaccccggctacccgcagtcggaggggcttctgggcgagtgcatgatccgccacgggaaggagctgggcggcgagtccaactttggtgacgcattgctggatgccggcgagtccatgaagcgcctggcagaggtgaaggactccctggacatcgaggtcaagcagaacttcattgaccccctccagaacctgtgcgagaaagacctgaaggagatccagcaccacctgaagaaactggagggccgccgcctggactttgactacaagaagaagcggcagggcaagatccccgatgaggagctacgccaggcgctggagaagttcgaggagtccaaggaggtggcagaaaccagcatgcacaacctcctggagactgacatcgagcaggtgagtcagctctcggccctggtggatgcacagctggactaccaccggcaggccgtgcagatcctggacgagctggcggagaagctcaagcgcaggatgcgggaagcttcctcacgccctaagcgggagtataagcccaagccccgggagccctttgaccttggagagcctgagcagtccaacgggggcttcccctgcaccacagcccccaagatcgcagcttcatcgtctttccgatcttccgacaagcccatccggacccctagccggagcatgccgcccctggaccagccgagctgcaaggcgctgtacgacttcgagcccgagaacgacggggagctgggcttccatgagggcgacgtcatcacgctgaccaaccagatcgatgagaactggtacgagggcatgctggacggccagtcgggcttcttcccgctcagctacgtggaggtgcttgtgcccctgccgcagtgactcacccgtgtccccgccccgcccctccgtccacactggccggcaccccctgctgggtctcctgcattccacggagcccctgctgccagggcggtgtctgagcctgccggcgccacctgggccccggcccttgaggtactccctgagcaggaccccacacttgggtgggggggcttatctgggtgggtggggatgcctgtttacactagcgctgactcccaacggtgacggctcccttccccactccatggcgccagcctcctcccccgctccccaacttctcgcccagctggccgaggcggggcaacactaaggtgctcttagaaacactaatgttcctctggggcagcccccacctccgtcctgacccgacgggggcccggcccactgcctaccctcgagtcccgcagccttaacaggatgggatcgagggtccccatggggtggctcagagataggaccctggttttaaatccctcccagcctggtgctggtgatgggccctggccctactccagggccaatgcacccccgcctcacacacgcactccttctcctcaaggccagggcagagggcctcaccgcctcccgggcctgctgtcagcttgcagcccggggacagaggccagctgggatctgcctgaggacagagaacatggtctcctgcagggccctgcctcccaagccccgccctcagaaagccaagtaccttttcagctttttaactgcccccatcccaacccagggaggcctgtgtcactctggcacaagctgccaccaccagccacccacacccaccccagcacacctcacacgggaccacagccgcgctgccgagggccaagcacaaaggttccagtgagcgcatgtcccagccctggtggccaggctccccttgctgagccgctgccacttcaccctgtgggaagtggccccagccatctcctctagaccaaggcaggcagccccgacatctgcttcctctatcgcccaatgcaaaatcgatgaaatggggagttctctgggccaggccacattcacattcccctccctctgtggtccagtgaagctccggaccccaggctctgctctgccctgccctgcacccccctcgtcagaagtacatgaggggcgcagagatgagcacacagctttgggcacggtccagggcaaactgaaatgtacgcctgaattttgtaaacagaagtattaaatgtctctttctac

SEQ ID NO: 5189 - protein, 368 aa, Homo sapiens
MSVAGLKKQFYKASQLVSEKVGGAEGTKLDDDFKEMEKKVDVTSKAVTEVLARTIEYLQPNPASRAKLTMLNTVSKIRGQVKNPGYPQSEGLLGECMIRHGKELGGESNFGDALLDAGESMKRLAEVKDSLDIEVKQNFIDPLQNLCEKDLKEIQHHLKKLEGRRLDFDYKKKRQGKIPDEELRQALEKFEESKEVAETSMHNLLETDIEQVSQLSALVDAQLDYHRQAVQILDELAEKLKRRMREASSRPKREYKPKPREPFDLGEPEQSNGGFPCTTAPKIAASSSFRSSDKPIRTPSRSMPPLDQPSCKALYDFEPENDGELGFHEGDVITLTNQIDENWYEGMLDGQSGFFPLSYVEVLVPLPQ

SEQ ID NO: 5190 - DNA, 1656 bp, Homo sapiens
ttttcttccgggggctggtctccggcggccccgtccccgactgggccccgtgcccccccgcccccgcggccccccgccgccgggccagccgccaccatgaagaaattctttcaggagttcaaggccgacatcaagttcaagagcgcgggacccggtcagaagctcaaagagtccgtgggggaaaaggcccacaaagagaagcccaaccagccagcccccaggccgccccgccagggacccaccaatgaggcacagatggcagccgctgctgccctagcccggctggagcagaagcagtcccgggcctggggccccacatcgcaggacaccatccgaaaccaggtgagaaaggaacttcaagccgaagccaccgtcagcgggagccccgaggccccagggaccaacgtggtatctgagcccagagaggaaggctctgcccacctggctgtgcctggcgtgtacttcacctgtccgctcactggggccaccctgaggaaggaccagcgggacgcctgcatcaaggaggccattctcttgcacttctccaccgacccagtggccgcctccatcatgaagatctacacgttcaacaaagaccaggaccgggtgaagctgggtgtggacaccattgccaagtacctggacaacatccacctgcaccccgaggaggagaagtaccggaagatcaagctgcagaacaaggtgtttcaggagcgcattaactgcctggaagggacccacgagttttttgaggccattgggttccagaaggtgttgcttcccgcccaggatcaggaggaccccgaggagttctacgtgctgagcgagaccaccttggcccagccccagagcctggagaggcacaaggaacagctgctggctgcggagcccgtgcgcgccaagctggacaggcagcgccgcgtcttccagccctcgcccctggcctcgcagttcgaactgcctggggacttcttcaacctcacagcagaggagatcaagcgggagcagaggctcaggtccgaggcggtggagcggctgagcgtgctgcggaccaaggccatgcgggagaaggaggagcagcgggggctgcgcaagtacaactacacgctgctgcgcgtgcgcctccccgatggctgcctcctgcagggcactttctacgctcgggagcggctgggggcggtgtacgggttcgtccgggaggccctgcagagcgactggctgccttttgagctgctggcctcgggagggcagaagctgtccgaggacgagaacctggccttgaacgagtgcgggctggtgccctctgccctcctgaccttctcgtgggacatggctgtgctggaggacatcaaggccgcgggggccgagccggactccatcctgaaacccgagctcctgtcagccatcgagaagctcttgtgaaataaaagcagggttggcctcagccctgtgggtctgtctcatgctctccctgttcctctccccgccaccccagggcctccaagccacctctggaaatacttggctctgccccatgggcacgggaggggcgccagccgtggagctgtggaattgggccccgtggcagagcccccatcccttgggggctgtggggatgcgcccaagcccccgagggagaggcctggggacaccaac

SEQ ID NO: 5191 - protein, 441 aa, Homo sapiens
MKKFFQEFKADIKFKSAGPGQKLKESVGEKAHKEKPNQPAPRPPRQGPTNEAQMAAAAALARLEQKQSRAWGPTSQDTIRNQVRKELQAEATVSGSPEAPGTNVVSEPREEGSAHLAVPGVYFTCPLTGATLRKDQRDACIKEAILLHFSTDPVAASIMKIYTFNKDQDRVKLGVDTIAKYLDNIHLHPEEEKYRKIKLQNKVFQERINCLEGTHEFFEAIGFQKVLLPAQDQEDPEEFYVLSETTLAQPQSLERHKEQLLAAEPVRAKLDRQRRVFQPSPLASQFELPGDFFNLTAEEIKREQRLRSEAVERLSVLRTKAMREKEEQRGLRKYNYTLLRVRLPDGCLLQGTFYARERLGAVYGFVREALQSDWLPFELLASGGQKLSEDENLALNECGLVPSALLTFSWDMAVLEDIKAAGAEPDSILKPELLSAIEKLL

SEQ ID NO: 5192 - DNA, 877 bp, Homo sapiens
gtctacccgcccctgccctgaggaccctagtccaacatggcggcgcccagcggagggtggaacggcgtcggcgcgagcttgtgggccgcgctgctcctaggggccgtggcgctgaggccggcggaggcggtgtccgagcccacgacggtggcgtttgacgtgcggcccggcggcgtcgtgcattccttctcccataacgtgggcccgggggacaaatatacgtgtatgttcacttacgcctctcaaggagggaccaatgagcaatggcagatgagtctggggaccagcgaagaccaccagcacttcacctgcaccatctggaggccccaggggaagtcctatctgtacttcacacagttcaaggcagaggtgcggggcgctgagattgagtacgccatggcctactctaaagccgcatttgaaagggaaagtgatgtccctctgaaaactgaggaatttgaagtgaccaaaacagcagtggctcacaggcccggggcattcaaagctgagctgtccaagctggtgattgtggccaaggcatcgcgcactgagctgtgaccagcagccctgttgcgggtggcaccttctcatctccggtgaagctgaaggggccctcctggctcccaacagcttctcagttcccacttcctgctgagctcttctggactcaggatcgcagatccggggcacaaagagggtggggaacatgggggctatgctggggaaagcagccatgctccccccgacctccagccgagcatccttcatgagcctgcagaactgctttcctatgtttacccaggggacctcctttcagatgaactgggaagagatgaaatgttttttcatatttaaataaataagaacattaaaaagc

SEQ ID NO: 5193 - protein, 173 aa, Homo sapiens
MAAPSGGWNGVGASLWAALLLGAVALRPAEAVSEPTTVAFDVRPGGVVHSFSHNVGPGDKYTCMFTYASQGGTNEQWQMSLGTSEDHQHFTCTIWRPQGKSYLYFTQFKAEVRGAEIEYAMAYSKAAFERESDVPLKTEEFEVTKTAVAHRPGAFKAELSKLVIVAKASRTEL

SEQ ID NO: 5194 - DNA, 4147 bp, Homo sapiens
aaggtgcctgagccggcgggtcccctgtgtccgccgcggctgtcgtcccccgctcccgccacttccggggtcgcagtcccgggcatggagccgcgaccgtgaggcgccgctggacccgggacgacctgcccagtccggccgccgccccacgtcccggtctgtgtcccacgcctgcagctggaatggaggctctctggaccctttagaaggcacccctgccctcctgaggtcagctgagcggttaatgcggaaggttaagaaactgcgcctggacaaggagaacaccggaagttggagaagcttctcgctgaattccgagggggctgagaggatggccaccaccgggaccccaacggccgaccgaggcgacgcagccgccacagatgacccggccgcccgcttccaggtgcagaagcactcgtgggacgggctccggagcatcatccacggcagccgcaagtactcgggcctcattgtcaacaaggcgccccacgacttccagtttgtgcagaagacggatgagtctgggccccactcccaccgcctctactacctgggaatgccatatggcagccgagagaactccctcctctactctgagattcccaagaaggtccggaaagaggctctgctgctcctgtcctggaagcagatgctggatcatttccaggccacgccccaccatggggtctactctcgggaggaggagctgctgagggagcggaaacgcctgggggtcttcggcatcacctcctacgacttccacagcgagagtggcctcttcctcttccaggccagcaacagcctcttccactgccgcgacggcggcaagaacggcttcatggtgtcccctatgaaaccgctggaaatcaagacccagtgctcagggccccggatggaccccaaaatctgccctgccgaccctgccttcttctccttcatcaataacagcgacctgtgggtggccaacatcgagacaggcgaggagcggcggctgaccttctgccaccaaggtttatccaatgtcctggatgaccccaagtctgcgggtgtggccaccttcgtcatacaggaagagttcgaccgcttcactgggtactggtggtgccccacagcctcctgggaaggttcagagggcctcaagacgctgcgaatcctgtatgaggaagtcgatgagtccgaggtggaggtcattcacgtcccctctcctgcgctagaagaaaggaagacggactcgtatcggtaccccaggacaggcagcaagaatcccaagattgccttgaaactggctgagttccagactgacagccagggcaagatcgtctcgacccaggagaaggagctggtgcagcccttcagctcgctgttcccgaaggtggagtacatcgccagggccgggtggacccgggatggcaaatacgcctgggccatgttcctggaccggccccagcagtggctccagctcgtcctcctccccccggccctgttcatcccgagcacagagaatgaggagcagcggctagcctctgccagagctgtccccaggaatgtccagccgtatgtggtgtacgaggaggtcaccaacgtctggatcaatgttcatgacatcttctatcccttcccccaatcagagggagaggacgagctctgctttctccgcgccaatgaatgcaagaccggcttctgccatttgtacaaagtcaccgccgttttaaaatcccagggctacgattggagtgagcccttcagccccggggaagatgaatttaagtgccccattaaggaagagattgctctgaccagcggtgaatgggaggttttggcgaggcacggctccaagatctgggtcaatgaggagaccaagctggtgtacttccagggcaccaaggacacgccgctggagcaccacctctacgtggtcagctatgaggcggccggcgagatcgtacgcctcaccacgcccggcttctcccatagctgctccatgagccagaacttcgacatgttcgtcagccactacagcagcgtgagcacgccgccctgcgtgcacgtctacaagctgagcggccccgacgacgaccccctgcacaagcagccccgcttctgggctagcatgatggaggcagccagctgccccccggattatgttcctccagagatcttccatttccacacgcgctcggatgtgcggctctacggcatgatctacaagccccacgccttgcagccagggaagaagcaccccaccgtcctctttgtatatggaggcccccaggtgcagctggtgaataactccttcaaaggcatcaagtacttgcggctcaacacactggcctccctgggctacgccgtggttgtgattgacggcaggggctcctgtcagcgagggcttcggttcgaaggggccctgaaaaaccaaatgggccaggtggagatcgaggaccaggtggagggcctgcagttcgtggccgagaagtatggcttcatcgacctgagccgagttgccatccatggctggtcctacgggggcttcctctcgctcatggggctaatccacaagccccaggtgttcaaggtggccatcgcgggtgccccggtcaccgtctggatggcctacgacacagggtacactgagcgctacatggacgtccctgagaacaaccagcacggctatgaggcgggttccgtggccctgcacgtggagaagctgcccaatgagcccaaccgcttgcttatcctccacggcttcctggacgaaaacgtgcactttttccacacaaacttcctcgtctcccaactgatccgagcagggaaaccttaccagctccagatctaccccaacgagagacacagtattcgctgccccgagtcgggcgagcactatgaagtcacgttgctgcactttctacaggaatacctctgagcctgcccaccgggagccgccacatcacagcacaagtggctgcagcctccgcggggaaccaggcgggagggactgagtggcccgcgggccccagtgaggcactttgtcccgcccagcgctggccagccccgaggagccgctgccttcaccgccccgacgccttttatccttttttaaacgctcttgggttttatgtccgctgcttcttggttgccgagacagagagatggtggtctcgggccagcccctcctctccccgccttctgggaggaggaggtcacacgctgatgggcactggagaggccagaagagactcagaggagcgggctgccttccgcctggggctccctgtgacctctcagtcccctggcccggccagccaccgtccccagcacccaagcatgcaattgcctgtcccccccggccagcctccccaacttgatgtttgtgttttgtttggggggatatttttcataattatttaaaagacaggccgggcgcggtggctcacgtctgtaatcccagcactttgggaggctgaggcgggcggatcacctgaggttgggagttcaagaccagcctggccaacatggggaaaccccgtctctactaaaaatacaaaaaattagccgggtgtggtggcgcgtgcctataatcccagctactcgggaggctgaggcaggagaatcgcttgaacccgggaggtggaggttgcggtgagccaagatcgcaccattgcactccagcctgggcaacaagagcgaaactctgtctcaaaataaataaaaaataaaagacagaaagcaaggggtgcctaaatctagacttggggtccacaccgggcagcggggttgcaacccagcacctggtaggctccatttcttcccaagcccgagcagagggtcatgcgggccccacaggagaagcggccagggcccgcggggggcaccacctgtggacagccctcctgtccccaagctttcaggcaggcactgaaacgcaccgaacttccacgctctgctggtcagtggcggctgtcccctccccagcccagccgcccagccacatgtgtctgcctgacccgtacacaccaggggttccggggttgggagctgaaccatccccacctcagggttatatttccctctccccttccctccccgccaagagctctgccaggggcgggcaaaaaaaaaagtaaaaagaaaagaaaaaaaaaaaaaa

SEQ ID NO: 5195 - DNA, 1973 bp, Homo sapiens
ttccaagctggttttgaagtcgcggcagctgttcctgggacgtccggttgaccgcgcgtctgctgcagagaccatgtctgccgacggggcagaggctgatggcagcacccaggtgacagtggaagaaccggtacagcagcccagtgtggtggaccgtgtggccagcatgcctctgatcagctccacctgcgacatggtgtccgcagcctatgcctccaccaaggagagctacccgcacatcaagactgtctgcgacgcagcagagaagggagtgaggaccctcacggcggctgctgtcagcggggctcagccgatcctctccaagctggagccccagattgcatcagccagcgaatacgcccacagggggctggacaagttggaggagaacctccccatcctgcagcagcccacggagaaggtcctggcggacaccaaggagcttgtgtcgtctaaggtgtcgggggcccaagagatggtgtctagcgccaaggacacggtggccacccaattgtcggaggcggtggacgcgacccgcggtgctgtgcagagcggcgtggacaagacaaagtccgtagtgaccggcggcgtccaatcggtcatgggctcccgcttgggccagatggtgttgagtggggtcgacacggtgctggggaagtcggaggagtgggcggacaaccacctgccccttacggatgccgaactggcccgcatcgccacatccctggatggctttgacgtcgcgtccgtgcagcagcagcggcaggaacagagctacttcgtacgtctgggctccctgtcggagaggctgcggcagcacgcctatgagcactcgctgggcaagcttcgagccaccaagcagagggcacaggaggctctgctgcagctgtcgcaggtcctaagcctgatggaaactgtcaagcaaggcgttgatcagaagctggtggaaggccaggagaagctgcaccagatgtggctcagctggaaccagaagcagctccagggccccgagaaggagccgcccaagccagagcaggtcgagtcccgggcgctcaccatgttccgggacattgcccagcaactgcaggccacctgtacctccctggggtccagcattcagggcctccccaccaatgtgaaggaccaggtgcagcaggcccgccgccaggtggaggacctccaggccacgttttccagcatccactccttccaggacctgtccagcagcattctggcccagagccgtgagcgtgtcgccagcgcccgcgaggccctggaccacatggtggaatatgtggcccagaacacacctgtcacgtggctcgtgggaccctttgcccctggaatcactgagaaagccccggaggagaagaagtagggggagaggagaggactcagcgggccccgtctctataatgcagctgtgctctggagtcctcaacccggggctcatttcaaacttattttctagccactcctcccagctcttctgtgctgtccacttgggaagctaaggctctcaaaacgggcatcacccagttgacccatctctcagcctctctgagcttggaagaagcctgttctgagcctcaccctatcagtcagtagagagagatgtccagaaaaaatatctttcaggaaagttctcccctgcagaattttttttccttgttaaatatcaggaatataggccgggtgcggtggctcacacctgtaatcccagcactttgggaggctgaggcgggcggaacacctgaggtcaggtgttcgagaccagccaggccaacatggtgaaaccccgtctctactaaaaatacaaaaaaaaatgagccgggcatggtagcaggtgtctgttatcccagttaggaggctgaggcaagagaatctcttgaacctgagaggcggaggttgcagtgagccaagatcgcgccattgcactccagcctgggggacaagagtgagacttagtctca

SEQ ID NO: 5196 - DNA, 3815 bp, Homo sapiens
cgactccttagagcatggcatggctcagaggtgctggtaaaactgatgggggtttttgctgtccctcccctcagcgccgacaccatgtggatccaggttcggaccatggacgggaggcagacccacacggtggactcgctgtccaggctgaccaaggtggaggagctgaggcggaagatccaggagctgttccacgtggagccaggcctgcagaggctgttctacaggggcaaacagatggaggacggccataccctcttcgactacgaggtccgcctgaatgacaccatccagctcctggtccgccagagcctcgtgctcccccacagcaccaaggagcgggactccgagctctccgacaccgactccggctgctgcctgggccagagtgagtcagacaagtcctccacccacggtgaggcggccgccgagactgacagcaggccagccgatgaggacatgtgggatgagacggaattggggctgtacaaggtcaatgagtacgtcgatgctcgggacacgaacatgggggcgtggtttgaggcgcaggtggtcagggtgacgcggaaggccccctcccgggacgagccctgcagctccacgtccaggccggcgctggaggaggacgtcatttaccacgtgaaatacgacgactacccggagaacggcgtggtccagatgaactccagggacgtccgagcgcgcgcccgcaccatcatcaagtggcaggacctggaggtgggccaggtggtcatgctcaactacaaccccgacaaccccaaggagcggggcttctggtacgacgcggagatctccaggaagcgcgagaccaggacggcgcgggaactctacgccaacgtggtgctgggggatgattctctgaacgactgtcggatcatcttcgtggacgaagtcttcaagattgagcggccgggtgaagggagccccatggttgacaaccccatgagacggaagagcgggccgtcctgcaagcactgcaaggacgacgtgaacagactctgccgggtctgcgcctgccacctgtgcgggggccggcaggaccccgacaagcagctcatgtgcgatgagtgcgacatggccttccacatctactgcctggacccgcccctcagcagtgttcccagcgaggacgagtggtactgccctgagtgccggaatgatgccagcgaggtggtactggcgggagagcggctgagagagagcaagaagaaggcgaagatggcctcggccacatcgtcctcacagcgggactggggcaagggcatggcctgtgtgggccgcaccaaggaatgtaccatcgtcccgtccaaccactacggacccatcccggggatccccgtgggcaccatgtggcggttccgagtccaggtcagcgagtcgggtgtccatcggccccacgtggctggcatacacggccggagcaacgacggagcgtactccctagtcctggcggggggctatgaggatgatgtggaccatgggaattttttcacatacacgggtagtggtggtcgagatctttccggcaacaagaggaccgcggaacagtcttgtgatcagaaactcaccaacaccaacagggcgctggctctcaactgctttgctcccatcaatgaccaagaaggggccgaggccaaggactggcggtcggggaagccggtcagggtggtgcgcaatgtcaagggtggcaagaatagcaagtacgcccccgctgagggcaaccgctacgatggcatctacaaggttgtgaaatactggcccgagaaggggaagtccgggtttctcgtgtggcgctaccttctgcggagggacgatgatgagcctggcccttggacgaaggaggggaaggaccggatcaagaagctggggctgaccatgcagtatccagaaggctacctggaagccctggccaaccgagagcgagagaaggagaacagcaagagggaggaggaggagcagcaggaggggggcttcgcgtcccccaggacgggcaagggcaagtggaagcggaagtcggcaggaggtggcccgagcaggggccgggtccccgcgccggacatccaagaaaaccaaggtggagccctacagtctcacggcccagcagagcagcctcatcagagaggacaagagcaacgccaagctgtggaatgaggtcctggcgtcactcaaggaccggccggcgagcggcagcccgttccagttgttcctgagtaaagtggaggagacgttccagtgtatctgctgtcaggagctggtgttccggcccatcacgaccgtgtgccagcacaacgtgtgcaaggactgcctggacagatcctttcgggcacaggtgttcagctgccctgcctgccgctacgacctgggccgcagctatgccatgcaggtgaaccagcctctgcagaccgtcctcaaccagctcttccccggctacggcaatggccggtgatctccaagcacttctcgacaggcgttttgctgaaaacgtgtcggagggctcgttcatcggcactgattttgttcttagtgggcttaacttaaacaggtagtgtttcctccgttccctaaaaaggtttgtcttcctttttttttttatttttatttttcaaatctatacattttcaggaatttatgtattctggctaaaagttggacttctcagtattgtgtttagttctttgaaaacataaaagcctgcaatttctcgacaaaacaacacaagattttttaaagatggaatcagaaactacgtggtgtggaggctgttgatgtttctggtgtcaagttctcagaagttgctgccaccaactctttaagaaggcgacaggatcagtccttctctcgggttctggcccccaaggtcagagcaagcatcttcctgacagcattttgtcatctaaagtccagtgacatggttccccgtggtggcccgtggcagcccgtggcatggcgtggctcagctgtctgttgaagttgttgcaaggaaaagaggaaacatctcgggcctagttcaaacctttgcctcaaagccatcccccaccagactgcttagcgtctgagatccgcgtgaaaagtcctctgcccacgagagcagggagttggggccacgcagaaatggcctcaaggggactctgctccacgtggggccaggcgtgtgactgacgctgtccgacgaaggcggccacggacggacgccagcacacgaagtcacgtgcaagtgcctttgattcgttccttctttctaaagacgacagtctttgttgttagcactgaattattgaaaatgtcaaccagattctagaaactgcggtcatccagttcttcctgacaccggatgggtgcttgggaaccgtttgagccttatagatcatttacattcaatttttttaactcagcaagtgagaacttacaagagggtttttttaaaatttttttttctcttaatgaacacattttctaaatgaattttttttgtagttactgtatatgtaccaagaaagatataacgttagggtttggttgtttttgtttttgtattttttttcttttgaaagggtttgttaatttttctaattttaccaaagtttgcagcctatacctcaataaaacagggatattttaaatcacatacctgcagacaaactggagcaatgttatttttaaagggtttttttcacctccttattcttagattattaatgtattagggaagaatgagacaattttgtgtaggctttttctaaagtccagtactttgtccagattttagattctcagaataaatgtttttcacagat

SEQ ID NO: 5197 - DNA, 5592 bp, Homo sapiens
gtcgccagcaaccgagcggggcccggcccgagcggggcctgggggtgcgacgccgagggcgggggagagcgcgccgctgctcccggaccgggccgcgcacgccgcctcaggaaccatcactgttgctggaggcacctgacaaatcctagcgaatttttggagcatctccacccaggaacctcgccatccagaagtgtgcttcccgcacagctgcagccatggggtctgaggaccacggcgcccagaaccccagctgtaaaatcatgacgtttcgcccaaccatggaagaatttaaagacttcaacaaatacgtggcctacatagagtcgcagggagcccaccgggcgggcctggccaagatcatccccccgaaggagtggaagccgcggcagacgtatgatgacatcgacgacgtggtgatcccggcgcccatccagcaggtggtgacgggccagtcgggcctcttcacgcagtacaatatccagaagaaggccatgacagtgggcgagtaccgccgcctggccaacagcgagaagtactgtaccccgcggcaccaggactttgatgaccttgaacgcaaatactggaagaacctcacctttgtctccccgatctacggggctgacatcagcggctctttgtatgatgacgacgtggcccagtggaacatcgggagcctccggaccatcctggacatggtggagcgcgagtgcggcaccatcatcgagggcgtgaacacgccctacctgtacttcggcatgtggaagaccaccttcgcctggcacaccgaggacatggacctgtacagcatcaactacctgcactttggggagcctaagtcctggtacgccatcccaccagagcacggcaagcgcctggagcggctggccatcggcttcttccccgggagctcgcagggctgcgacgccttcctgcggcataagatgaccctcatctcgcccatcatcctgaagaagtacgggatccccttcagccggatcacgcaggaggccggggaattcatgatcacatttccctacggctaccacgccggcttcaatcacgggttcaactgcgcagaatctaccaacttcgccaccctgcggtggattgactacggcaaagtggccactcagtgcacgtgccggaaggacatggtcaagatctccatggacgtgttcgtgcgcatcctgcagcccgagcgctacgagctgtggaagcagggcaaggacctcacggtgctggaccacacgcggcccacggcgctcaccagccccgagctgagctcctggagtgcatcccgggcctcgctgaaggccaagctcctccgcaggtctcaccggaaacggagccagcccaagaagccgaagcccgaagaccccaagttccctggggagggtacggctggggcagcgctcctagaggaggctgggggcagcgtgaaggaggaggctgggccggaggttgaccccgaggaggaggaggaggagccgcagccactgccacacggccgggaggccgagggcgcagaagaggacgggaggggcaagctgcggccaaccaaggccaagagcgagcggaagaagaagagcttcggcctgctgcccccacagctgccgcccccgcctgctcacttcccctcagaggaggcgctgtggctgccatccccactggagcccccggtgctgggcccaggccctgcagccatggaggagagccccctgccggcaccccttaatgtcgtgccccctgaggtgcccagtgaggagctagaggccaagcctcggcccatcatccccatgctgtacgtggtgccgcggccgggcaaggcagccttcaaccaggagcacgtgtcctgccagcaggcctttgagcactttgcccagaagggtccgacctggaaggaaccagtttcccccatggagctgacggggccagaggacggtgcagccagcagtggggcaggtcgcatggagaccaaagcccgggccggagaggggcaggcaccgtccacattttccaaattgaagatggagatcaagaagagccggcgccatcccctgggccggccgcccacccggtccccactgtcggtggtgaagcaggaggcctcaagtgacgaggaggcatcccctttctccggggaggaagatgtgagtgacccggacgccttgaggccgctgctgtctctgcagtggaagaacagggcggccagcttccaggccgagaggaagttcaacgcagcggctgcgcgcacggagccctactgcgccatctgcacgctcttctacccctactgccaggccctacagactgagaaggaggcacccatagcctccctcggaaagggctgcccggccacattaccctccaaaagccgtcagaagacccgaccgctcatccctgagatgtgcttcacctctggcggtgagaacacggagccgctgcctgccaactcctacatcggcgacgacgggaccagccccctgatcgcctgcggcaagtgctgcctgcaggtccatgccagttgctatggcatccgtcccgagctggtcaatgaaggctggacgtgttcccggtgcgcggcccacgcctggactgcggagtgctgcctgtgcaacctgcgaggaggtgcgctgcagatgaccaccgataggaggtggatccacgtgatctgtgccatcgcagtccccgaggcgcgcttcctgaacgtgattgagcgccaccctgtggacatcagcgccatccccgagcagcggtggaagctgaaatgcgtgtactgccggaagcggatgaagaaggtgtcaggtgcctgtatccagtgctcctacgagcactgctccacgtccttccacgtgacctgcgcccacgccgcaggcgtgctcatggagccggacgactggccctatgtggtctccatcacctgcctcaagcacaagtcggggggtcacgctgtccaactcctgagggccgtgtccctaggccaggtggtcatcaccaagaaccgcaacgggctgtactaccgctgtcgcgtcatcggtgccgcctcgcagacctgctacgaagtgaacttcgacgatggctcctacagcgacaacctgtaccctgagagcatcacgagtagggactgtgtccagctgggacccccttccgagggggagctggtggagctccggtggactgacggcaacctctacaaggccaagttcatctcctccgtcaccagccacatctaccaggtggagtttgaggacgggtcccagctgacggtgaagcgtggggacatcttcaccctggaggaggagctgcccaagagggtccgctctcggctgtcactgagcacgggggcaccgcaggagcccgccttctcgggggaggaggccaaggccgccaagcgcccgcgtgtgggcaccccgcttgccacggaggactccgggcggagccaggactacgtggccttcgtggagagcctcctgcaggtgcagggccggcccggagcccccttctaggacagctggccgctcaggcgaccctcagcccggcggggaggccatggcatgccccgggcgttcgcttgctgtgaattcctgtcctcgtgtccccgacccccgagaggccacctccaagccgcgggtgccccctagggcgacaggagccagcgggacgccgcacgcggccccagactcagggagcagggccaggcgggctcgggggccggccaggggagcaccccactcaactactcagaattttaaaccatgtaagctctcttcttctcgaaaaggtgctactgcaatgccctactgagcaacctttgagattgtcacttctgtacataaaccacctttgtgaggctctttctataaatacatattgtttaaaaaaaagcaagaaaaaaaggaaaacaaaggaaaatatccccaaagttgttttctagatttgtggctttaagaaaaacaaaacaaaacaaacacattgtttttctcagaaccaggattctctgagaggtcagagcatctcgctgtttttttgttgttgttttaaaatattatgatttggctacagaccaggcagggaaagagacccggtaattggagggtgagcctcggggggggggcaggacgccccggtttcggcacagcccggtcactcacggcctcgctctcgcctcaccccggctcctgggctttgatggtctggtgccagtgcctgtgcccactctgtgcctgctgggaggaggcccaggctctctggtggccgcccctgtgcacctggccaggggaagcccgggggtctggggcctccctccgtctgcgcccacctttgcagaataaactctctcctggggtttgtctatctttgtttctctcacctgagagaaacgcaggtgttccagaggcttccttgcagacaaagcacccctgcacctcctatggctcaggatgagggaggcccccaggcccttctggttggtagtgagtgtggacagcttcccagctcttcgggtacaaccctgagcaggtcgggggacacagggccgaggcaggccttcggggcccctttcgcctgcttccgggcagggacgaggcctggtgtcctcgctccacccacccacgctgctgtcacctgaggggaatctgcttcttaggagtgggttgagctgatagagaaaaaacggccttcagcccaggctgggaagcgccttctccaggtgcctctccctcaccagctctgcacccctctggggagccttccccaccttagctgtctcctgccccagggagggatggaggagataatttgcttatattaaaaacaaaaaatggctgaggcaggagtttgggaccagcctgggctatatagcaagaccccatcactacaaattttttacaaattagctaggtgtggtggtgcgcacctgtggtcccagctactcgggaggctgtggtgggaggattgcttgagtccaggaggttgaggctgcagtcagctcagattgcaccactgcactccagcctgggcaacagagcgagaccctgtctccaaaaaaaaaaaaaagcaatgtttatattataaaagagtgtcctaacagtccccgggctagagaggactaaggaaaacagagagagtgttacgcaggagcaagcctttcatttccttggtgggggaggggggcggttgccctggagagggccggggtcggggaggttggggggtgtcagccaaaacgtggaggtgtccctctgcacgcagccctcgcccggcgtggcgctgacactgtattcttatgttgtttgaaaatgctatttatattgtaaagaagcgggcgggtgcccctgctgcccttgtcccttgggggtcacacccatcccctggtgggctcctgggcggcctgcgcagatgggccacagaagggcaggccggagctgcacactctccccacgaaggtatctctgtgtcttactctgtgcaaagacgcggcaaaacccagtgccctggtttttccccacccgagatgaaggatacgctgtattttttgcctaatgtccctgcctctaggttcataatgaattaaaggttcatgaacgctgc

SEQ ID NO: 5198 - protein, 1096 aa, Homo sapiens
MGSEDHGAQNPSCKIMTFRPTMEEFKDFNKYVAYIESQGAHRAGLAKIIPPKEWKPRQTYDDIDDVVIPAPIQQVVTGQSGLFTQYNIQKKAMTVGEYRRLANSEKYCTPRHQDFDDLERKYWKNLTFVSPIYGADISGSLYDDDVAQWNIGSLRTILDMVERECGTIIEGVNTPYLYFGMWKTTFAWHTEDMDLYSINYLHFGEPKSWYAIPPEHGKRLERLAIGFFPGSSQGCDAFLRHKMTLISPIILKKYGIPFSRITQEAGEFMITFPYGYHAGFNHGFNCAESTNFATLRWIDYGKVATQCTCRKDMVKISMDVFVRILQPERYELWKQGKDLTVLDHTRPTALTSPELSSWSASRASLKAKLLRRSHRKRSQPKKPKPEDPKFPGEGTAGAALLEEAGGSVKEEAGPEVDPEEEEEEPQPLPHGREAEGAEEDGRGKLRPTKAKSERKKKSFGLLPPQLPPPPAHFPSEEALWLPSPLEPPVLGPGPAAMEESPLPAPLNVVPPEVPSEELEAKPRPIIPMLYVVPRPGKAAFNQEHVSCQQAFEHFAQKGPTWKEPVSPMELTGPEDGAASSGAGRMETKARAGEGQAPSTFSKLKMEIKKSRRHPLGRPPTRSPLSVVKQEASSDEEASPFSGEEDVSDPDALRPLLSLQWKNRAASFQAERKFNAAAARTEPYCAICTLFYPYCQALQTEKEAPIASLGKGCPATLPSKSRQKTRPLIPEMCFTSGGENTEPLPANSYIGDDGTSPLIACGKCCLQVHASCYGIRPELVNEGWTCSRCAAHAWTAECCLCNLRGGALQMTTDRRWIHVICAIAVPEARFLNVIERHPVDISAIPEQRWKLKCVYCRKRMKKVSGACIQCSYEHCSTSFHVTCAHAAGVLMEPDDWPYVVSITCLKHKSGGHAVQLLRAVSLGQVVITKNRNGLYYRCRVIGAASQTCYEVNFDDGSYSDNLYPESITSRDCVQLGPPSEGELVELRWTDGNLYKAKFISSVTSHIYQVEFEDGSQLTVKRGDIFTLEEELPKRVRSRLSLSTGAPQEPAFSGEEAKAAKRPRVGTPLATEDSGRSQDYVAFVESLLQVQGRPGAPF

SEQ ID NO: 5199 - DNA, 3233 bp, Homo sapiens
tgcgactgagtcggtggcgaagacgggaacgcgacgatggcggagactctgcccgggtcgggcgactcgggccctggcacggcttctctcggcccgggcgttgcggagactgggacgaggcggctcagcgagctgcgggtgatcgatctgcgggcggagctgaagaagcggaacctggacacgggcggcaacaagagcgtcctgatggagcggctcaagaaggcggttaaagaagaggggcaagatcctgatgaaattggcatcgagttagaagccaccagcaagaagtcagccaagagatgtgttaaaggactgaagatggaggaggaaggcacagaagataatggcctggaagacgattccagagacgggcaggaggacatggaagcaagtctggagaacctgcagaatatgggcatgatggacatgagtgtgctagacgaaactgaagtggcgaatagcagtgctccagattttggggaggatggcacggacggccttctcgattccttttgtgatagtaaagaatacgtggctgcacagctgagacagctcccggctcagcccccagagcatgctgtggatggggaaggatttaagaacactttggaaacttcatcgttgaacttcaaagtaactccggacattgaagaatcccttttggagccagaaaatgagaaaatactcgacattttgggggaaacttgtaaatctgagccagtaaaagaagaaagttccgagctggagcagccatttgcacaggacacaagtagcgtggggccagacagaaagcttgcggaggaagaggacctatttgacagcgcccatccggaagagggtgatttagatttggccagcgagtcaacagcacacgctcagtcgagcaaggcagacagcctgttagcggtagtgaaaagggagcccgcggagcagccaggcgatggcgagaggacggactgtgagcctgtagggctagagccggcagttgagcagagtagtgcggcctccgagctcgcggaggcctctagcgaggagctcgcagaagcacccacggaagccccaagcccagaagccagagatagcaaagaagacgggaggaagtttgattttgacgcttgtaatgaagtccctccggctcctaaagagtcctcaaccagtgagggcgctgatcagaaaatgagctcttttaaggaagaaaaagatataaagccaatcattaaagatgaaaaaggtcgggtcggcagcggttctggtcggaacctgtgggtcagcgggctgtcctccacaacacgcgctacggatctcaagaaccttttcagcaagtatgggaaggttgtcggggccaaagtggtaacgaacgcccgcagcccgggggctcgatgctatggattcgtcaccatgtcgacatctgacgaggcgaccaagtgcatcagccatctccacagaactgagctgcatggacgaatgatctccgtagagaaggccaaaaatgagcctgctgggaaaaagctttccgacagaaaagagtgcgaagtgaagaaggaaaaattatcgagtgtcgacagacatcattctgtggagatcaaaattgaaaaaactgtaattaagaaggaagagaagattgagaagaaggaggaaaaaaagcctgaagacattaagaaggaagaaaaagaccaggatgagctgaaacccggacctacaaatcggtctagagtcaccaaatcaggaagcagaggaatggagcggacggtcgtgatggataaatcgaaaggagagcccgtcattagcgtgaaaaccacaagcaggtccaaagagagaagctccaagagtcaggatcgcaagtcagaaagcaaagaaaagagagacatcttgtcgtttgataaaatcaaagaacaaagggagagagagcgccagaggcagcgggaacgggagatccgcgaaacggagaggcggcgggagcgcgagcagcgggagcgggagcaacgcctcgaggccttccatgagcggaaggagaaggcccggctacagcgggaacgcctgcagctcgagtgccagcgccagcggctggagcgggagcgcatggagcgggagcggctggagcgcgagcgcatgcgcgtggagcgtgagcgcaggaaggagcaggagcgcatccaccgcgagcgcgaggagctgcggcgccagcaggagcagctgcgttacgagcaggagcggcggcccgggcggaggccctacgacctggaccgacgagatgatgcctattggccagaaggaaagcgtgtggcaatggaggaccgatatcgtgcagactttccccggccagaccaccgctttcacgacttcgatcatcgagaccggggccagtaccaggaccacgccatcgacaggcgggagggttcgaggccaatgatgggagaccaccgggatgggcagcactatggagatgaccgccatggccacggaggacccccagagcgccacggccgggactcccgtgatggctgggggggctacggctccgacaagaggctgagtgaaggccgggggctgccccctccccccaggggtggccgtgactggggagagcacaaccagcggctagaggagcaccaggcacgcgcctggcagggtgccatggacgcaggcgcggctagccgggagcacgccaggtggcaaggtggcgagaggggcctgtctgggccctcggggccggggcacatggcaagccgcggtggagtggcggggcgaggcggctttgcacaaggtggacattcccagggccacgtggtgccaggtggcggactggaaggtggcggagtggccagccaggaccggggcagcagagtccctcacccacaccctcatccccccccgtacccccacttcacccgccgctactaagtcccactcgctgtgagttttcgggtgggcagacgcactgttgaatctggtagccagggttccctcgaacttgggggatctttttaaaagcaaagtaaatcctgccaccatgttgtagctcaatacaatgtgaactcacttttttttttttttttaataaatgtgttcttgttctgccatttttaaatcaaggtttctgttaacgaggcattccattttccattaataaagtttaccattcgcaaaaaaaaaatgtgttcttgttctgccatttttaaatcaaggtttctgttaacgaggcattccattttccattaataaagtttaccattcgc

SEQ ID NO: 5200 - protein, 953 aa, Homo sapiens
MAETLPGSGDSGPGTASLGPGVAETGTRRLSELRVIDLRAELKKRNLDTGGNKSVLMERLKKAVKEEGQDPDEIGIELEATSKKSAKRCVKGLKMEEEGTEDNGLEDDSRDGQEDMEASLENLQNMGMMDMSVLDETEVANSSAPDFGEDGTDGLLDSFCDSKEYVAAQLRQLPAQPPEHAVDGEGFKNTLETSSLNFKVTPDIEESLLEPENEKILDILGETCKSEPVKEESSELEQPFAQDTSSVGPDRKLAEEEDLFDSAHPEEGDLDLASESTAHAQSSKADSLLAVVKREPAEQPGDGERTDCEPVGLEPAVEQSSAASELAEASSEELAEAPTEAPSPEARDSKEDGRKFDFDACNEVPPAPKESSTSEGADQKMSSFKEEKDIKPIIKDEKGRVGSGSGRNLWVSGLSSTTRATDLKNLFSKYGKVVGAKVVTNARSPGARCYGFVTMSTSDEATKCISHLHRTELHGRMISVEKAKNEPAGKKLSDRKECEVKKEKLSSVDRHHSVEIKIEKTVIKKEEKIEKKEEKKPEDIKKEEKDQDELKPGPTNRSRVTKSGSRGMERTVVMDKSKGEPVISVKTTSRSKERSSKSQDRKSESKEKRDILSFDKIKEQRERERQRQREREIRETERRREREQREREQRLEAFHERKEKARLQRERLQLECQRQRLERERMERERLERERMRVERERRKEQERIHREREELRRQQEQLRYEQERRPGRRPYDLDRRDDAYWPEGKRVAMEDRYRADFPRPDHRFHDFDHRDRGQYQDHAIDRREGSRPMMGDHRDGQHYGDDRHGHGGPPERHGRDSRDGWGGYGSDKRLSEGRGLPPPPRGGRDWGEHNQRLEEHQARAWQGAMDAGAASREHARWQGGERGLSGPSGPGHMASRGGVAGRGGFAQGGHSQGHVVPGGGLEGGGVASQDRGSRVPHPHPHPPPYPHFTRRY

SEQ ID NO: 5201 - DNA, 1044 bp, Homo sapiens
gaccggggcgtgcggagggatgtggcccggaatattggtagggggggcccgggtggcgtcatgcaggtaccccgcgctggggcctcgcctcgccgctcactttccagcgcagcggccgccgcagcggacactccagaacggcctggccctgcagcggtgcctgcacgcgacggcgacccgggctctcccgctcattcccatcgtggtggagcagacgggtcgcggcgagcgcgcctatgacatctactcgcggctgctgcgggagcgcatcgtgtgcgtcatgggcccgatcgatgacagcgttgccagccttgttatcgcacagctcctcttcctgcaatccgagagcaacaagaagcccatccacatgtacatcaacagccctggtggtgtggtgaccgcgggcctggccatctacgacacgatgcagtacatcctcaacccgatctgcacctggtgcgtgggccaggccgccagcatgggctccctgcttctcgccgccggcaccccaggcatgcgccactcgctccccaactcccgtatcatgatccaccagccctcaggaggcgcccggggccaagccacagacattgccatccaggcagaggagatcatgaagctcaagaagcagctctataacatctacgccaagcacaccaaacagagcctgcaggtgatcgagtccgccatggagagggaccgctacatgagccccatggaggcccaggagtttggcatcttagacaaggttctggtccaccctccccaggacggtgaggatgagcccacgctggtgcagaaggagcctgtagaagcagcgccggcagcagaacctgtcccagctagcacctgagagctgggcctcctctccagaatcatgtggaggggccagaggcttgccagacccccagctgggccctgctcaccccttgttgctgggcttggaggggcctcttgaggaacttttaatttgcaggggtgcccgctatggacggggcattccagctgagacactgtgattttaaattaaatctttgtggtctt

SEQ ID NO: 5202 - protein, 277 aa, Homo sapiens
MWPGILVGGARVASCRYPALGPRLAAHFPAQRPPQRTLQNGLALQRCLHATATRALPLIPIVVEQTGRGERAYDIYSRLLRERIVCVMGPIDDSVASLVIAQLLFLQSESNKKPIHMYINSPGGVVTAGLAIYDTMQYILNPICTWCVGQAASMGSLLLAAGTPGMRHSLPNSRIMIHQPSGGARGQATDIAIQAEEIMKLKKQLYNIYAKHTKQSLQVIESAMERDRYMSPMEAQEFGILDKVLVHPPQDGEDEPTLVQKEPVEAAPAAEPVPAST

SEQ ID NO: 5203 - DNA, 3009 bp, Homo sapiens
tgtggagcgaagccttgttcccgcgttgagccgccgccgccgccgccgcctcctcagcttcagcctccgcgccaggcccggccccgccgcgccatgtcggactacagcacgggaggacccccgcccgggccgccgccgcccgccggcgggggcgggggagccggaggcgccgggggaggccctccgccgggcccgccaggcgcgggggaccggggcggcggcggtccctgcggcggcggcccgggcggggggtcggccgggggcccctctcagccacccggcggaggcggcccgggaatccgcaaggacgctttcgccgacgccgtgcagcgggcccgccagattgcagccaaaattggaggcgatgctgccacgacagtgaataacagcactcctgattttggttttgggggccaaaagagacagttggaagatggagatcaaccggagagcaagaagctggcttcccagggagactcaatcagttctcaacttggacccatccatcctcccccaaggacttcaatgacagaagagtacagggtcccagacggcatggtgggcctgatcattggcagaggaggtgaacaaattaacaaaatccaacaggattcaggctgcaaagtacagatttctccagacagcggtggcctacccgagcgcagtgtgtccttgacaggagccccagaatctgtccagaaagccaagatgatgctggatgacattgtgtctcggggtcgtgggggccccccaggacagttccacgacaacgccaacgggggccagaacggcaccgtgcaggagatcatgatccccgcgggcaaggccggcctggtcattggcaagggcggggagaccattaagcagctgcaggaacgcgctggagtgaagatgatcttaattcaggacggatctcagaatacgaatgtggacaaacctctccgcatcattggggatccttacaaagtgcagcaagcctgtgagatggtgatggacatcctccgggaacgtgaccaaggcggctttggggaccggaatgagtacggatctcggattggcggaggcatcgatgtgccagtgcccaggcattctgttggcgtggtcattggccggagtggagagatgatcaagaagatccagaatgatgctggcgtgcggatacagttcaagcaagatgacgggacagggcccgagaagattgctcatataatggggcccccagacaggtgcgagcacgcagcccggatcatcaacgacctcctccagagcctcaggagtggtcccccaggtcctccagggggtccaggcatgcccccggggggccgaggccgaggaagaggccaaggcaattggggtccccctggcggggagatgaccttctccatccccactcacaagtgtgggctggtcatcggccgaggtggcgagaatgtgaaagccataaaccagcagacgggagccttcgtagagatctcccggcagctgccacccaacggggaccccaacttcaagttgttcatcatccggggttcaccccagcagattgaccacgccaagcagcttatcgaggaaaagatcgagggtcctctctgcccagttggaccaggcccaggtggcccaggccctgctggcccaatggggcccttcaatcctgggcccttcaaccaggggccacccggggctcccccacatgccggggggccccctcctcaccagtacccaccccagggctggggcaatacctacccccagtggcagccgcctgctcctcatgacccaagcaaagcagctgcagcggccgcggaccccaacgccgcgtgggccgcctactactcacactactaccagcagcccccgggccccgtccccggccccgcaccggcccctgcggccccaccggctcagggtgagccccctcagcccccacccaccggccagtcggactacactaaggcctgggaagagtattacaaaaagatcggccagcagccccagcagcccggagcgcccccacagcaggactacacgaaggcttgggaggagtactacaagaagcaagcgcaagtggccaccggagggggtccaggagctcccccaggctcccagccagactacagtgccgcctgggcggaatattacagacagcaggccgcttactacggacagaccccaggtcctggcggcccccagccgccgcccacgcagcagggacagcagcaggctcaatgaatcgaatgaatgtgaacttcttcatctgtgaaaaatcttttttttttccattttgttctgtttgggggcttctgttttgtttggcgagagagcgatggtgccgtggggagtactggggagccctcgcggcaagcagggtgggggggacttgggggcatgccgggccctcactctctcgcctgttctgtgtctcacatgctttttctttcaaaattgggatccttccatgttgagccagccagagaagatagcgagatctaaatctctgccaaaaaaaaaaaaaacttaaaaattaaaaacacaaagagcaaagcagaacttataaaattatatatatatatattaaaaagtctctattcttcaccccccagccttcctgaacctgcctctctgaggataaagcaattcattttctcccaccctcggccctcttgtttttaaaataaacttttaaaaaggaaaaaaaaaagtcactcttgctatttcttttttttagttagaggtggaacattccttggaccaggtgttgtattgcaggaccccttcccccagcagccaagccccctcttctctccctcccgccctggctcagctcccgcggccccgcccgtcccccctcccaggactggtctgttgtcttttcatctgttcaagaggagattgaaactgaaaacaaaatgagaacaacaaaaaaaattgtatggcagtttttactttttatcgctcgtttttaacttcacaaataaatgataacaaaacctcaaaaaaaaaaaaaaaaaa

SEQ ID NO: 5204 - protein, 711 aa, Homo sapiens
MSDYSTGGPPPGPPPPAGGGGGAGGAGGGPPPGPPGAGDRGGGGPCGGGPGGGSAGGPSQPPGGGGPGIRKDAFADAVQRARQIAAKIGGDAATTVNNSTPDFGFGGQKRQLEDGDQPESKKLASQGDSISSQLGPIHPPPRTSMTEEYRVPDGMVGLIIGRGGEQINKIQQDSGCKVQISPDSGGLPERSVSLTGAPESVQKAKMMLDDIVSRGRGGPPGQFHDNANGGQNGTVQEIMIPAGKAGLVIGKGGETIKQLQERAGVKMILIQDGSQNTNVDKPLRIIGDPYKVQQACEMVMDILRERDQGGFGDRNEYGSRIGGGIDVPVPRHSVGVVIGRSGEMIKKIQNDAGVRIQFKQDDGTGPEKIAHIMGPPDRCEHAARIINDLLQSLRSGPPGPPGGPGMPPGGRGRGRGQGNWGPPGGEMTFSIPTHKCGLVIGRGGENVKAINQQTGAFVEISRQLPPNGDPNFKLFIIRGSPQQIDHAKQLIEEKIEGPLCPVGPGPGGPGPAGPMGPFNPGPFNQGPPGAPPHAGGPPPHQYPPQGWGNTYPQWQPPAPHDPSKAAAAAADPNAAWAAYYSHYYQQPPGPVPGPAPAPAAPPAQGEPPQPPPTGQSDYTKAWEEYYKKIGQQPQQPGAPPQQDYTKAWEEYYKKQAQVATGGGPGAPPGSQPDYSAAWAEYYRQQAAYYGQTPGPGGPQPPPTQQGQQQAQ

SEQ ID NO: 5205 - DNA, 5067 bp, Homo sapiens
ctcctccccatcctctccctctgtccctctgtccctctgaccctgcactgtcccagcaccatgggacccacctcaggtcccagcctgctgctcctgctactaacccacctccccctggctctggggagtcccatgtactctatcatcacccccaacatcttgcggctggagagcgaggagaccatggtgctggaggcccacgacgcgcaaggggatgttccagtcactgttactgtccacgacttcccaggcaaaaaactagtgctgtccagtgagaagactgtgctgacccctgccaccaaccacatgggcaacgtcaccttcacgatcccagccaacagggagttcaagtcagaaaaggggcgcaacaagttcgtgaccgtgcaggccaccttcgggacccaagtggtggagaaggtggtgctggtcagcctgcagagcgggtacctcttcatccagacagacaagaccatctacacccctggctccacagttctctatcggatcttcaccgtcaaccacaagctgctacccgtgggccggacggtcatggtcaacattgagaacccggaaggcatcccggtcaagcaggactccttgtcttctcagaaccagcttggcgtcttgcccttgtcttgggacattccggaactcgtcaacatgggccagtggaagatccgagcctactatgaaaactcaccacagcaggtcttctccactgagtttgaggtgaaggagtacgtgctgcccagtttcgaggtcatagtggagcctacagagaaattctactacatctataacgagaagggcctggaggtcaccatcaccgccaggttcctctacgggaagaaagtggagggaactgcctttgtcatcttcgggatccaggatggcgaacagaggatttccctgcctgaatccctcaagcgcattccgattgaggatggctcgggggaggttgtgctgagccggaaggtactgctggacggggtgcagaacccccgagcagaagacctggtggggaagtctttgtacgtgtctgccaccgtcatcttgcactcaggcagtgacatggtgcaggcagagcgcagcgggatccccatcgtgacctctccctaccagatccacttcaccaagacacccaagtacttcaaaccaggaatgccctttgacctcatggtgttcgtgacgaaccctgatggctctccagcctaccgagtccccgtggcagtccagggcgaggacactgtgcagtctctaacccagggagatggcgtggccaaactcagcatcaacacacaccccagccagaagcccttgagcatcacggtgcgcacgaagaagcaggagctctcggaggcagagcaggctaccaggaccatgcaggctctgccctacagcaccgtgggcaactccaacaattacctgcatctctcagtgctacgtacagagctcagacccggggagaccctcaacgtcaacttcctcctgcgaatggaccgcgcccacgaggccaagatccgctactacacctacctgatcatgaacaagggcaggctgttgaaggcgggacgccaggtgcgagagcccggccaggacctggtggtgctgcccctgtccatcaccaccgacttcatcccttccttccgcctggtggcgtactacacgctgatcggtgccagcggccagagggaggtggtggccgactccgtgtgggtggacgtcaaggactcctgcgtgggctcgctggtggtaaaaagcggccagtcagaagaccggcagcctgtacctgggcagcagatgaccctgaagatagagggtgaccacggggcccgggtggtactggtggccgtggacaagggcgtgttcgtgctgaataagaagaacaaactgacgcagagtaagatctgggacgtggtggagaaggcagacatcggctgcaccccgggcagtgggaaggattacgccggtgtcttctccgacgcagggctgaccttcacgagcagcagtggccagcagaccgcccagagggcagaacttcagtgcccgcagccagccgcccgccgacgccgttccgtgcagctcacggagaagcgaatggacaaagtcggcaagtaccccaaggagctgcgcaagtgctgcgaggacggcatgcgggagaaccccatgaggttctcgtgccagcgccggacccgtttcatctccctgggcgaggcgtgcaagaaggtcttcctggactgctgcaactacatcacagagctgcggcggcagcacgcgcgggccagccacctgggcctggccaggagtaacctggatgaggacatcattgcagaagagaacatcgtttcccgaagtgagttcccagagagctggctgtggaacgttgaggacttgaaagagccaccgaaaaatggaatctctacgaagctcatgaatatatttttgaaagactccatcaccacgtgggagattctggctgtgagcatgtcggacaagaaagggatctgtgtggcagaccccttcgaggtcacagtaatgcaggacttcttcatcgacctgcggctaccctactctgttgttcgaaacgagcaggtggaaatccgagccgttctctacaattaccggcagaaccaagagctcaaggtgagggtggaactactccacaatccagccttctgcagcctggccaccaccaagaggcgtcaccagcagaccgtaaccatcccccccaagtcctcgttgtccgttccatatgtcatcgtgccgctaaagaccggcctgcaggaagtggaagtcaaggctgctgtctaccatcatttcatcagtgacggtgtcaggaagtccctgaaggtcgtgccggaaggaatcagaatgaacaaaactgtggctgttcgcaccctggatccagaacgcctgggccgtgaaggagtgcagaaagaggacatcccacctgcagacctcagtgaccaagtcccggacaccgagtctgagaccagaattctcctgcaagggaccccagtggcccagatgacagaggatgccgtcgacgcggaacggctgaagcacctcattgtgaccccctcgggctgcggggaacagaacatgatcggcatgacgcccacggtcatcgctgtgcattacctggatgaaacggagcagtgggagaagttcggcctagagaagcggcagggggccttggagctcatcaagaaggggtacacccagcagctggccttcagacaacccagctctgcctttgcggccttcgtgaaacgggcacccagcacctggctgaccgcctacgtggtcaaggtcttctctctggctgtcaacctcatcgccatcgactcccaagtcctctgcggggctgttaaatggctgatcctggagaagcagaagcccgacggggtcttccaggaggatgcgcccgtgatacaccaagaaatgattggtggattacggaacaacaacgagaaagacatggccctcacggcctttgttctcatctcgctgcaggaggctaaagatatttgcgaggagcaggtcaacagcctgccaggcagcatcactaaagcaggagacttccttgaagccaactacatgaacctacagagatcctacactgtggccattgctggctatgctctggcccagatgggcaggctgaaggggcctcttcttaacaaatttctgaccacagccaaagataagaaccgctgggaggaccctggtaagcagctctacaacgtggaggccacatcctatgccctcttggccctactgcagctaaaagactttgactttgtgcctcccgtcgtgcgttggctcaatgaacagagatactacggtggtggctatggctctacccaggccaccttcatggtgttccaagccttggctcaataccaaaaggacgcccctgaccaccaggaactgaaccttgatgtgtccctccaactgcccagccgcagctccaagatcacccaccgtatccactgggaatctgccagcctcctgcgatcagaagagaccaaggaaaatgagggtttcacagtcacagctgaaggaaaaggccaaggcaccttgtcggtggtgacaatgtaccatgctaaggccaaagatcaactcacctgtaataaattcgacctcaaggtcaccataaaaccagcaccggaaacagaaaagaggcctcaggatgccaagaacactatgatccttgagatctgtaccaggtaccggggagaccaggatgccactatgtctatattggacatatccatgatgactggctttgctccagacacagatgacctgaagcagctggccaatggtgttgacagatacatctccaagtatgagctggacaaagccttctccgataggaacaccctcatcatctacctggacaaggtctcacactctgaggatgactgtctagctttcaaagttcaccaatactttaatgtagagcttatccagcctggagcagtcaaggtctacgcctattacaacctggaggaaagctgtacccggttctaccatccggaaaaggaggatggaaagctgaacaagctctgccgtgatgaactgtgccgctgtgctgaggagaattgcttcatacaaaagtcggatgacaaggtcaccctggaagaacggctggacaaggcctgtgagccaggagtggactatgtgtacaagacccgactggtcaaggttcagctgtccaatgactttgacgagtacatcatggccattgagcagaccatcaagtcaggctcggatgaggtgcaggttggacagcagcgcacgttcatcagccccatcaagtgcagagaagccctgaagctggaggagaagaaacactacctcatgtggggtctctcctccgatttctggggagagaagcccaacctcagctacatcatcgggaaggacacttgggtggagcactggcccgaggaggacgaatgccaagacgaagagaaccagaaacaatgccaggacctcggcgccttcaccgagagcatggttgtctttgggtgccccaactgaccacacccccattcc

SEQ ID NO: 5206 - DNA, 2001 bp, Homo sapiens
ggccgcggtggtggctgcggcggcggcggcgggagcagcatggattggggcactgagctgtgggatcagttcgaggtgctcgagcgccacacgcagtgggggctggacctgttggacagatatgtaaagttcgtgaaagaacgcaccgaagtggaacaggcttacgccaaacaactgcggagcctggtgaaaaaatatctgcccaagagacctgccaaggatgatcctgagtccaaattcagccagcaacagtccttcgtacagattctccaggaggtgaatgactttgcaggccagcgggagctggtggctgagaacctcagtgtccgtgtatgtcttgagctgaccaagtactcacaagagatgaaacaggagaggaagatgcacttccaagaagggcggcgggcccagcagcagctggaaaatggctttaaacagctggagaatagtaagcgtaaatttgagcgggactgccgggaggcagagaaggcagcccagactgctgaacggctagaccaggatatcaacgccaccaaggctgatgtggagaaggccaagcagcaagcccaccttcggagtcacatggccgaagaaagcaaaaacgaatatgcggctcaactgcagcgcttcaaccgagaccaagcccacttctatttttcacagatgccccagatattcgataagctccaagacatggatgaacgcagggccacccgcctgggtgccgggtatgggctcctgtcggaggccgagctggaggtggtgcccataatagccaagtgcttggagggcatgaaggtggctgcaaatgctgtggatcccaagaacgactcccacgtccttatagagctgcacaagtcaggttttgcccgcccgggcgacgtggaattcgaggacttcagccagcccatgaaccgtgcaccctccgacagcagtctgggcaccccctcggatggacggcctgaactccgaggcccgggtcgcagccgcaccaagcgctggccttttggcaagaagaacaagacagtggtgaccgaggattttagccacttgcccccagagcagcagcgaaaacggcttcaacagcagttggaagaacgcagtcgtgaacttcagaaggaggttgaccagagggaagccctaaagaaaatgaaggatgtctatgagaagacacctcagatgggggaccccgccagcttggagccccagatcgctgaaaccctgagcaacattgaacggctgaaattggaagtgcagaagtatgaggcgtggctggcagaagctgaaagtcgagtccttagcaaccggggagacagcctgagccggcacgcccggcctcccgacccccccgctagcgccccgccagacagcagcagcaacagcgcatcacaggacaccaaggagagctctgaagagcctccctcagaagagagccaggacacccccatttacacggagtttgatgaggatttcgaggaggaacccacatcccccataggtcactgtgtggccatctaccactttgaagggtccagcgagggcactatctctatggccgagggtgaagacctcagtcttatggaagaagacaaaggggacggctggacccgggtcaggcggaaagagggaggcgagggctacgtgcccacctcctacctccgagtcacgctcaattgaaccctgccagagacgggaagaggggggctgtcggctgctgcttctgggccacggggagccccaggacctatgcactttatttctgaccccgtggcttcggctgagacctgtgtaacctgctgccccctccacccccaacccagtcctacctgtcacaccggacggacccgctgtgccttctaccatcgttccaccattgatgtacatactcatgttttacatcttttctttctgcgctcggctccggccattttgttttatacaaaaatgggttttttttttttctttaatatatttcaagagatttttttttttttttttttt

SEQ ID NO: 5207 - protein, 545 aa, Homo sapiens
MDWGTELWDQFEVLERHTQWGLDLLDRYVKFVKERTEVEQAYAKQLRSLVKKYLPKRPAKDDPESKFSQQQSFVQILQEVNDFAGQRELVAENLSVRVCLELTKYSQEMKQERKMHFQEGRRAQQQLENGFKQLENSKRKFERDCREAEKAAQTAERLDQDINATKADVEKAKQQAHLRSHMAEESKNEYAAQLQRFNRDQAHFYFSQMPQIFDKLQDMDERRATRLGAGYGLLSEAELEVVPIIAKCLEGMKVAANAVDPKNDSHVLIELHKSGFARPGDVEFEDFSQPMNRAPSDSSLGTPSDGRPELRGPGRSRTKRWPFGKKNKTVVTEDFSHLPPEQQRKRLQQQLEERSRELQKEVDQREALKKMKDVYEKTPQMGDPASLEPQIAETLSNIERLKLEVQKYEAWLAEAESRVLSNRGDSLSRHARPPDPPASAPPDSSSNSASQDTKESSEEPPSEESQDTPIYTEFDEDFEEEPTSPIGHCVAIYHFEGSSEGTISMAEGEDLSLMEEDKGDGWTRVRRKEGGEGYVPTSYLRVTLN

SEQ ID NO: 5208 - DNA, 2327 bp, Homo sapiens
cgggggtgacagcagcccggagccgcggagcctcagcttccgcctggacccagcctcgtgggagccccgcgggtcctgcccagatgtggaagactgaggcctgttgaaagtgcagagctcagccctggcaccctctgttcccaagagctccatgcaggtgccacaggatggagaagaccttgctggccaaccctggtaccacggcctcctgtcccgccagaaggctgaagctcttcttcagcaagatggcgacttcctggttcgcgcctctgggtcccgtgggggcaaccccgtgatctcctgccgctggcggggctcagccctccattttgaggtgttccgtgtggccctgcgtccccggccaggccgacccacagccctctttcaactggaggatgagcaattccccagcataccggctctggttcacagttatatgacaggcaggcgcccactgtcccaggccacaggggctgtggtctccaggcctgtgacttggcaggggcctctgcgacgcagctttagcgaggacaccctgatggatggcccagctcggatagagcctctcagggcaaggaagtggagcaacagtcagcctgcagatttggcacatatggggcggtcaagagaagaccccgctgggatggaagcctccaccatgcccatatctgccttgccccgaacgagcagtgacccggtgttgctgaaggcccctgctcccctgggaactgttgccgacagtctcagggcctccgatgggcagcttcaagccaaggcaccaacgaagcccccccggacaccctccttcgaactgcctgatgcctctgaacgtcccccgacgtactgcgagctggtgccccgagtgcccagtgtccagggaacatccccgagccaaagctgcccagagccagaggccccatggtgggaggccgaggaggatgaggaggaagagaatagatgttttacaagaccacaggctgagatctctttctgcccccatgatgccccctcctgcctgctgggcccccagaatcggcccctggaaccccaagtcctgcataccctccgtggcctgttcctggagcaccatcctgggagcaccgcccttcacctgctattggtagactgccaggccacaggcctcctgggagtgaccagagatcagcggggcaacatgggagtctcatctggcctggagctgctcactcttccccatggacaccacttgaggttggaactgctggagaggcatcagacactggcgctggccggggcgctggcggtgctgggctgctcggggccgctggaggagcgcgcagccgcactgaggggactggtagagctggcgctggcgctgcggccaggggcggcgggggacctgcccgggctggctgcagtcatgggcgccctgctcatgccccaggtgtcccggttggagcacacgtggcgccagctccgaaggagccacacggaggctgcgctggcctttgagcaggagctgaagccgctgatgcgggctctggatgagggcgctggaccctgcgaccccggcgaggtggcgctgccgcacgtggcacccatggttcgcctactggagggcgaggaagtcgcggggccgctggacgagagctgtgagcggctgttgcgcaccctgcacggggcgcgtcacatggtccgggacgcacccaaattccgcaaggtggcagcccagcgcctgcgaggattccggcctaacccggagctgagggaggccctgaccaccggcttcgtgcggaggctgctctggggtagccggggcgcgggagctccgcgcgctgaacgctttgagaagttccagcgcgtcctcggcgtcctgtcgcagcgcctggagcctgaccgctgagagcgcagacacccttcttcacacccgggacccccaggtttttgcgaaccccagaagagaccaaaggagtcgtcccaggctcctcgcgcctcaggtggaatcctgccctgtgcctcacagaagaggtggggaccgcagtcagggtcacctggaccatggtgaacatgtgacctgcagatctggcatcagaggccagagttcaaatgtgactccacctcttaaaagccgtgatttctagcagttgacttcacctctgtgtcggcctttaacaaaatcatagccatacagcagctcaggcctgtaatctcagcactttgggaggccgaggcggaaggaaggcttgaggccaggagttcaagaccagccagggcaacatggtgagacctcatctctacaaaaactgaaaaataaaaaacttttaaaaaatgtaaaaaaaaaaaaaaaa

SEQ ID NO: 5209 - protein, 576 aa, Homo sapiens
MQVPQDGEDLAGQPWYHGLLSRQKAEALLQQDGDFLVRASGSRGGNPVISCRWRGSALHFEVFRVALRPRPGRPTALFQLEDEQFPSIPALVHSYMTGRRPLSQATGAVVSRPVTWQGPLRRSFSEDTLMDGPARIEPLRARKWSNSQPADLAHMGRSREDPAGMEASTMPISALPRTSSDPVLLKAPAPLGTVADSLRASDGQLQAKAPTKPPRTPSFELPDASERPPTYCELVPRVPSVQGTSPSQSCPEPEAPWWEAEEDEEEENRCFTRPQAEISFCPHDAPSCLLGPQNRPLEPQVLHTLRGLFLEHHPGSTALHLLLVDCQATGLLGVTRDQRGNMGVSSGLELLTLPHGHHLRLELLERHQTLALAGALAVLGCSGPLEERAAALRGLVELALALRPGAAGDLPGLAAVMGALLMPQVSRLEHTWRQLRRSHTEAALAFEQELKPLMRALDEGAGPCDPGEVALPHVAPMVRLLEGEEVAGPLDESCERLLRTLHGARHMVRDAPKFRKVAAQRLRGFRPNPELREALTTGFVRRLLWGSRGAGAPRAERFEKFQRVLGVLSQRLEPDR

SEQ ID NO: 5210 - DNA, 1351 bp, Homo sapiens
agggaagacacgcgtgacccggaaggtcttcccgccacactccagagcggatgtgaggggcgccgatggcggagggaacggcggaggctcctctagagaatggtggtggtggcgactcgggagccggagctttggaacgaggagtggcgcccattaagcgtcaatacctcaccaccaaggagcagtttcaccaattcctggaagccaaagggcaggagaagacttgccgggaaaccgagctggacatccgtggcaaactttacctggcccccctcaccacgtgtgggaacctgcccttccgacggatctgcaagcgcttcggggcggatgtgacatgtggagagatggccgtctgcaccaacctgctgcagggccagatgtccgagtgggccctactcaaacgccaccagtgtgaggacatctttggcgtccagctggagggcgccttccccgacaccatgaccaagtgtgccgagctgctgagccgcaccgtggaggtggactttgtggacatcaacgtcggctgccccatcgacctcgtgtacaagaagggtgggggctgtgccctcatgaatcgctccaccaagttccagcagatcgtccgtggcatgaaccaggtgctggatgtgccgctgactgtgaagatccgcacaggcgtccaggagcgtgtgaacctggcgcaccgcctgctgcccgagctgcgggactggggcgtggcactcgtcacgctccacggccgctctcgggagcagcgctacaccaagctagccgactggcagtacatcgaggagtgcgtgcaggccgccagccccatgcccctgttcggaaatggggacatcttgtcatttgaggatgccaaccgcgccatgcagactggtgtcaccgggatcatgattgcccgtggcgccctgctcaagccgtggctcttcacggagatcaaggagcagcggcactgggacatctcgtcgtccgagcgcctggacatcctgcgggacttcaccaactacggcctggagcactggggctcggacacgcagggcgtggagaagacccggcgctttctgctcgagtggctgtccttcctgtgccggtacgtgcccgtggggctgctggagcggctcccacagaggatcaacgagcggccgccctactacctgggccgcgactacctggagacgctgatggccagccagaaggcagccgactggatccgcatcagcgagatgctccttgggccagtgccccccagcttcgccttcttgccgaagcacaaggccaacgcgtacaagtagcctcaggctttcccaggggcaccctggggcgaggagagtacaataaattttattctttt

SEQ ID NO: 5211 - protein, 650 aa, Homo sapiens
MAEGTAEAPLENGGGGDSGAGALERGVAPIKRQYLTTKEQFHQFLEAKGQEKTCRETEVGDPAGNELAEPEAKRIRLEDGQTADGQTEEAAEPGEQLQTQKRARGQNKGRPHVKPTNYDKNRLCPSLIQESAAKCFFGDRCRFLHDVGRYLETKPADLGPRCVLFETFGRCPYGVTCRFAGAHLRPEGQNLVQEELAARGTQPPSIRNGLDKALQQQLRKREVRFERAEQALRRFSQGPTPAAAVPEGTAAEGAPRQENCGAQQVPAGPGTSTPPSSPVRTCGPLTDEDVVRLRPCEKKRLDIRGKLYLAPLTTCGNLPFRRICKRFGADVTCGEMAVCTNLLQGQMSEWALLKRHQCEDIFGVQLEGAFPDTMTKCAELLSRTVEVDFVDINVGCPIDLVYKKGGGCALMNRSTKFQQIVRGMNQVLDVPLTVKIRTGVQERVNLAHRLLPELRDWGVALVTLHGRSREQRYTKLADWQYIEECVQAASPMPLFGNGDILSFEDANRAMQTGVTGIMIARGALLKPWLFTEIKEQRHWDISSSERLDILRDFTNYGLEHWGSDTQGVEKTRRFLLEWLSFLCRYVPVGLLERLPQRINERPPYYLGRDYLETLMASQKAADWIRISEMLLGPVPPSFAFLPKHKANAYK

SEQ ID NO: 5212 - DNA, 1785 bp, Homo sapiens
cgggttttccaatctctgtgtagctagcagttctcttcgtgttagtgtggcagccgtgccagttccacatttgtgattgctttatttccctggtaattaaaccttgtgccattctattcctgttaaatccgtagaaaatgagaaaatactcgacattttgggggaaacttgtaaatctgagccagtaaaagaagaaagttccgagctggagcagccatttgcacaggacacaagtagcgtggggccagacagaaagcttgcggaggaagaggacctatttgacagcgcccatccggaagagggtgatttagatttggccagcgagtcaacagcacacgctcagtcgagcaaggcagacagcctgttagcggtagtgaaaagggagcccgcggagcagccaggcgatggcgagaggacggactgtgagcctgtagggctagagccggcagttgagcagagtagtgcggcctccgagctcgcggaggcctctagcgaggagctcgcagaagcacccacggaagccccaagcccagaagccagagatagcaaagaagacgggaggaagtttgattttgacgcttgtaatgaagtccctccggctcctaaagagtcctcaaccagtgagggcgctgatcagaaaatgaggtttgttttttctcagttttagaccagacgctatctccttttcattggtcatgtaatgacacacataagctgtttttttctgcaattggccagccagactgacgaaattgtagttttgcttctaaagaatgtttcgtttctctttgtgtgtttttaatgggtgattcaattccttttctttttctcaacctaccatggttgtgttcttaaattcttcctaattacctttagcccagcagaattaattaactcctgtgggtctgaaatcttatggttaggtcagattttcaatacaagtttgtcggggtatcattttttcagaactaaatttcgggtaggtatgcaacctcagcacgaattttatggttttgagtttgtttcctccatgctgcttccttgtggagtgacattgtcttttgtctctagttctcccgaagatgactcggatacaaaaaggctttccaaagaggaaaagggtcgcagcagttgtggtagaaatttctgggttagtggactctcttctacaaccagagctacagatttgaagaatcttttcagcaaatatgggaaggtggtgggcgccaaggttgtgacaaatgcccggagtcctggagctcgctgttacggttttgtcacgatgtccacagcagaagaggccacaaaatgcattaaccacctgcacaagacggagctccacggaaagatgatctccgtggagaaagccaaaaatgaacctgtgggaaagaaaacctctgacaaaagagacagtgacgggaaaaaggagaagtcgagcaacagtgacagatctacaaaccttaagagggatgataaatgtgacagaaaagatgatgctaagaagggtgacgacggaagtggagaaaagagtaaggaccaagatgatcagaaacctggcccctcagagcgatctcgagccacaaagtcaggaagtcgagggaccgaacggactgtagtaatggataaatccaaaggggtgcctgtgattagtgtaaaaacgtccgggtccaaagagagagcttccaaaagccaggatcgcaaatcagccagcagagagaagcggtccgtcgtgtcctttgataaggtcaaggagcctcggaagtcaagagactcagagtcccatag

SEQ ID NO: 5213 - DNA, 3151 bp, Homo sapiens
cgaactccgccccctcttctccgcgtaggcccagctccctgaagcggctgtttcgagccacgcgcccatcgggtaccgaggcacgcgccgggcgtcacgtgcgtttcgcggcgagcggaaatgacgcgagttgtgtgagccgccagtatggccgggctatggcggcgagcactggctacgtgcgactgtggggagcggcgcggtgctgggtgctgcggcggccgatgctggccgccgccggggggcgggttcccactgcagcaggagcgtggttgctccgaggccagcggacctgcgacgcctctcctccttgggcactgtggggccgaggcccggcaattgggggccaatggcgggggttttgggaagcgagcagccgcggcggaggcgcattctcggggggcgaggacgcctccgagggcggcgcggaggaaggagccggcggcgcggggggcagcgcgggcgccggggaaggcccggtcataacggcgctcacgcccatgacgatccccgatgtgtttccgcacctgccgctcatcgccatcacccgcaacccggtgttcccgcgctttatcaagattatcgaggttaaaaataagaagttggttgagctgctgagaaggaaagttcgtctcgcccagccttatgtcggcgtctttctaaagagagatgacagcaatgagtcggatgtggtcgagagcctggatgaaatctaccacacggggacgtttgcccagatccatgagatgcaggaccttggggacaagctgcgcatgatcgtcatgggacacagaagagtccatatcagcagacagctggaggtggagcccgaggagccggaggcggagaacaagcacaagccccgcaggaagtcaaagcggggcaagaaggaggcggaggacgagctgagcgccaggcacccggcggagctggcgatggagcccacccctgagctcccggctgaggtgctcatggtggaggtagagaacgttgtccacgaggacttccaggtcacggaggaggtgaaagccctgactgcagagatcgtgaagaccatccgggacatcattgccttgaaccctctctacagggagtcagtgctgcagatgatgcaggctggccagcgggtggtggacaaccccatctacctgagcgacatgggcgccgcgctcaccggggccgagtcccatgagctgcaggacgtcctggaagagaccaatgtggaggagaagatcaagcagacccaccgtaagtacctgctgcaggagcagctaaagatcatcaagaaggagctgggcctggagaaggacgacaaggatgccatcgaggagaagttccgggagcgcctgaaggagctcgtggtccccaagcacgtcatggatgttgtggacgaggagctgagcaagctgggcctgctggacaaccactcctcggagttcaatgtcacccgcaactacctagactggctcacgtccatcccttggggcaagtacagcaacgagaacctggacctggcgcgggcacaggcagtgctggaggaagaccactacggcatggaggacgtcaagaaacgcatcctggagttcattgccgttagccagctccgcggctccacccagggcaagatcctctgcttctatggcccccctggcgtgggtaagaccagcattgctcgctccatcgcccgcgccctgaaccgagagtacttccgcttcagcgtcgggggcatgactgacgtggctgagatcaagggccacaggcggacctacgtgggcgccatgcccgggaagatcatccagtgtttgaagaagaccaagacggagaaccccctgatcctcatcgacgaggtggacaagatcggccgaggctaccagggggacccgtcgtcggcactgctggagctgctggacccagagcagaatgccaacttcctggaccactacctggacgtgcccgtggacttgtccaaggtgctgttcatctgcacggccaacgtcacggacaccatccccgagccgctgcgagaccgtatggagatgatcaacgtgtcgggctacgtggcccaggagaagctggccattgcggagcgctacctggtgccccaggctcgcgccctgtgtggcttggatgagagcaaggccaagctgtcatcggacgtgctgacgctgctcatcaagcagtactgccgcgagagcggtgtccgcaacctgcagaagcaagtggagaaggtgttacggaaatcggcctacaagattgtcagcggcgaggccgagtccgtggaggtgacgcccgagaacctgcaggacttcgtggggaagcccgtgttcaccgtggagcgcatgtatgacgtgacaccgcccggcgtggtcatggggctggcctggaccgcaatgggaggctccacgctgtttgtggagacatccctgagacggccacaggacaaggatgccaagggtgacaaggatggcagcctggaggtgacaggccagctgggggaggtgatgaaggagagcgcccgcatagcctacaccttcgccagagccttcctcatgcagcacgcccccgccaatgactacctggtgacctcacacatccacctgcatgtgcccgagggcgccacccccaaggacggcccaagcgcaggctgcaccatcgtcacggccctgctgtccctggccatgggcaggcctgtccggcagaatctggccatgactggcgaagtctccctcacgggcaagatcctgcctgttggtggcatcaaggagaagaccattgcggccaagcgcgcaggggtgacgtgcatcgtcctgccagccgagaacaagaaggacttctacgacctggcagccttcatcaccgagggcctggaggtgcacttcgtggaacactaccgggagatcttcgacatcgccttcccggacgagcaggcagaggcgctggccgtggaacggtgacggccaccccgggactgcaggcggcggatgtcaggccctgtctgggccagaactgagcgctgtggggagcgcgcccggacctggcagtggagccaccgagcgagcagctcggtccagtgacccagatcccagggacctcagtcggcttaatcagagtgtggcatagaagctatttaatgattaaagtcatttgcagt

SEQ ID NO: 5214 - DNA, 3198 bp, Homo sapiens
ggagggcttaaggaagtaaaatggcggacctggcgaacgaagaaaagcctgccattgctccgcccgtctttgtgtttcagaaggataaaggacaaaagtcccctgcagagcaaaaaaacttgtcggattcgggagaggagcctcggggggaggctgaggccccccaccatggcacgggtcaccccgagtcagctggcgagcatgccctagaacctcctgcccctgctggcgcctcagccagcactcctccgcctcccgctcctgaagcccagcttcctccttttccgcgagaactggcagggaggtcagctggcggctccagtcctgaaggcggagaagattctgacagagaagatggaaattactgccctcctgtcaagcgagaaagaacatcctctttaacccagttcccaccctcacagtcagaggaaaggagcagtggcttccggttgaagccaccaacgctgatccacggccaagcccccagcgcaggtctgccaagccagaagcccaaggagcagcagcggagcgtgcttcgcccggcagtgttacaagctccgcagccaaaggcgctgtcccagactgtccccagcagtggcaccaacggggtcagcctcccagcagactgcacgggggcagtgcccgcagcatcccctgacactgctgcatggagaagtccttccgaagctgccgatgaggagaaagagccccagaaaaatgagtccagcaatgcctctgaagaggaagcctgtgagaaaaaagaccccgccacacagcaagcctttgtatttgggcagaacttgagggacagagttaagctgataaatgagagcgtggacgaagccgacatggagaatgctggacaccccagcgcagacacgccaaccgcaacgaactatttcctccagtatatcagttccagtttagagaactcaaccaatagtgccgacgcctccagcaacaaatttgtatttggccagaacatgagcgagcgagttttgagccccccaaaattaaacgaggtcagttcagatgccaacagggaaaatgcagctgccgagtcagggtctgagtcctcgtcccaggaggccacccctgagaaagggtccctggctgagtcggcagccgcctacaccaaggcaacagcgcggaagtgtttgttggaaaaagtggaagtcatcaccggggaggaggcggagagcaatgtgttacagatgcagtgcaagctgtttgtctttgacaagacctcacagtcctgggtggagagaggccgggggctgctcagactcaatgacatggcgtccaccgatgacggcacactacagtcccgactagtgatgcggacccaggggagcctgcgactgatcctcaacaccaagctgtgggcccagatgcagatcgacaaggccagcgagaagagcattcgcatcacagccatggacaccgaggaccagggcgtgaaggtcttcctgatctcggccagctccaaggacacaggtcagttgtatgcagccctgcaccaccgcatcctggccctgcgcagccgcgtggagcaggagcaggaggccaagatgcccgcgcctgagcctggggcagccccatccaacgaggaggacgacagcgacgatgacgatgtcctggctccttcaggggccaccgcagctggtgctggtgacgaaggggacgggcagacgaccgggagcacatagcggccgggagcccggctgcacaccaggctgctgctttgtccgtctatccacccgcccacccgcccccaccccaccggcagcgtccaggtgcggggccgggaaccacacaccccactgggccggccacagtctggacccgcacgtcctgttcaaaagcagactcgggaactgcctgaatgtggtttgggacacgagacctcatcatattgatgagcgaacaaacaagaacatttcctccctcccctcctttgaattgaaatggcacattaagacttgtcacggcttctcactgggactggagacctcgttccttcaccccgcgtgtcgccagcctctgggtccagccagagcccctggcttctccgccacccacacccttcccaccctgctgtggggccctgcctttgtggggagcagccagccctctgcccctgcccagggctccccaactataggcctgggacccccgcccagcttggggggctgctcgtacgagtgtagacactgggcccattggacgtgctgttaactactatcttcatttcccacttcccctctctgattgggggtgtatattttacatctttttttctttttattttcgaaggctttgttttggtttcttaggttaagatgctctcgagcgttgagcaggcacagctctgtcgaggtccctgtcccccacctgtggttctggcctctgaggttgggggactacttgtttcccaccccaggttcctccaggccaagtcatggggtgatgaggagttggggccctgtctgtcctaggcctggagagtgcctgtctgggaaaaggtcactggacctggaagggtccccagggtcccctgactcccgtctccatctgtcacgtggttcaccatcatcaggcaccaggcgcaaactgcttcccgctgttggccatcccttccccagccacaggtgtccctgcccccaggacagtccagggccaggggcttctgtgagaggcagagggggaccctcaccaaatcttggtggaagagcccaggggctggtcccagaacaggcagtctcacaagcacgcagcacactggagtggacgcctgtgcccacccgagcctggagcatggccaagagccagcttgcaccacccacctgggaggccgaggaggaggtcccctgggcacagggcctctttgggacttcagaggaaatctcccagtcccactctcggagggttaagagaaggcctcctgcagctgtgccgtccacacctctaggtcgccagagccctgcccccagcccccagcaagcctgagcccgggaagaaccagaggccctcccgagagacccagtcacacgtctctgctttaagccttagccagctagtgacgagtacaacgagataacgcccatgtgttttggaacatttatgtaagattgtcatatgaaatgtatttgggaactacattaaacttttaactaaaaaaaaaaaaaaaaaaaaaaa

SEQ ID NO: 5215 - protein, 562 aa, Homo sapiens
MADLANEEKPAIAPPVFVFQKDKGQKSPAEQKNLSDSGEEPRGEAEAPHHGTGHPESAGEHALEPPAPAGASASTPPPPAPEAQLPPFPRELAGRSAGGSSPEGGEDSDREDGNYCPPVKRERTSSLTQFPPSQSEERSSGFRLKPPTLIHGQAPSAGLPSQKPKEQQRSVLRPAVLQAPQPKALSQTVPSSGTNGVSLPADCTGAVPAASPDTAAWRSPSEAADEEKEPQKNESSNASEEEACEKKDPATQQAFVFGQNLRDRVKLINESVDEADMENAGHPSADTPTATNYFLQYISSSLENSTNSADASSNKFVFGQNMSERVLSPPKLNEVSSDANRENAAAESGSESSSQEATPEKGSLAESAAAYTKATARKCLLEKVEVITGEEAESNVLQMQCKLFVFDKTSQSWVERGRGLLRLNDMASTDDGTLQSRLVMRTQGSLRLILNTKLWAQMQIDKASEKSIRITAMDTEDQGVKVFLISASSKDTGQLYAALHHRILALRSRVEQEQEAKMPAPEPGAAPSNEEDDSDDDDVLAPSGATAAGAGDEGDGQTTGST

SEQ ID NO: 5216 - DNA, 1240 bp, Homo sapiens
tgcgcgtgcgcagggataagagagcggtctggacagcgcgtggccggcgccgctgtggggacagcatgagcggcggttggatggcgcaggttggagcgtggcgaacaggggctctgggcctggcgctgctgctgctgctcggcctcggactaggcctggaggccgccgcgagcccgctttccaccccgacctctgcccaggccgcaggccccagctcaggctcgtgcccacccaccaagttccagtgccgcaccagtggcttatgcgtgcccctcacctggcgctgcgacagggacttggactgcagcgatggcagcgatgaggaggagtgcaggattgagccatgtacccagaaagggcaatgcccaccgccccctggcctcccctgcccctgcaccggcgtcagtgactgctctgggggaactgacaagaaactgcgcaactgcagccgcctggcctgcctagcaggcgagctccgttgcacgctgagcgatgactgcattccactcacgtggcgctgcgacggccacccagactgtcccgactccagcgacgagctcggctgtggaaccaatgagatcctcccggaaggggatgccacaaccatggggccccctgtgaccctggagagtgtcacctctctcaggaatgccacaaccatggggccccctgtgaccctggagagtgtcccctctgtcgggaatgccacatcctcctctgccggagaccagtctggaagcccaactgcctatggggttattgcagctgctgcggtgctcagtgcaagcctggtcaccgccaccctcctccttttgtcctggctccgagcccaggagcgcctccgcccactggggttactggtggccatgaaggagtccctgctgctgtcagaacagaagacctcgctgccctgaggacaagcacttgccaccaccgtcactcagccctgggcgtagccggacaggaggagagcagtgatgcggatgggtacccgggcacaccagccctcagagacctgagctcttctggccacgtggaacctcgaacccgagctcctgcagaagtggccctggagattgagggtccctggacactccctatggagatccggggagctaggatggggaacctgccacagccagaactgaggggctggccccaggcagctcccagggggtagaacggccctgtgcttaagacactcctgctgccccgtctgagggtggcgattaaagttgct

SEQ ID NO: 5217 - protein, 282 aa, Homo sapiens
MSGGWMAQVGAWRTGALGLALLLLLGLGLGLEAAASPLSTPTSAQAAGPSSGSCPPTKFQCRTSGLCVPLTWRCDRDLDCSDGSDEEECRIEPCTQKGQCPPPPGLPCPCTGVSDCSGGTDKKLRNCSRLACLAGELRCTLSDDCIPLTWRCDGHPDCPDSSDELGCGTNEILPEGDATTMGPPVTLESVTSLRNATTMGPPVTLESVPSVGNATSSSAGDQSGSPTAYGVIAAAAVLSASLVTATLLLLSWLRAQERLRPLGLLVAMKESLLLSEQKTSLP

SEQ ID NO: 5218 - DNA, 5077 bp, Homo sapiens
cctcgctcaaggagcacccccggggcaccctcctgtccgatggcagcccggccctgtccaggaatgtcggtatgacggtctctcagaaagggggtccccagccaacaccgagcccggctggccctgggacgcaactcggaccaatcacaggagagatggatgaagccgattctgcgtttttaaaatttaagcagacagctgatgactctctgtcccttacatctccaaacaccgagtccatttttgtagaagatccctacaccgcctcgctgaggagtgagattgagtcagacggccacgagtttgaagctgagtcctggagcctcgccgtggatgcagcctacgccaagaagcaaaagagggaggtggtgaaaagacaagatgtcctttatgagctgatgcagacagaggtgcaccacgtgcggacgctcaagatcatgctgaaggtgtactccagggccctgcaggaggagctgcagttcagcagcaaggccattggccgcctcttcccatgcgctgacgacctgctggagacgcacagccacttcctcgctcggctcaaggagcgccgccaggagtccctggaggagggcagtgaccggaattatgtcatccagaaaatcggcgacctcctggttcagcagttttcaggtgaaaatggggagagaatgaaagaaaagtacggtgtgttttgtagtggccacaatgaagctgttagtcattacaagttgctgcttcagcaaaacaagaaatttcaaaacttgatcaagaaaattggcaacttctccatcgtgcggcggcttggcgtgcaggagtgcattctcctggttacacaacgcataaccaaatacccagtgctggtggagcgcatcatccagaacacggaagctggcactgaggactatgaagacctgacccaggccttgaacctcatcaaagatatcatctcacaagtggacgccaaggtcagtgagtgtgagaagggccagcgcctcagggagatcgcagggaagatggacctgaagtcttccagcaaactcaagaacgggctcaccttccgcaaggaagacatgcttcagcggcagctccacctggagggcatgctatgctggaagaccacatcagggcgcttgaaagatatcctggctatcctgctgaccgacgtacttttgctgctacaagaaaaagatcagaaatacgtctttgcttctgtggactcaaagccacccgtcatctcgttacaaaagctcatcgtgagggaagtggccaacgaggagaaagcgatgtttctgatcagcgcctccttgcaagggccggagatgtatgaaatctacacgagctccaaagaggacaggaacgcctggatggcccacatccaaagggctgtggagagctgccctgacgaggaggaggggcccttcagcctgcccgaagaggaaaggaaggtggtcgaggcccgcgccacgagactccgggactttcaagagcggttgagcatgaaagaccagctgatcgcacagagcctcctagagaaacagcagatctacctggagatggccgagatgggcggcctcgaagacctgccccagccccgaggcctattccgtggaggggacccatccgagaccctgcagggggagctaattctcaagtcggccatgagcgagatcgagggcatccagagcctgatctgcaggcagctgggcagcgccaacggccaggcggaagacggaggcagctccacaggcccgcccaggagggctgagaccttcgcgggctacgactgcacaaacagccccaccaagaatggcagtttcaagaagaaagtcagcagcactgaccccaggccccgagactggcgaggccccccaaacagcccggacttgaagctcagtgacagtgacattcctgggagctctgaggaatcgccgcaggtggtggaggcgccaggcacggaatccgatccccgtctgcccaccgtcctggagtcggagcttgtccagcggatccagacactgtcccagctgctcctgaaccttcaggcggtaatcgcccaccaggacagctatgtggagacgcagcgggctgccatccaggagcgggagaagcagttccggctgcagtcgacgcgtgggaacctgctgctggagcaggagcggcaacgcaacttcgagaagcagcgggaggagcgcgcggccctggagaagctgcagagccagctgcggcacgagcagcagcgctgggagcgcgagcgccagtggcagcaccaggagctggagcgtgcgggcgcgcggctgcaggagcgcgagggcgaggcgcggcagctacgcgagcggctggagcaggagcgggccgagctggagcgccagcgccaggcctaccagcacgacctggagcggctgcgcgaggcccagcgtgccgtggagcgcgagcgggagcgcctggagctgctgcgccgcctcaagaagcagaacaccgcgccaggcgcgctgccgcccgacacactggccgaggcccagcccccaagccaccctcccagcttcaacggggaagggctggagggccctcgtgtgagcatgctgccatccggcgtggggccagagtacgcagagcgccccgaggtggctcgccgggacagcgcccccaccgagaaccggctggccaagagcgatgtgcccatccagctgctcagcgccaccaaccagttccagaggcaggcggccgtgcagcagcagatccccaccaagctggcggcctccaccaagggtggcaaggacaagggcggcaagagcaggggctctcagcgctgggagagctcagcgtccttcgacctgaagcagcagctgctgctcaacaagctcatggggaaagatgagagcacctcacggaaccgccgctcgctgagccctatcctgcccggcagacacagtcctgcgcccccaccagaccctggcttccccgccccgagcccaccgccagctgacagcccctccgagggcttctctctcaaggccgggggcacagccctcctgcccgggcccccagctccctcgccactgccggccacaccactcagcgccaaggaggacgccagcaaagaagacgtcatcttcttctaaaagggccgtgactcaaggaaagtttttaatggaaagttgagccagaactaaaccagggagctgtctgaaatcatagcaccccatccgggtggcggggagatcaactccgagctgtttttccgaggcagtgaggaacggtgccggctctgcacggagctgaggacaggacagaccttgctttgagaaggagctgccggccggggccacgctccacagccgccgcgcgacagtggagccaagggttagggcaccaggaggggccaggtggcgtcggcagcatctgtccccagaatcaggcagaatccacttcccaaacagagccccacgcaggttcaccatgaacctcagggtcagggaatgagccaggcacgggggcatgggcagagagggccacggggcagggcccactgagggaacatcagtggccctccagtcaggttctgtgggtttggaagcccatcgtgaaaggggctgacctttgcccctttttacttggcattggttttgaaaccagctgtttcccaaactctgcttcccaagggcaaccgttgctgttcacacgctcagcctgtctgggggagcgggcctctagcttcagccagggcgggtacacaccctgggcacagggtcctcagcccccgggaaatgagctcccagggctggcgtcccaccttccaggtgggggctggcacatcacagactgtcgagagcgccatgtcccagggcatgcagaggatgcacctagagacgttgcagcaagtggacaagtggccgctgtgcgggcccctcgcttgtagtgagctgttgcagcttacggtccgttccctggaggggtggaggaaggaggtgttgggcagcatcaaaggtgctgggacatcccagggtggtgagatccatccacgatccagctccggtggagaaagggcccatgtcaagccttgttctgcaccccaagcattggtggtaggactgggtcctggctgatcgtccttgttcccagtggggtacatgtgagcccctgccagggccaagtccttctcccgaacccagggtcctgggaactgcagatcccggggggattcagcccttctcccactgtgctggcagaggcactcctgtgacgctgaatacagtgaacagggacattcccgccactcggggacagatgggcacaagggaggggaaactccatcaggaagtgctcccctgggcagaggcgcccactgggtgctgtgggctcaggagggggcggggcaggagctggtgccaaccgggaaccagagccccacagccatacagcccattggtgacaaggtcctgagaacacagtggccaggtgtccccaggctcctggcccctccgacgacctcaactctgcccagcccggtccctggccatcagcgacgctgtccgccccccgtcagatcccatgtgtgccatgtttatcatcagtgttttgtatttttgtactgagtatcggagcactttacagaagctgactgtacattcctgttctgttgtgaagagaacattcccagaccctggcaccctcctgagccggcgtgtgccggtccagccctccgagatgccacaattccttggatgggggagaagttcaaggaatttctgctcggccacgcggtgggaaccccgcgtccccgccatgtggcagaggggtctcagtcgtgctaggcatcgggcggcagcgccgacagcccttccctcgccagtgcccctcggccactcctgggttggagcccgattttatttgtaaagttgacagtcgagcaaatgttcctattttcgtgggatctgcacacgtctttgtcagttgtggtcatgatcttagtcacctgctaattatttttacaatgattacaacatttcctcactgcgggatatttctgacccgctttagaacttaagacctgattctagcaataaacgtgtccgagatg

SEQ ID NO: 5219 - DNA, 2654 bp, Homo sapiens
tctcctgtacctgggcatccagaaaaatggtggtgatggcgcgactctcgcggcccgagcggccggaccttgtcttcgaggaagaggacctcccctatgaggaggaaatcatgcggaaccaattctctgtcaaatgctggcttcgctacatcgagttcaaacagggcgccccgaagcccaggctcaatcagctatacgagcgggcactcaagctgctgccctgcagctacaaactctggtaccgatacctgaaggcgcgtcgggcacaggtgaagcatcgctgtgtgaccgaccctgcctatgaagatgtcaacaactgtcatgagagggcctttgtgttcatgcacaagatgcctcgtctgtggctagattactgccagttcctcatggaccaggggcgcgtcacacacacccgccgcaccttcgaccgtgccctccgggcactgcccatcacgcagcactctcgaatttggcccctgtatctgcgcttcctgcgctcacacccactgcctgagacagctgtgcgaggctatcggcgcttcctcaagctgagtcctgagagtgcagaggagtacattgagtacctcaagtcaagtgaccggctggatgaggccgcccagcgcctggccaccgtggtgaacgacgagcgtttcgtgtctaaggccggcaagtccaactaccagctgtggcacgagctgtgcgacctcatctcccagaatccggacaaggtacagtccctcaatgtggacgccatcatccgcgggggcctcacccgcttcaccgaccagctgggcaagctctggtgttctctcgccgactactacatccgcagcggccatttcgagaaggctcgggacgtgtacgaggaggccatccggacagtgatgaccgtgcgggacttcacacaggtgtttgacagctacgcccagttcgaggagagcatgatcgctgcaaagatggagaccgcctcggagctggggcgcgaggaggaggatgatgtggacctggagctgcgcctggcccgcttcgagcagctcatcagccggcggcccctgctcctcaacagcgtcttgctgcgccaaaacccacaccacgtgcacgagtggcacaagcgtgtcgccctgcaccagggccgcccccgggagatcatcaacacctacacagaggctgtgcagacggtggaccccttcaaggccacaggcaagccccacactctgtgggtggcgtttgccaagttttatgaggacaacggacagctggacgatgcccgtgtcatcctggagaaggccaccaaggtgaacttcaagcaggtggatgacctggcaagcgtgtggtgtcagtgcggagagctggagctccgacacgagaactacgatgaggccttgcggctgctgcgaaaggccacggcgctgcctgcccgccgggccgagtactttgatggttcagagcccgtgcagaaccgcgtgtacaagtcactgaaggtctggtccatgctcgccgacctggaggagagcctcggcaccttccagtccaccaaggccgtgtacgaccgcatcctggacctgcgtatcgcaacaccccagatcgtcatcaactatgccatgttcctggaggagcacaagtacttcgaggagagcttcaaggcgtacgagcgcggcatctcgctgttcaagtggcccaacgtgtccgacatctggagcacctacctgaccaaattcattgcccgctatgggggccgcaagctggagcgggcacgggacctgtttgaacaggctctggacggctgccccccaaaatatgccaagaccttgtacctgctgtacgcacagctggaggaggagtggggcctggcccggcatgccatggccgtgtacgagcgtgccaccagggccgtggagcccgcccagcagtatgacatgttcaacatctacatcaagcgggcggccgagatctatggggtcacccacacccgcggcatctaccagaaggccattgaggtgctgtcggacgagcacgcgcgtgagatgtgcctgcggtttgcagacatggagtgcaagctcggggagattgaccgcgcccgggccatctacagcttctgctcccagatctgtgacccccggacgaccggcgcgttctggcagacgtggaaggactttgaggtccggcatggcaatgaggacaccatcaaggaaatgctgcgtatccggcgcagcgtgcaggccacgtacaacacgcaggtcaacttcatggcctcgcagatgctcaaggtctcgggcagtgccacgggcaccgtgtctgacctggcccctgggcagagtggcatggacgacatgaagctgctggaacagcgggcagagcagctggcggctgaggcggagcgtgaccagcccttgcgcgcccagagcaagatcctgttcgtgaggagtgacgcctcccgggaggagctggcagagctggcacagcaggtcaaccccgaggagatccagctgggcgaggacgaggacgaggacgagatggacctggagcccaacgaggttcggctggagcagcagagcgtgccagccgcagtgtttgggagcctgaaggaagactgacccgtccctcccccatcccccctccccaccccctccccaatacagctacgtttgtacatc

SEQ ID NO: 5220 - protein, 855 aa, Homo sapiens
MVVMARLSRPERPDLVFEEEDLPYEEEIMRNQFSVKCWLRYIEFKQGAPKPRLNQLYERALKLLPCSYKLWYRYLKARRAQVKHRCVTDPAYEDVNNCHERAFVFMHKMPRLWLDYCQFLMDQGRVTHTRRTFDRALRALPITQHSRIWPLYLRFLRSHPLPETAVRGYRRFLKLSPESAEEYIEYLKSSDRLDEAAQRLATVVNDERFVSKAGKSNYQLWHELCDLISQNPDKVQSLNVDAIIRGGLTRFTDQLGKLWCSLADYYIRSGHFEKARDVYEEAIRTVMTVRDFTQVFDSYAQFEESMIAAKMETASELGREEEDDVDLELRLARFEQLISRRPLLLNSVLLRQNPHHVHEWHKRVALHQGRPREIINTYTEAVQTVDPFKATGKPHTLWVAFAKFYEDNGQLDDARVILEKATKVNFKQVDDLASVWCQCGELELRHENYDEALRLLRKATALPARRAEYFDGSEPVQNRVYKSLKVWSMLADLEESLGTFQSTKAVYDRILDLRIATPQIVINYAMFLEEHKYFEESFKAYERGISLFKWPNVSDIWSTYLTKFIARYGGRKLERARDLFEQALDGCPPKYAKTLYLLYAQLEEEWGLARHAMAVYERATRAVEPAQQYDMFNIYIKRAAEIYGVTHTRGIYQKAIEVLSDEHAREMCLRFADMECKLGEIDRARAIYSFCSQICDPRTTGAFWQTWKDFEVRHGNEDTIKEMLRIRRSVQATYNTQVNFMASQMLKVSGSATGTVSDLAPGQSGMDDMKLLEQRAEQLAAEAERDQPLRAQSKILFVRSDASREELAELAQQVNPEEIQLGEDEDEDEMDLEPNEVRLEQQSVPAAVFGSLKED

SEQ ID NO: 5221 - DNA, 1491 bp, Homo sapiens
atggggctgagtccagatgccccagaggacgaggctggcatcaagaaggcagcagagaacatcaaggccttgattgagcatgaaatgaagaacgggatccctgccaatcgaatcgtcctgggaggcttttcacagggcggggccctgtccctctacacggccctcacctgcccccacccgctggctggtatcgtagcatcgagctgctggctgcctctgcaccgggccttcccccaggcagctaaaggcagtggcaagggcctgaccatcctccagtgccatggggagctggaccccatggtgcccgtacggtttgggaccctgacggctgttgtcacacctgccagggtccagttcaagacatactcgggtgtcatgcacagctgctgtcctcaggagatggcagctgtgaaggaatttcttggagaagttgctgccttctgtctaactagtcgctggccccagtgcgcctccaggcccccagcctctgggagaggggagagagctcctcctgccaagaacaccagcccaggccctgtttctagcccagggcgtgccagcgggaccaccagacacttccgggcctaccccaggaaccccgtccccggccatggcccgtcggtcccgggctgcgggcaccgaggtggggctcccccggccagctccgagtgcccggccacggcccccgacagagggcccccggaaatcagtgagcagcgcctcggagcacagtaccaccgagccaagcccggctgccaggaggcggcccagcgccgcccgttctgggccctcagcccgcggaacacccagggctcctgcgcatccctcgcagcccaagccgaaaggactgcaggctctgcgaccccctcaggtcacacccccaaggaaggacgcagccccagcactaggaccgctttcttcctctcctttggccacaccctctccatcgggtaccaaggcaagacccgtaccgcctcccgacaatgcagccactcccctgccagccacgctccctccctctccaccgccacgcccccctcgcaagttccacccacacagctgattatgtcctttccagaagcaggcgtctcttccctggccacagccgcttttgtggcttcagtctctccatcagtttcatcccctctgcagagactctcctcttctggccacattgcctctgcaggcctctccctctcctttgaccacagtctctctgcaggatcctcctctagtttctccctctcttttggcctcaccgcctctgcaggctccgccccacccacaggccccaccttctatgactacgccccctatgcaggccccgccctctctccagaccattcccccaatacaggtcccacattctctgacctcaccgtctctgcaggcacctccctctcctctggctttgtcctctctgcaggccacaacttctttgggctcacccactctgcaggccacacattctttcctgacaatgtcccctag

SEQ ID NO: 5222 - DNA, 1188 bp, Homo sapiens
gtcgccctctgtcccctgctctacctctctgtccttgtctggctctcccgtcaccctccctgcctctgtctctcttctggcctgagcctgggcccagccacctcctgaccggagggaatcggtgacggagcggggccaagggaggggtccggagggagtcagggatggagggcagagggagtggatgtgggggtttgaggacgtgtgacaagctccagcaggggtgggggccgggctgagggtgggggtgcgaggtggtcactcccatcgtgcccctggccgtccctccactcacccacacctggcccagtccacgttgaggtccaggactgggaaggaccgggtgagtgcaccggggacccaggccaggtgccccccggagcctgctggggtggccagagcaggagggggtgtgtttcctttttgtgggtgttgcatgcaaatcaagtggacaagaaaaaataacaaaacaaaaaacaagaaaaaaaaaacacaaaaccccgtaaaatcacaaagaaaatccaacaccaaaggcgcagaagccggctggccgtggtgggggcagcgtaggcgtagcatccctctcctctcacttagcctgttgactcttgttattatcatgatattcacaaaacgccgcatgtttaaaaagtcatagatgtcatcttctctctgcccccagggaggaaagccaccttctcttgccccttggcccctttgtcaggggccaggggtctgccgggtgggggtgccaacaggcctggccctttcctcccctgcatccagccatgggggcctctgcgattgccggaaggttgcatggctggtcccagggccagcacaggcccgaggccgggctgcctggttttatttttatttaactttattttctgttttatgagtgtgtgtccgcccacccccacccccttcagtgttaagtggggagccctgggggagtctctcctgcctcccagcctctcccaagacctcccccctcgtcaccagccatccctctggaccaggcagagggcggaccgggtgggcaggggcctgagggtggctcgggccagcccaccagccaatggacccctcctcaggccgccagtgtcgccctgcccctttttaaaacaaaatgccctcgtttgtaaacccttagacgcttgagaataaaccccttccttttcttcc

SEQ ID NO: 5223 - DNA, 1464 bp, Homo sapiens
cgccgcgagaaggtcacacgattctccaacatggcggcggcggccctgcggagtggctggtgccgctgtccacggagatgcctcggcagtggaatccaatttctttccagccacaacctaccccatgggtcgacctatcagatgcgccggccgggcggagagctgccactgtccaaatcatattcttctggaaacagaaaaggctttctgtccggcttgctagataatgtcaaacaagaattagccaaaaacaaagaaatgaaagaaagtataaaaaaattccgtgacgaggccagaaggctagaagaatcagacgtgctccaggaggccagaaggaaatacaaaaccatcgagtcagaaaccgtgcggacgagcgaggtgctacggaagaagcttggggagctgacgggcaccgtgaaggagagccttcacgaagtcagtaaaagtgatctcggccggaaaatcaaggagggcgtggaggaagcagccaagacggccaagcagtcggccgagtcggtatccaaaggcggggagaagctgggcaggacagcggccttcagagccctctcccagggggtggagtccgtgaagaaggaaattgacgacagcgtcctgggacagaccgggccctaccggaggccccagcgactccggaagagaacggagtttgcgggagataagttcaaggaggagaaagtgtttgagccaaacgaggaggccctgggggtcgtgctgcacaaggactccaagtggtaccagcagtggaaggacttcaaggagaacaacgtggtgtttaaccggttcttcgagatgaagatgaagtatgacgaaagcgacaacgcgttcatccgggcatcccgggcccttacggacaaggtcaccgacttgctggggggcctgttctccaagacagagatgtcggaggtgctcacggagatcctccgggtggacccggcctttgacaaggaccggtttctgaaacagtgcgagaacgacatcatccccaatgtcctggaggccatgatttctggagagcttgacattctcaaagactggtgctatgaagctacttacagccagctggcccaccccatccagcaggccaaggcactgggtctccagttccattctcgcatcctagacattgacaacgtcgacctggccatgggcaagatgatggagcaggggccggtgctgatcatcaccttccaggcacagctggtgatggtggtcaggaaccccaaaggcgaggtggtggagggtgacccggacaaggtgctgcggatgctgtacgtgtgggcgctctgccgagaccaggacgagctcaacccctacgcggcctggcggctcctggacatctcggcctccagcaccgagcagattctctgagtgtggtgccggagccaggtagccccggcctgggtcatcaggcacagaggcaccgcaacaccacctgcggcaact

SEQ ID NO: 5224 - protein, 452 aa, Homo sapiens
MAAAALRSGWCRCPRRCLGSGIQFLSSHNLPHGSTYQMRRPGGELPLSKSYSSGNRKGFLSGLLDNVKQELAKNKEMKESIKKFRDEARRLEESDVLQEARRKYKTIESETVRTSEVLRKKLGELTGTVKESLHEVSKSDLGRKIKEGVEEAAKTAKQSAESVSKGGEKLGRTAAFRALSQGVESVKKEIDDSVLGQTGPYRRPQRLRKRTEFAGDKFKEEKVFEPNEEALGVVLHKDSKWYQQWKDFKENNVVFNRFFEMKMKYDESDNAFIRASRALTDKVTDLLGGLFSKTEMSEVLTEILRVDPAFDKDRFLKQCENDIIPNVLEAMISGELDILKDWCYEATYSQLAHPIQQAKALGLQFHSRILDIDNVDLAMGKMMEQGPVLIITFQAQLVMVVRNPKGEVVEGDPDKVLRMLYVWALCRDQDELNPYAAWRLLDISASSTEQIL

SEQ ID NO: 5225 - DNA, 1611 bp, Homo sapiens
cgccggctccgcccccgtcgggtgtttgtggtggggctgcggagtcgccgatcccgccggaagcgccaggacaatggggacccgagacgacgagtacgactacctattcaaagtggtgctcatcggggactcaggcgtgggcaagagcaacctgctgtcgcgcttcacccgcaacgagttcaacctggagagcaagagcaccatcggcgtggagttcgccacccgcagcatccaggtggacggcaagaccatcaaggcgcagatctgggacaccgctggccaggagcgctaccgcgccatcacctccgcgtactaccgtggtgcagtgggcgccctgctggtgtacgacatcgccaagcacctgacctatgagaacgtggagcgctggctgaaggagctgcgggaccacgcagacagcaacatcgtcatcatgctggtgggcaacaagagtgacctgcgccacctgcgggctgtgcccactgacgaggcccgcgccttcgcagaaaagaacaacttgtccttcatcgagacctcagccttggattccactaacgtagaggaagcattcaagaacatcctcacagagatctaccgcatcgtgtcacagaaacagatcgcagaccgcgctgcccacgacgagtccccggggaacaacgtggtggacatcagcgtgccgcccaccacggacggacagaagcccaacaagctgcagtgctgccagaacctgtgacccctgcgcctccacccagcgtgcgtgcacgtcctccgcccgcccccgccacggtatcctctggcccctccctgctgtccctctgtggccggctcgttccagccctcccagtgagctctgcacggccgggccggggcccaggaaggacaggagccagtgctaccccgtcctgcccggggaaaagctagaagccccggtttgctgcacccatgaaactcgggtccccacagcgtcttggcggggtggggagggcggcaggatggacggggctggccagaggcgaggaggacgggcggacggcgccgccttctccccttttccttggccgactctagggagcgattgcctccctccctctgtgaccgggtggcccagccagcccgtcgtccccacccagaaccgtgctctgggccaaagcccgaagaaccaggcagcgggggccggggcaggcggaccccccgggctctcagcgcccacccgctcctccgcacacagcagctcgcacaggcctcccacctctgcctgttgattgatgcagggagaagcccgtccccccctctcccctctcccctcccctctcctgcacgcaacgcgccctctcggccctccctgtccccctcctctgtctcgtctccccatctggtctggaacctgtttgcaagtgaagcaatatctccgtgttttgtatatacaaccgctcttgtagcctttggtttttgttaatgtagagaaacacagattctttatacactttgtaagatttacgccaaaccccagctctcgatctcttcttctccctgtggcccctgcgctgttgccccgtccccgtcaccccgcccgttactgaaatgtataatctgacttcctgtacagaaacctgc

SEQ ID NO: 5226 - DNA, 2564 bp, Homo sapiens
cgcgccgggaacagccagtcggtgcctaacgcgagtgtatctcgagagagaagcgatcaacagctgccggtctgcgcctgcgcgcggcgggggcgtggcccggggcgagtggggccaaggaggcagccgggagcggcgggcgcaggtgttactggttgcgtcgggtcacgtgggcgcgcaggcgcagcgcggtgcagcccgttcgctcacacaaagcccagacgcggagaaaatggcggcaggggtcgaagcggcggcggaggtggcggcgacggagatcaaaatggaggaagagagcggcgcgcccggcgtgccgagcggcaacggggctccgggccctaagggtgaaggagaacgacctgctcagaatgagaagaggaaggagaaaaacataaaaagaggaggcaatcgctttgagccatatgccaatccaactaaaagatacagagccttcattacaaacataccttttgatgtgaaatggcagtcacttaaagacctggttaaagaaaaagttggtgaggtaacatacgtggagctcttaatggacgctgaaggaaagtcaaggctctatagtgttgttgaattcaagatggaagagagcatgaaaaaagctgcggaagtcctaaacaagcatagtctgagcggaagaccactgaaagtcaaagaagatcctgatggtgaacatgccaggagagcaatgcaaaaggctggaagacttggaagcacagtatttgtagcaaatctggattataaagttggctggaagaaactgaaggaagtatttagtatggctggtgtggtggtccgagcagacattcttgaagataaagatggaaaaagtcgtggaataggcactgttacttttgaacagtccattgaagctgtgcaagctatatctatgttcaatggccagctgctatttgatagaccaatgcacgtcaagatggatgagagggccttaccaaaaggagatttcttccctcctgagcgtccacaacaacttccccatggccttggtggtattggcatggggttaggaccaggagggcaacccattgatgccaatcacctgaataaaggcatcggaatgggaaacataggtcccgcaggaatgggaatggaaggcataggatttggaataaataaaatgggaggaatggaggggccctttggtggtggtatggaaaacatgggtcgatttggatctgggatgaacatgggcaggataaatgaaatcctaagtaatgcactgaagagaggagagatcattgcaaagcagggaggaggtggaggtggaggaagcgtccctgggatcgagaggatgggtcctggcattgaccgcctcgggggtgccggcatggagcgcatgggcgcgggcctgggccacggcatggatcgcgtgggctccgagatcgagcgcatgggcctggtcatggaccgcatgggctccgtggagcgcatgggctccggcattgagcgcatgggcccgctgggcctcgaccacatggcctccagcattgagcgcatgggccagaccatggagcgcattggctctggcgtggagcgcatgggtgccggcatgggcttcggccttgagcgcatggccgctcccatcgaccgtgtgggccagaccattgagcgcatgggctctggcgtggagcgcatgggccctgccatcgagcgcatgggcctgagcatggagcgcatggtgcccgcaggtatgggagctggcctggagcgcatgggccccgtgatggatcgcatggccaccggcctggagcgcatgggcgccaacaatctggagcggatgggcctggagcgcatgggcgccaacagcctcgagcgcatgggcctggagcgcatgggtgccaacagcctcgagcgcatgggccccgccatgggcccggccctgggcgctggcattgagcgcatgggcctggccatgggtggcggtggcggtgccagctttgaccgtgccatcgagatggagcgtggcaacttcggaggaagcttcgcaggttcctttggtggagctggaggccatgctcctggggtggccaggaaggcctgccagatatttgtgagaaatctgccattcgatttcacatggaagatgctaaaggacaaattcaacgagtgcggccacgtgctgtacgccgacatcaagatggagaatgggaagtccaaggggtgtggtgtggttaagttcgagtcgccagaggtggccgagagagcctgccggatgatgaatggcatgaagctgagtggccgagagattgacgttcgaattgatagaaacgcttaagcagttgccttttttaaacatcgatacgagacctctgaatttgtattttttcttgttaaccattttaatttgttggctggatgtataaagatgtttaaaaaattcagttgctttttggggtaatttgaattacttttttaatgactggggttccatttgactgtttgcattgagattgcaatgtgcgcaattttttttgtagttgtggcatcttgttgacatcgaatatgactttgataataaataccggttcctg

SEQ ID NO: 5227 - DNA, 4056 bp, Homo sapiens
agtgaagcggaagccattactctctggagtcgattgccccgagacacatgggccaaggaggggtcagcggcgaattctttcggcctgttggggacccctcgtgtccccacgccagactggacctcccgtatgaacttctcttcgcatcggcggcggcttccgtcacctccgctcccccgatcctattcccagtcgtatgccagcttggagagtcacgtgagagcaagagagtagctttctggttgtcctggtgccctgctcaggcaaactgactgccattctctgaggatggcagctctgtcccccacatttgccacgtccacccaggattccacctgtctccaggactcagaatttcctgtttcttcaaaagaccattcctgtccccagaatttggacctgttcgtgtgcagtggtctggagcctcacacacccagtgttggttcccaggaatcggtgactttccaagatgtcgctgtggactttaccgagaaggagtggcccttgctggattcttctcagagaaaactgtacaaagatgtaatgctggagaactacagcaacctcacttcactggggtatcaggtcggcaaacccagcctcatctcacacttggagcaggaggaggagccgaggacagaggagaggggcgctcaccagggcgcttgtgcagattgggagactccatctaaaaccaagtggtcacttcttatggaagatatttttgggaaggaaacgcccagtggtgtgacgatggaaagagccggtcttggagagaagtccactgaatacgctcacttgttcgaagtctttggcatggaccctcatctcactcagccaatgggaaggcacgctggcaagaggccctatcaccgccgcgactatggggtagcgttcaagggcaggccgcacctcactcagcacatgagcatgtacgacgggagaaaaatgcatgaatgtcatcagtgccaaaaagccttcaccacgagcgcgtccctcacacggcacaggagaatccacaccggggagaagccttacgagtgcagcgactgcgggaaagccttcaacgacccttcagcccttaggagccacgcaagaactcacctcaaagagaagccctttgactgcagtcagtgtggaaatgcattccggaccctctcggccctgaaaatccacatgcgagttcacactggcgagaggccttacaagtgtgatcagtgcgggaaggcttacggccggagctgccacctcatcgcacacaagagaacgcacaccggagagaggccctacgagtgtcacgactgtgggaaagctttccagcacccctcccacctcaaagagcacgtgaggaatcacacgggggagaagccctacgcgtgcacgcagtgcggcaaagccttccgctggaagtccaactttaatttgcacaagaagaaccacatggtggagaagacctacgaatgtaaagaatgcgggaaatcctttggcgatctcgtgtcccggaggaaacacatgaggattcacatcgtcaagaaacccgtggaatgtcggcagtgcgggaagaccttccgaaaccagtccatccttaagactcacatgaactctcacactggagagaaaccatacgggtgcgatctctgcgggaaagctttcagcgcgagttcaaacctcaccgcacacaggaagatacacacgcaagagagacgctacgaatgcgccgcctgcgggaaagtcttcggtgactatttatcccggcggaggcacatgagcgttcaccttgtaaagaaacgagttgagtgtaggcagtgtggcaaggccttcaggaaccagtcaacgctgaagacgcacatgcgaagccacacgggggagaaaccgtacgaatgcgatcactgtgggaaggccttcagcataggctccaacctgaatgtgcacaggcggatccacaccggggagaagccctacgaatgccttgtctgcgggaaagccttcagcgaccactcatccctcaggagccacgtgaaaactcaccggggagagaagctctttgtgtcatccgtgtggaaaaggctccagtgagcgcgcctgctttagagacacaggatgattcagaccggaaacagacctcgtgggtgtaagaggaagcctctgtgagctcgcaccttactgggtgcaaaagaatccacggaacttgggagaagtccagttcctgtaaaaactgggaagacgaggcgttctcatcccataggaggtttgtgagaactcacgccgggggtgaaaatgtacgtctgtagcatggagaagccttcagggtacattcagctcttaacaaacacaggaggacttaatggcagcttggcatttaatgtcaaaatccaagccgtggcatttaatgtcaaaatgacttcagaccacttctagccttctgggcccatgagtaataatgagcacactagggagcatctctgtaaacacagtggctggggaaacccttcctagtctcacttgattcctcatgacggaaatcacactaaagagagaaatcagtgaagtaaggaacgtggaaggtcatgaatgggccgcaaaccacggccagctgcttgtctttgtatggcttgccagctaacaatagtggttccatctttaaggaagaagaatgtttgatggagaaaatttgtggccaatgaagtctgaaatacttcctgtcatctgcccctttccagaaaaacttggccgacccttggtctacagcacgggttctcagtcgggcgacgatttggctgtctaggcgtcatttggcaatgtctagagacatttttggtagttagaatggggggaagatactcctgacttgtaataagaagacatcagagatgctgctaagtcggctccagcacacaggagccccccacaacgaagagttagtgcccccaaacgtcactgttgctgaggttgaaaataatcatgcagtcattcctcaattactgcctgcagcaattcctccatttttatgaatcttgtgagcacttacgctaggagaaatttcttttacaaaacttttaaaatacaattagtgctgataattcctatgtggaaatgattccagccatggtcccctcacttgagcatgtgaatattctcacggagagaagccccagcgagattttccggtgaatacgggattgcacttactctttcatcacggaaacagaccccccgagagaagccccaacgagattttccggtgaatacgggactgcacgtactctctcatcatgaaaacagagccccgttcataaatttttcatctttatttttaaggttatactcctctaaataacccttaagcctcatcaagaaaggtttgtttatagtatttttactatagcttcatccttgataacgtcctaatttccttctggacaacctccttgaccaatggcatattgagatctatgtgacatgaggatatttctcagtaccactttgttactggtacctgatgcacacggattgcgaccagagcatgatgcctccatcaagtggtaatatgtttgcagcctgctgtccagccaagagtgacagatacttctagtgacttccccggtatccactctcatcttcttccaatatcaagagaatccaggttctgtcagattagtaaggtgtgctaatctaaattttaaaaaatctcttacaggttttcttgcagctggtaccatccatgtctcacagccctggccactgacagatcagcagatgtcaccacatgggcttctgagaaagctcttgaatggggatcgttcttaaacatgaattcctccctgtatgttttgttctttgctttacttttcaccttgcaaagagatccagtacctagtattggaagatccaccttaacgaccgtgcatatgaaaaccacagtctaaggaagtgactgcagaaagctcacagcgaccctggcctcccctgtggcctctttgagtgtctgcagcagccctggacttccagacttctatcacatgagaaaaaataaaactgattattggtttaagctgc

SEQ ID NO: 5228 - protein, 595 aa, Homo sapiens
MAALSPTFATSTQDSTCLQDSEFPVSSKDHSCPQNLDLFVCSGLEPHTPSVGSQESVTFQDVAVDFTEKEWPLLDSSQRKLYKDVMLENYSNLTSLGYQVGKPSLISHLEQEEEPRTEERGAHQGACADWETPSKTKWSLLMEDIFGKETPSGVTMERAGLGEKSTEYAHLFEVFGMDPHLTQPMGRHAGKRPYHRRDYGVAFKGRPHLTQHMSMYDGRKMHECHQCQKAFTTSASLTRHRRIHTGEKPYECSDCGKAFNDPSALRSHARTHLKEKPFDCSQCGNAFRTLSALKIHMRVHTGERPYKCDQCGKAYGRSCHLIAHKRTHTGERPYECHDCGKAFQHPSHLKEHVRNHTGEKPYACTQCGKAFRWKSNFNLHKKNHMVEKTYECKECGKSFGDLVSRRKHMRIHIVKKPVECRQCGKTFRNQSILKTHMNSHTGEKPYGCDLCGKAFSASSNLTAHRKIHTQERRYECAACGKVFGDYLSRRRHMSVHLVKKRVECRQCGKAFRNQSTLKTHMRSHTGEKPYECDHCGKAFSIGSNLNVHRRIHTGEKPYECLVCGKAFSDHSSLRSHVKTHRGEKLFVSSVWKRLQ

SEQ ID NO: 5229 - DNA, 523 bp, Homo sapiens
gtgtgcaatggctgcacacagcagcttccttggtagtgtacgcagcctgttggttgtatgggttgctctaagggaccttggagacaggcctttccgatggatgttcatgtttctaaccttgcactaccacaatgtaggctccaaacaggcatgtgaggtgcctttggaaagccccagggcactgtggccagggttgacattggccaagttatcatgtccatccgcaccaagctgcagaacaaggagcatgcgattgaggccttgcgcagggccaagttcaagtttcctggccgccagaagatctacatctcaaagaagtggggcttcaccaagttcaatgctgatgaatttgaagacatggtggctgagaagcggctcatcccagatggctgtggggtcaagtacatccccaatcgtggccctctggacaagtggctggccctgcactcatgagggcttccaatgtgctgccccccctattaatactcaccaataaattctacttcctgtccaaaaaaaaaaa

SEQ ID NO: 5230 - DNA, 1902 bp, Homo sapiens
ctaggtcgggacgccgggctaggggcgcgtcatgtggccgctcacggtcccgccgccgctgctgctgctgctgtgctcaggcctggccggacagactctcttccagaacccagaagagggctggcagctgtacacctcagcccaggcccctgacgggaaatgcatctgcacggccgtgatcccagcgcagagtacctgctctcgagatggcaggagtcgggagctgcggcaactgatggagaaggtccagaacgtctcccagtccatggaggtccttgagttgcggacgtatcgcgacctccagtatgtacgcggcatggagaccctcatgcggagcctggatgcgcggctccgggcagctgatgggtccctctcggccaagagcttccaggagctgaaggacaggatgacggaactgttgcccctgagctcggtcctggagcagtacaaggcagacacgcggaccattgtacgcttgcgggaggaggtgaggaatctctccggcagtctggcggccattcaggaggagatgggtgcctacgggtatgaggacctgcagcaacgggtgatggccctggaggcccggctccacgcctgcgcccagaagctgggctgtgggaagctgaccggggtcagtaaccccatcaccgttcgggccatggggtcccgcttcggctcctggatgactgacacgatggcccccagtgcggatagccgggtctggtacatggatggctattacaaaggccgccgggtcctggagttccgtaccctgggagacttcatcaaaggccagaactttatccagcacctgctgccccagccgtgggcgggcacgggccacgtggtgtacaacggctccctgttctataacaagtaccagagcaacgtggtggtcaaataccacttccgctcgcgctctgtgctggtgcagaggagcctcccgggcgccggttacaacaacaccttcccctactcctggggcggcttctccgacatggacttcatggtggacgagagcgggctctgggctgtgtacaccaccaaccagaacgcgggcaacatcgtggtcagccggctggacccgcacaccctcgaggtcatgcggtcctgggacaccggctaccccaagcgcagcgctggcgaggccttcatgatctgcggtgtgctctacgtgaccaactcccacctggctggggccaaggtctacttcgcctattttaccaacacgtccagttacgagtacacggacgtgcccttccacaaccagtattcccacatctcgatgctggattacaacccccgggagcgcgccctctatacctggaacaacggccaccaggtgctctacaatgtcaccctgtttcacgtcatcagcacctctggggacccctgagccaatgctgtggctcgggctgctgcctggggggcctccgggggctgggggcccttttcattctgcctgtgtccctcaagggtgatctctctgtctctgtcacgccctttctccccgcctttttgctgggcttttgttctctgcctatgtatttctgtctattttttcaatttcccctcttctcctttattgatctctgcttttaatacaccacttctttctttctgcctttttatggatgtctttttctttttatggctctggttctccagttctttccgtctctgcctctctctgtctctctctctctgtccttccacccctccctccttgcttcccacccattcctcatccctcactcccacccccacccccacccccaggagttgagtgcatggatctgtttctttttttatttacactttttctttccggtttgccggaataaacaggacctttgacatttgaaaaaaaaaaaaaaaaaaaaaaaaaaaaaaaaaaaaaaa

SEQ ID NO: 5231 - protein, 454 aa, Homo sapiens
MWPLTVPPPLLLLLCSGLAGQTLFQNPEEGWQLYTSAQAPDGKCICTAVIPAQSTCSRDGRSRELRQLMEKVQNVSQSMEVLELRTYRDLQYVRGMETLMRSLDARLRAADGSLSAKSFQELKDRMTELLPLSSVLEQYKADTRTIVRLREEVRNLSGSLAAIQEEMGAYGYEDLQQRVMALEARLHACAQKLGCGKLTGVSNPITVRAMGSRFGSWMTDTMAPSADSRVWYMDGYYKGRRVLEFRTLGDFIKGQNFIQHLLPQPWAGTGHVVYNGSLFYNKYQSNVVVKYHFRSRSVLVQRSLPGAGYNNTFPYSWGGFSDMDFMVDESGLWAVYTTNQNAGNIVVSRLDPHTLEVMRSWDTGYPKRSAGEAFMICGVLYVTNSHLAGAKVYFAYFTNTSSYEYTDVPFHNQYSHISMLDYNPRERALYTWNNGHQVLYNVTLFHVISTSGDP

SEQ ID NO: 5232 - DNA, 1578 bp, Homo sapiens
aggaggcctcgtggaggacacagcagcatgggacagtcagggaggtcccggcaccagaagcgcgcccgcgcccaggcgcagctccgcaacctcgaggcctatgccgcgaacccgcactcgttcgtgttcacgcgaggctgcacgggtcgcaacatccggcagctcagcctggacgtgcggcgggtcatggagccgctcactgccagccgtctgcaggttcgtaagaagaactcgctgaaggactgcgtggcagtggctgggcccctcggggtcacacactttctgatcctgagcaaaacagagaccaatgtctactttaagctgatgcgcctcccaggaggccccaccttgaccttccaggtgaagaagtactcgctggtgcgtgatgtggtctcctcactgcgccggcaccgcatgcacgagcagcagtttgcccacccacccctcctggtactcaacagctttggcccccatggtatgcatgtgaagctcatggccaccatgttccagaacctgttcccctccatcaacgtgcacaaggtgaacctgaacaccatcaagcgctgcctcctcatcgactacaaccccgactcccaggagctggacttccgccactatagcatcaaagttgttcctgtgggcgcgagtcgcgggatgaagaagctgctccaggagaagttccccaacatgagccgcctgcaggacatcagcgagctgctggccacgggcgcggggctgtcggagagcgaggcagagcctgacggcgaccacaacatcacagagctgcctcaggctgtcgctggccgtggcaacatgcgggcccagcagagtgcagtgcggctcaccgagatcggcccgcggatgacactgcagctcatcaaggtccaggagggcgtcggggagggcaaagtgatgttccacagttttgtgagcaagacggaggaggagctgcaggccatcctggaagccaaggagaagaagctgcggctgaaggcgcagaggcaggcccagcaggcccagaatgtgcagcgcaagcaggagcagcgggaggcccacagaaagaagagcctggagggcatgaagaaggcacgggtcgggggtagtgatgaagaggcctctgggatcccttcaaggacggcgagcctggagttgggtgaggacgatgatgaacaggaagatgatgacatcgagtatttctgccaggcggtgggcgaggcgcccagtgaggacctgttccccgaggccaagcagaaacggcttgccaagtctccagggcggaagcggaagcggtgggaaatggatcgaggcaggggtcgcctttgtgaccagaagtttcccaagaccaaggacaagtcccagggagcccaggccaggcgggggcccagaggggcttcccgggatggtgggcgaggccggggccggggccgcccagggaagagagtggcctgagcccaagccgcaccggagcagcggctggattgaacgccccagattggggcccgagatgtggccctcggtttcctttcataaaggagttgtgtccccagcccttccactccagtaaagaactgaattggc

SEQ ID NO: 5233 - protein, 473 aa, Homo sapiens
MGQSGRSRHQKRARAQAQLRNLEAYAANPHSFVFTRGCTGRNIRQLSLDVRRVMEPLTASRLQVRKKNSLKDCVAVAGPLGVTHFLILSKTETNVYFKLMRLPGGPTLTFQVKKYSLVRDVVSSLRRHRMHEQQFAHPPLLVLNSFGPHGMHVKLMATMFQNLFPSINVHKVNLNTIKRCLLIDYNPDSQELDFRHYSIKVVPVGASRGMKKLLQEKFPNMSRLQDISELLATGAGLSESEAEPDGDHNITELPQAVAGRGNMRAQQSAVRLTEIGPRMTLQLIKVQEGVGEGKVMFHSFVSKTEEELQAILEAKEKKLRLKAQRQAQQAQNVQRKQEQREAHRKKSLEGMKKARVGGSDEEASGIPSRTASLELGEDDDEQEDDDIEYFCQAVGEAPSEDLFPEAKQKRLAKSPGRKRKRWEMDRGRGRLCDQKFPKTKDKSQGAQARRGPRGASRDGGRGRGRGRPGKRVA

SEQ ID NO: 5234 - DNA, 1115 bp, Homo sapiens
ctttttgcgatgcctactggggactttgattcgaagcccagttgggccgaccaggtggaggaggagggggaggacgacaaatgtgtcaccagcgagctcctcaaggggatccctctggccacaggtgacaccagcccagagccagagctactgccgggagctccactgccgcctcccaaggaggtcatcaacggaaacataaagacagtgacagagtacaagatagatgaggatggcaagaagttcaagattgtccgcaccttcaggattgagacccggaaggcttcaaaggctgtcgcaaggaggaagaactggaagaagttcgggaactcagagtttgacccccccggacccaatgtggccaccaccactgtcagtgacgatgtctctatgacgttcatcaccagcaaagaggacctgaactgccaggaggaggaggaccctatgaacaaactcaagggccagaagatcgtgtcctgccgcatctgcaagggcgaccactggaccacccgctgcccctacaaggatacgctggggcccatgcagaaggagctggccgagcagctgggcctgtctactggcgagaaggagaagctgccgggagagctagagccggtgcaggccacgcagaacaagacagggaagtatgtgccgccgagcctgcgcgacggggccagccgccgcggggagtccatgcagcccaaccgcagagccgacgacaacgccaccatccgtgtcaccaacttgtcagaggacacgcgtgagaccgacctgcaggagctcttccggcctttcggctccatctcccgcatctacctggctaaggacaagaccactggccaatccaagggcttcgccttcatcagcttccaccgccgcgaggatcgtgcgcgtgccattgccggggtgtccggctttggctacgaccacctcatcctcaacgtcgagtgggccaagccgtccaccaactaagccagctgccaccgtgtactcggtccgggacccttggcgacagaagacagcctccgagagcgcgggctccaagggcaataaagcagctccactctcaaaaaaaaaaaaaaaaaaaaaaaaaaaaaaaaaaaaaaaaaaaaaaa

SEQ ID NO: 5235 - protein, 320 aa, Homo sapiens
MPTGDFDSKPSWADQVEEEGEDDKCVTSELLKGIPLATGDTSPEPELLPGAPLPPPKEVINGNIKTVTEYKIDEDGKKFKIVRTFRIETRKASKAVARRKNWKKFGNSEFDPPGPNVATTTVSDDVSMTFITSKEDLNCQEEEDPMNKLKGQKIVSCRICKGDHWTTRCPYKDTLGPMQKELAEQLGLSTGEKEKLPGELEPVQATQNKTGKYVPPSLRDGASRRGESMQPNRRADDNATIRVTNLSEDTRETDLQELFRPFGSISRIYLAKDKTTGQSKGFAFISFHRREDRARAIAGVSGFGYDHLILNVEWAKPSTN

SEQ ID NO: 5236 - DNA, 1412 bp, Homo sapiens
tgtgaggtcgcgttccccagtgttacggagggtccttgaggcaggagtgaaaattgggtctgggggttagtcctggggtggaggtctgggcacgccgggtcggaccccctccatcttcggttttgcacaccccgctttccagcgcggagtcgcggcgggtagggcggcgtcgcgtgcgtgacgtcatccagcggcgcctcgcgaggctccagtggccttgacctcccgcggcgtgggaggctgcgcggcgatgctgcagttcgtccgggccggggcgcgggcctggcttcggcctaccggcagccagggcctgagttccctggcggaagaggcagcgcgtgcgaccgagaacccggagcaggtggcgagcgagggtctcccggagcccgtgctgcgcaaagtcgagctcccggtacccactcatcgacgcccagtgcaggcctgggtcgagtccttgcggggcttcgagcaggagcgcgtgggcctggccgacctgcaccccgatgttttcgccaccgcgcccaggctggacatactgcaccaggttgctatgtggcagaagaacttcaagagaattagctatgccaagaccaagacgagagccgaggtgcggggcggtggccggaagccttggccgcagaaaggcactgggcgggcccggcatggcagcatccgctctccgctctggcgaggaggaggtgttgcccatggcccccggggccccacaagttactactacatgctgcccatgaaggtgcgggcgctgggtctcaaagtggcactgaccgtcaagctggcccaggacgacctgcacatcatggactccctagagctgcccaccggagacccacagtacctgacagagctggcgcactaccgccgctggggggactccgtactcctcgtggacttaacacacgaggagatgccacagagcatcgtggaggccacctctaggcttaagaccttcaacttgatcccggctgttggcctaaatgtgcacagcatgctcaagcaccagacgctggtcctgacgctgcccaccgtcgccttcctggaggacaagctgctctggcaggactcacgttacagacccctctaccccttcagcctgccctacagcgacttcccccgacccctaccccacgctacccagggcccagcggccaccccgtaccactgttgatgtgaagcacctcttctgagccaggccgagcccctggccgacttgggagcctcaggcccacgcccacccttcgaggaaggtgtcacctggaccccttcattccacggaggaagctgaggccacagggagcggccatcgccattgggaaggggcgactccacggaaagcccagacgggcttctgcatccattccctctttttgtttttaaaataaattgtatttttg

SEQ ID NO: 5237 - DNA, 1626 bp, Homo sapiens
ggcacgaggccgccacccgagccggagcgggctgggccgccaaggcaagatggtggactacagcgtgtgggaccacattgaggtgtctgatgatgaagacgagacgcaccccaacatcgacacggccagtctcttccgctggcggcatcaggcccgggtggaacgcatggagcagttccagaaggagaaggaggaactggacaggggctgccgcgagtgcaagcgcaaggtggccgagtgccagaggaaactgaaggagctggaggtggccgagggcggcaaggcagagctggagcgcctgcaggccgaggcacagcagctgcgcaaggaggagcggagctgggagcagaagctggaggagatgcgcaagaaggagaagagcatgccctggaacgtggacacgctcagcaaagacggcttcagcaagagcatggtaaataccaagcccgagaagacggaggaggactcagaggaggtgagggagcagaaacacaagaccttcgtggaaaaatacgagaaacagatcaagcactttggcatgcttcgccgctgggatgacagccaaaagtacctgtcagacaacgtccacctggtgtgcgaggagacagccaattacctggtcatttggtgcattgacctagaggtggaggagaaatgtgcactcatggagcaggtggcccaccagacaatcgtcatgcaatttatcctggagctggccaagagcctaaaggtggacccccgggcctgcttccggcagttcttcactaagattaagacagccgatcgccagtacatggagggcttcaacgacgagctggaagccttcaaggagcgtgtgcggggccgtgccaagctgcgcatcgagaaggccatgaaggagtacgaggaggaggagcgcaagaagcggctcggccccggcggcctggaccccgtcgaggtctacgagtccctccctgaggaactccagaagtgcttcgatgtgaaggacgtgcagatgctgcaggacgccatcagcaagatggaccccaccgacgcaaagtaccacatgcagcgctgcattgactctggcctctgggtccccaactctaaggccagcgaggccaaggagggagaggaggcaggtcctggggacccattactggaagctgttcccaagacgggcgatgagaaggatgtcagtgtgtgacctgccccagctaccaccgccacctgcttccaggcccctatgtgccccttttcagaaaacagatagatgccatctcgcccgctcctgacttcctctacttgcgctgctcggcccagcctggggggcccgcccagccctccctggcctctccactgtctccactctccagcgcccattcaagtctctgctttgagtcaaggggcttcactgcctgcagccccccatcagcattatgccaaaggcccgggggtccggggaagggcagaggtcaccaggctggtctaccaggtagttggggagggtccccagccaaggggccggctctcgtcactgggctctgttttcactgttcgtctgctgtctgtgtcttctatttggcaaacagcaatgatcttccaataaaagatttcagatgctcaaaaaaaaaaaaaaaaaaaaaa

SEQ ID NO: 5238 - protein, 378 aa, Homo sapiens
MVDYSVWDHIEVSDDEDETHPNIDTASLFRWRHQARVERMEQFQKEKEELDRGCRECKRKVAECQRKLKELEVAEGGKAELERLQAEAQQLRKEERSWEQKLEEMRKKEKSMPWNVDTLSKDGFSKSMVNTKPEKTEEDSEEVREQKHKTFVEKYEKQIKHFGMLRRWDDSQKYLSDNVHLVCEETANYLVIWCIDLEVEEKCALMEQVAHQTIVMQFILELAKSLKVDPRACFRQFFTKIKTADRQYMEGFNDELEAFKERVRGRAKLRIEKAMKEYEEEERKKRLGPGGLDPVEVYESLPEELQKCFDVKDVQMLQDAISKMDPTDAKYHMQRCIDSGLWVPNSKASEAKEGEEAGPGDPLLEAVPKTGDEKDVSV

SEQ ID NO: 5239 - DNA, 2513 bp, Homo sapiens
cgcgcagcgatggaggcgccggggctcgggcggtggaggcggagccggagcgcggccatggcggggtccctgagtgccagaggtggtggtgttgcttatcttctggaaccccatgcagccagatcccaggcctagcggggctggggcctgctgccgattcctgcccctgcagtcacagtgccctgagggggcaggggacgcggtgatgtacgcctccactgagtgcaaggcggaggtgacgccctcccagcatggcaaccgcaccttcagctacaccctggaggatcataccaagcaggcctttggcatcatgaacgagctgcggctcagccagcagctgtgtgacgtcacactgcaggtcaagtaccaggatgcaccggccgcccagttcatggcccacaaggtggtgctggcctcatccagccctgtcttcaaggccatgttcaccaacgggctgcgggagcagggcatggaggtggtgtccattgagggtatccaccccaaggtcatggagcgcctcattgaattcgcctacacggcctccatctccatgggcgagaagtgtgtcctccacgtcatgaacggtgctgtcatgtaccagatcgacagcgttgtccgtgcctgcagtgacttcctggtgcagcagctggaccccagcaatgccatcggcatcgccaacttcgctgagcagattggctgtgtggagttgcaccagcgtgcccgggagtacatctacatgcattttggggaggtggccaagcaagaggagttcttcaacctgtcccactgccaactggtgaccctcatcagccgggacgacctgaacgtgcgctgcgagtccgaggtcttccacgcctgcatcaactgggtcaagtacgactgcgaacagcgacggttctacgtccaggcgctgctgcgggccgtgcgctgccactcgttgacgccgaacttcctgcagatgcagctgcagaagtgcgagatcctgcagtccgactcccgctgcaaggactacctggtcaagatcttcgaggagctcaccctgcacaagcccacgcaggtgatgccctgccgggcgcccaaggtgggccgcctgatctacaccgcgggcggctacttccgacagtcgctcagctacctggaggcttacaaccccagtgacggcacctggctccggttggcggacctgcaggtgccgcggagcggcctggccggctgcgtggtgggcgggctgttgtacgccgtgggcggcaggaacaactcgcccgacggcaacaccgactccagcgccctggactgttacaaccccatgaccaatcagtggtcgccctgcgcccccatgagcgtgccccgtaaccgcatcggggtgggggtcatcgatggccacatctatgccgtcggcggctcccacggctgcatccaccacaacagtgtggagaggtatgagccagagcgggatgagtggcacttggtggccccaatgctgacacgaaggatcggggtgggcgtggctgtcctcaatcgtctcctttatgccgtggggggctttgacgggacaaaccgccttaattcagctgagtgttactacccagagaggaacgagtggcgaatgatcacagcaatgaacaccatccgaagcggggcaggcgtctgcgtcctgcacaactgtatctatgctgctgggggctatgatggtcaggaccagctgaacagcgtggagcgctacgatgtggaaacagagacgtggactttcgtagcccccatgaagcaccggcgaagtgccctggggatcactgtccaccaggggagaatctacgtccttggaggctatgatggtcacacgttcctggacagtgtggagtgttacgacccagatacagacacctggagcgaggtgacccgaatgacatcgggccggagtggggtgggcgtggctgtcaccatggagccctgccggaagcagattgaccagcagaactgtacctgttgaggcacttttgtttcttgggcaaaaatacagtccaatggggagtatcattgtttttgtacaaaaaccgggactaaaagaaaagacagcactgcaaataacccatcttccgggaagggaggccaggatgcctcagtgttaaaatgacatctcaaaagaagtccaaagcgggaatcatgtgcccctcagcggagccccgggagtgtccaagacagcctggctgggaaagggggtgtggaaagagcaggcttccaggagagaggcccccaaaccctctggccgggtaataggcctgggtcccactcacccatgccggcagctgtcaccatgtgatttattcttggatacctgggagggggccaatgggggcctcagggggaggccccctctggaaatgtggttcccagggatgggcctgtacatagaagccaccggatggcacttccccaccggatggacagttattttgttgataagtaaccctgtaattttccaaggaaaataaagaacagactaactagtgtctttc

SEQ ID NO: 5240 - DNA, 2277 bp, Homo sapiens
ttttacaaaacgctctccttgttgaagaagaaggacccccgcatttatcagaaagatgccaccttctataacagaacagcatcgtcatcagacagtgaggaggacccagaagccttggagaagcagaagaaagtgcggcccatgtacctgaaggactacgagaggaaggttatcttggagaaggcaggcaaatatgttgatgaggagaactcagacggggagacttccaatcacagactccaggagacatcgtcgcaaagttatgtggaggaacagaaacagctcaaggaaagcttccgggcatttgtggaggacagtgaggacgaggacggcgctggggagggcggctccagtttgctgcagaaacgtgccaaaaccaggcaggagaaggcccaggaggaggccgactacatcgagtggctgaagggacagaaagagattcggaacccagattccctgaaggaactgacgcatctcaaggaatactggaacgaccctgagttggatgaaggggagcggttcctgcgggattacatcctcaacaaacgctatgaggaggaggaagaggaggaggaagatgaagaggaaatggaggaagaggagggggtccacggtcccccagtccagctggctgtggacgactcctcagacgaaggggagctgtttctgaagaaacaggaggactttgaacagaagtacaatttccgtttcgaggagccggactcagcatcggtcaagacctacccacgcagcatcgcgtcctccgtgcgccgtaaggatgagcgcagaaaggagaagagggaagagactcgggagcgaaagaagagggagaaagcaaagaagcaggaagagctcaagcagctgaagaacctgaagaggaaggagattctggccaagctggagaagctgcggaaagtaacaggcaacgagatgctgggcctcgaggagggggaccttgaagacgacttcgaccctgcccagcacgaccagctcatgcagaagtgctttggggacgagtactacggggccgtggaggaggagaagccacaatttgaggaagaagaagggcttgaagacgactggaactgggacacgtgggacgggcctgagcaggagggagactggagccagcaggagctgcactgtgaggaccccaacttcaacatggacgccgactacgaccccagccagccgaggaagaaaaagcgcgaggcccccttgacgggcaagaagaagcgcaagtcgcccttcgccgcggccgtggggcaggagaagcccgtgtttgaacccggggacaagacgttcgaggagtacctggatgagtattaccggctggactacgaggacatcatcgacgacctgccctgtcgcttcaagtaccgcacagtggtgccctgtgactttggcctcagcactgaggagatcctcgctgctgacgataaggagctgaaccggtggtgctccctaaagaagacctgcatgtacaggtcagagcaggaggagctgcgggacaagcgggcgtacagccagaaggcccagaactcatggaaaaagcggcaggtcttcaagtcactctgccgagaagaggcagagacacctgcggaagccacagggaagccacagagagatgaagccggcccacagaggcagctgccagcccttgatggcagcttgatggggccggagagtcccccagcacaggaagaggaagcccctgtatcaccccacaagaagccagccccccagaagcggaggagggccaagaaggcacggctgctgggccccactgtgatgcttggtggatgcgagttcagccgccagagactgcaggcctttggcctcaaccccaaacggctgcacttccgccagctgggccggcagcggaggaaacaacaggggcccaagaacagctcctgagcaccagggagcaggcaggggcctcaggctcctctcctcaaatcaagccctggacaggtctcgcacccacaagtactatctgctgcagagatcctctcatctgtggccaggcacgcctgtaatcccagcactttgggaggccgaggtgaaaggatcacttgagcccaggaattggagaccagcgtgggcaacttagcgagactccatctctacaaaatgtggtgacacatgcctgtagtcccagctactcaggaggctggggaaggaagatcacttaaggccatgagtttgaggctacagagagctatgattgcaccactgcactccagcctgggcaacaaagcaagaccctgtctcttg

SEQ ID NO: 5241 - DNA, 1749 bp, Homo sapiens
ggcgcttccgcaggaagaaggaagcggcgccgccatcgcctcccggcgctccctccccgactcctaagtccttcggccgccaccatgtccgcctcggctgtcttcattctggacgttaagggcaagccattgatcagccgcaactacaagggcgatgtggccatgagcaagattgagcacttcatgcctttgctggtacagcgggaggaggaaggcgccctggccccgctgctgagccacggccaggtccacttcctatggatcaaacacagcaacctctacttggtggccaccacatcgaagaatgccaatgcctccctggtgtactccttcctgtataagacaatagaggtattctgcgaatacttcaaggagctggaggaggagagcatccgggacaactttgtcatcgtctacgagttgctggacgagctcatggactttggcttcccgcagaccaccgacagcaagatcctgcaggagtacatcactcagcagagcaacaagctggagacgggcaagtcacgggtgccacccactgtcaccaacgctgtgtcctggcgctccgagggtatcaagtataagaagaacgaggtcttcattgatgtcatagagtctgtcaacctgctggtcaatgccaacggcagcgtccttctgagcgaaatcgtcggtaccatcaagctcaaggtgtttctgtcaggaatgccagagctgcggctgggcctcaatgaccgcgtgctcttcgagctcactggccgcagcaagaacaaatcagtagagctggaggatgtaaaattccaccagtgcgtgcggctctctcgctttgacaacgaccgcaccatctccttcatcccgcctgatggtgactttgagctcatgtcataccgcctcagcacccaggtcaagccactgatctggattgagtctgtcattgagaagttctcccacagccgcgtggagatcatggtcaaggccaaggggcagtttaagaaacagtcagtggccaacggtgtggagatatctgtgcctgtacccagcgatgccgactcccccagattcaagaccagtgtgggcagcgccaagtatgtgccggagagaaacgtcgtgatttggagtattaagtctttcccggggggcaaggagtacttgatgcgagcccactttggcctccccagtgtggaaaaggaagaggtggagggccggccccccatcggggtcaagtttgagatcccctacttcaccgtctctgggatccaggtccgatacatgaagatcattgagaaaagtggttaccaggccctgccctgggttcgctacatcacccagagtggcgattaccaacttcgtaccagctagaagggagaagagatgggggcttgaacacggggcttccttacagccccggatgcagattttagagggagggcaggtgcgggctgtgtgtgtctgtgtgagggcaggtcctggacttggcagtttcttgctcccagcacccgccccttcctcacctcttccttattccataggctgggagagaaactctctgcttccctcgcccttggagctttccccatccccctgattttatatgaagaaatagaagaggggcttgaagtccccctcgcgagtgccttcttgcaattacctgccttagcgggtgttgcgggtccctccttcacagccgctgagcccagaggtcccgctggcccctcctctgaattttaggatgtcattaaaaagatgaatcta

SEQ ID NO: 5242 - protein, 423 aa, Homo sapiens
MSASAVFILDVKGKPLISRNYKGDVAMSKIEHFMPLLVQREEEGALAPLLSHGQVHFLWIKHSNLYLVATTSKNANASLVYSFLYKTIEVFCEYFKELEEESIRDNFVIVYELLDELMDFGFPQTTDSKILQEYITQQSNKLETGKSRVPPTVTNAVSWRSEGIKYKKNEVFIDVIESVNLLVNANGSVLLSEIVGTIKLKVFLSGMPELRLGLNDRVLFELTGRSKNKSVELEDVKFHQCVRLSRFDNDRTISFIPPDGDFELMSYRLSTQVKPLIWIESVIEKFSHSRVEIMVKAKGQFKKQSVANGVEISVPVPSDADSPRFKTSVGSAKYVPERNVVIWSIKSFPGGKEYLMRAHFGLPSVEKEEVEGRPPIGVKFEIPYFTVSGIQVRYMKIIEKSGYQALPWVRYITQSGDYQLRTS

SEQ ID NO: 5243 - DNA, 2121 bp, Homo sapiens
atgggggacgagcggccccactactacgggaaacacggaacgccacagaagtatgatcccactttcaaaggacccatttacaataggggctgcacggatatcatatgctgtgtgttcctgctcctggccattgtgggctacgtggctgtaggcatcatagcctggactcatggagaccctcgaaaggtgatctaccccactgacagccggggcgagttctgcgggcagaagggcacaaaaaacgagaacaaaccctatctgttttatttcaacattgtgaaatgtgccagccccctggttctgctggaattccaatgtcccactccccagatctgcgtggaaaaatgccccgaccgctacctcacgtacctgaatgctcgcagctcccgggactttgagtactataagcagttctgtgttcctggcttcaagaacaataaaggagtggctgaggtgcttcaagatggtgactgccctgctgtcctcatccccagcaaacccttggcccggagatgcttccccgctatccacgcctacaagggtgtcctgatggtgggcaatgagacgacctatgaggatgggcatggctcccggaaaaacatcacagacctggtggagggcgccaagaaagccaatggagtcctagaggcgcggcaactcgccatgcgcatatttgaagattacaccgtctcttggtactggattatcataggcctggtcattgccatggcgatgagcctcctgttcatcatcctgcttcgcttcctggctggtattatggtctgggtgatgatcatcatggtgattctggtgctgggctacggaatatttcactgctacatggagtactcccgactgcgtggtgaggccggctctgatgtctctttggtggacctcggctttcagacggatttccgggtgtacctgcacttacggcagacctggttggcctttatgatcattctgagtatccttgaagtcattatcatcttgctgctcatctttctccggaagagaattctcatcgcgattgcactcatcaaagaagccagcagggctgtgggatacgtcatgtgctccttgctctacccactggtcaccttcttcttgctgtgcctctgcatcgcctactgggccagcactgctgtcttcctgtccacttccaacgaagcggtctataagatctttgatgacagcccctgcccatttactgcgaaaacctgcaacccagagaccttcccctcctccaatgagtcccgccaatgccccaatgcccgttgccagttcgccttctacggtggtgagtcgggctaccaccgggccctgctgggcctgcagatcttcaatgccttcatgttcttctggttggccaacttcgtgctggcgctgggccaggtcacgctggccggggcctttgcctcctactactgggccctgcgcaagccggacgacctgccggccttcccgctcttctctgcctttggccgggcgctcaggtaccacacaggctccctggcctttggcgcgctcatcctggccattgtgcagatcatccgtgtgatactcgagtacctggatcagcggctgaaagctgcagagaacaagtttgccaagtgcctcatgacctgtctcaaatgctgcttctggtgcctggagaagttcatcaaattccttaataggaatgcctacatcatgattgccatctacggcaccaatttctgcacctcggccaggaatgccttcttcctgctcatgagaaacatcatcagagtggctgtcctggataaagttactgacttcctcttcctgttgggcaaacttctgatcgttggtagtgtggggatcctggctttcttcttcttcacccaccgtatcaggatcgtgcaggatacagcaccacccctcaattattactgggttcctatactgacggtgatcgttggctcctacttgattgcacacggtttcttcagcgtctatggcatgtgtgtggacacgctgttcctctgcttcttggaggacctggagaggaatgacggctcggccgagaggccttacttcatgtcttccaccctcaagaaactcttgaacaagaccaacaagaaggcagcggagtcctga

SEQ ID NO: 5244 - DNA, 2477 bp, Homo sapiens
gaccgggggcgagcgggcgggcgggcaggcgcgcgccggggaggtgcgggaacacgtgaccggctgaagccccgccccctttgacgccgcgttgcgcctcgacgcaggcccaacccaaatgggagggaggggcgaaaagagataaggggggggctgagggggtgggcgtgagttgcacgtggtgcaagcgggagtgtttgcgtgcgtagtcacgtgacttcggcacctttccctccgctttcgataggttgctccatcatgtgacaatggcgaatttcgcggtttccttcgccatctgacaacttttggcgccttccctttgccgtactgggagtcctccatcacgtgacgagggcacgctctggttttcgctaaggcgttttttgagcggccattaccacgtgatgcaaggcaagcgtcagaggcggagcctccctacggctgcgacattttgcgcctgcgcggccgccatcttacgcccgtcgccctgagtacgttagcggaaatggctccgagaggctttgacgcatgtgtacctttttagtggcggtatctcggccggggattttcgggctccagtggaggtggctatgctcaccccatctcccttgagaggcacagaaggttagagatgtgtgcgaggaacggccaggtccagcgtctcctcgttgctgccccttgagcccgggaccggcgccaatgcgcgcccgggttcttgggttctttcgtcccgcagacctgccttggtgtggcgtccctgggccgtagcttccgaaggctgcagccgacctggtcggggtcctctagcccgccttccccttcccccattgacagatggagaaactgaggcccaggccaaaaaatatctcactagagggctcaccgccatttcctggaaaaattggggctgggactcaacggacgctcgtccagcagcagcgcggagctccgaagtaaaggcgcccgtgaccgagtgctttgtccttacaagcgtggtgttcttgaatgcttccaggcgccttatgaggcccccgatgtacaatctgtgcttaactaaaccccactgtcttccagggtcaggttggccatccgcaggcgtagttgctaggaaggtttgacagatgtccgcctgttgattcagacgttcccaggatttggagcaagaagagcaaggaaggccaggcgcggtggctcacgtttgtaatcccagcactttgggaggccgaggcgggcggatcacgaggtcaggagttcgagaccagcctggccagcatggtgaaaccccgtctctactaaaaatacaaaagaaaattagccgggtgtggtggcacatgcctgtagtcccacctacttgggaggctgaggcaggagaattgtttgacctggcaggcggaggttgcagtgagccgagattgcgccactgcactccagtctgggcgacagagcgagactctgtctcagaaaaaaaaaagagcaaggaggtgttgaaaatgggtttcctggctgggcgtggtggctcacgcttgtaatcccagcactttgggaagctgaggtgggcggatcacttgaggtcaggagtttgagaccagcctggccaacatggtgaaacaccgtctccactaaaaatagaaaaattaactgggtgtggtggagggcgcctgtaatcccagctaatcaggaagctgagacaggaggatcgcttgaacccaggaggcggaggttgcagtgagccgagattgctccattgcactccagcctgggcgatagagtgagactcagcctcaaaaaaaaaaaaaaaaaaaaattcgccaggtgtggtggtgtgcgcctataatcccagctactcaggaggcagaggcacaagaatggcttgaatcacttgaacctgggaggcagaggttacaatgagccgagatggcaccactgcactccagcctgggcgacagagcgagactccgacttcccatcttaaaaaaaaaaaaaaaaaaaaaaaagaagtgtaaagatgtgattatgtggcagggggtaagggttaaaaagaaaacaagaacaagttttcctctgcttagccagcttacttcaaggacagttataacactgaaaagtcgaggccaaaggaatgggctccagacagcctcctccggagcaaagttgaaaagaaaaattcctttactgtctctccttttctgaaccattaaatatgactgtttgccaatggttgtatttagtaagatttgtagactctgtttttcttttgacacagctgcaaggccaacagctgtgcaaagccacaagttatgctaagtcagcagttatgctatagattacatgacctgtgactgtatcattaactgcttttgttttgcttctgtaagtttgcctataaaaaccacactcagtctttgttcaatggtcagcttttcagatacaaatccactgagccggtgtacatctaaataaatcctcctgtttcccgt

SEQ ID NO: 5245 - protein, 91 aa, Homo sapiens
MAPLHSSLGDRARLRLPILKKKKKKKKKCKDVIMWQGVRVKKKTRTSFPLLSQLTSRTVITLKSRGQRNGLQTASSGAKLKRKIPLLSLLF

SEQ ID NO: 5246 - DNA, 1506 bp, Homo sapiens
gttagagcagaggaggtcccagataccaagtggcgcctcccaggaaaggctgggagaagaggtggcctggagtaccccgagatcccagcagcgcacacagtggagggatgaggatggatgggtcctaacccctgattttgatgggatgtgttcatgtcctatctcctctcctggacacattaaggggttgggacaagaagagactcctgtgagatcagcagacctcgtgtttaaggagagaatgcctgcctgcaacactcatggagagggacacttcctggccccacctgctaaatacctccaaactctgggcaggcgcctgcattctcaacacaggacttcccttaacagtttccggatcagtgaccaccaccacgttcaggtttctgaatgcagacccaccacgagggatggattccacccgcccgccctgctgcagatacatgcggcacagcaggcacgtgcctggagagaacagctcctgagcacagcacccttggagccctcaccccgctcacgatcctcaccagtgctgatgatgccgtcatgctgctggcctgagacagtatcccagctacaacaggacgacaccgggttcaggaatatgtggctatcaccttgagcactgacagtggccttccaggctagttgccttccaaacgcaggtagccgacctgcaggagggcctacaaacgggcccagcaagagctgggcaacagctggcttgtgaaatgagacaccttgaccaatatgctttgggtggacggtctcctacatgttcagtggaggccaccaggagcatccatgagcggggaaggggtccacacccttacatggcaagttgatacgatggggtgcttggtggatgggccatggaggtccgtgagctggaactgggcacacgccatcccagagggctcaggatgccccaggaaggaaagaagggcaacagactacacgattggacgtgtgtggttgactgggatgaagttggagggaggggcagggccttgcaggggattggtactgatcccagggaggaagtgttggggcttcatgaactaggatgaaaggaggcccctgagccatgacaaggggcacatccaggatttccgccaccctgaatttagtagagctagtaggccctggtcgtcactctgggcagggatgccgtcagccttgagggtcgccacccacctgtgtgttgccctctgtcctggcagggaaacatacaccccttgtctcaccaccaaccttgcttgtgtagtcagcagggctggccctgccccaaggactcactgcatgtacccggacccctaggcctggcctttgcagcatagttgggagcttctggattccatctgcacctgtgagccccatgctggctgtgcactgcgcgggcctgagactgctggatacaatgttgggcaacaactcagccagcctgatggcagcctcagaggcttactctaacccatcccagaataaatggagacttcatgtgtt

SEQ ID NO: 5247 - DNA, 3614 bp, Homo sapiens
gaccgtgaggccgagccgggagcgggcgtcttgccgaggcccgggcgggcggggagcaacggctacagacgccgcggggccaggtcgttgagggtcggcggcgggcgaggagcgcagggcgctcgggccgggggccgccggcgccatgggcaaccgcgggatggaagagctgatcccgctggtcaacaaactgcaggacgccttcagctccatcggccagagctgccacctggacctgccgcagatcgctgtagtgggcggccagagcgccggcaagagctcggtgctggagaacttcgtgggccgggacttccttccccgcggttcaggaatcgtcacccggcggcctctcattctgcagctcatcttctcaaaaacagaacatgccgagtttttgcactgcaagtccaaaaagtttacagactttgatgaagtccggcaggagattgaagcagagaccgacagggtcacggggaccaacaaaggcatctccccagtgcccatcaaccttcgagtctactcgccacacgtgttgaacttgaccctcatcgacctcccgggtatcaccaaggtgcctgtgggcgaccagcctccagacatcgagtaccagatcaaggacatgatcctgcagttcatcagccgggagagcagcctcattctggctgtcacgcccgccaacatggacctggccaactccgacgccctcaagctggccaaggaagtcgatccccaaggcctacggaccatcggtgtcatcaccaagcttgacctgatggacgagggcaccgacgccagggacgtcttggagaacaagttgctcccgttgagaagaggctacattggcgtggtgaaccgcagccagaaggatattgagggcaagaaggacatccgtgcagcactggcagctgagaggaagttcttcctctcccacccggcctaccggcacatggccgaccgcatgggcacgccacatctgcagaagacgctgaatcagcaactgaccaaccacatccgggagtcgctgccggccctacgtagcaaactacagagccagctgctgtccctggagaaggaggtggaggagtacaagaactttcggcccgacgaccccacccgcaaaaccaaagccctgctgcagatggtccagcagtttggggtggattttgagaagaggatcgagggctcaggagatcaggtggacactctggagctctccgggggcgcccgaatcaatcgcatcttccacgagcggttcccatttgagctggtgaagatggagtttgacgagaaggacttacgacgggagatcagctatgccattaagaacatccatggagtcaggaccgggcttttcaccccggacttggcattcgaggccattgtgaaaaagcaggtcgtcaagctgaaagagccctgtctgaaatgtgtcgacctggttatccaggagctaatcaatacagttaggcagtgtaccagtaagctcagttcctacccccggttgcgagaggagacagagcgaatcgtcaccacttacatccgggaacgggaggggagaacgaaggaccagattcttctgctgatcgacattgagcagtcctacatcaacacgaaccatgaggacttcatcgggtttgccaatgcccagcagaggagcacgcagctgaacaagaagagagccatccccaatcagggggagatcctggtgatccgcaggggctggctgaccatcaacaacatcagcctgatgaaaggcggctccaaggagtactggtttgtgctgactgccgagtcactgtcctggtacaaggatgaggaggagaaagagaagaagtacatgctgcctctggacaacctcaagatccgtgatgtggagaagggcttcatgtccaacaagcacgtcttcgccatcttcaacacggagcagagaaacgtctacaaggacctgcggcagatcgagctggcctgtgactcccaggaagacgtggacagctggaaggcctcgttcctccgagctggcgtctaccccgagaaggaccaggcagaaaacgaggatggggcccaggagaacaccttctccatggacccccaactggagcggcaggtggagaccattcgcaacctggtggactcatacgtggccatcatcaacaagtccatccgcgacctcatgccaaagaccatcatgcacctcatgatcaacaatacgaaggccttcatccaccacgagctgctggcctacctatactcctcggcagaccagagcagcctcatggaggagtcggctgaccaggcacagcggcgggacgacatgctgcgcatgtaccatgccctcaaggaggcgctcaacatcatcggtgacatcagcaccagcactgtgtccacgcctgtacccccgcctgtcgatgacacctggctccagagcgccagcagccacagccccactccacagcgccgaccggtgtccagcatacacccccctggccggcccccagcagtgaggggccccactccagggccccccctgattcctgttcccgtgggggcagcagcctccttctcggcgcccccaatcccatcccggcctggaccccagagcgtgtttgccaacagtgacctcttcccagccccgcctcagatcccatctcggccagttcggatccccccagggattcccccaggagtgcccagcagaagaccccctgctgcgcccagccggcccaccattatccgcccagccgagccatccctgctcgactaggcctcgaggggggcgtgctctcgggggggcctcacgcacccgcggcgcaggagcttcagtggtctggggccctccgccgcccctatgctgggaccaggctcccagtgggcagccctggcctcttccttaacgctggccccggtccagggccggcccctgtgcctggctggacaccgcactgcgcaaaggggccctggagctccaggcagggggcgctggggtgttgcactttgggggatggagtctcagggtggcagaggggggaccagaacccttgacaccatcctgaatgaggggtccagcctgggggggactctaccaaggtcttcttgggctgggaaagcccatgtagggcaggccttctataagtgcgggcaccaagggcgcctacatccccaggccttgctggggtgcaggggtatatcaacttcccattagcaggagctccccagcggcaagcctggcccagtgggctcggtagtgcccagctggcaggcctgaggtgtacatagtccttcccggccatattaaccacacagcctgagcctggcccagcctcggctgccagaggtgcctttgctaggcccggagccgttggcccgggccggccttgccctattcctctcctcctcctcctcctgggtcccccagggtggctgggcttgggctatgtgggtggtggtggcggggggtcttgggggcctctcagctcccgcccatgcctccctgatgggtgggcccagggcggcctctctctgaggagacctcacccactcctcgctcagtttgaccactgtaagtgcctgcactctgtattctattaataaactaaaataaagggaagacgctgctggtg

SEQ ID NO: 5248 - DNA, 2954 bp, Homo sapiens
cggcggcggcggcggcggcggcggcggcggcggcggcggcggcggcggcagcggcggcggcctgggcccgggcgcagcggcggcggcggcggggcctggagccggatctaagatggcagcggcggcggcggcggtggggccgggcgcgggcggcgcggggtcggcggtcccgggcggcgcggggccctgcgctaccgtgtcggtgttccccggcgcccgcctcctcaccatcggcgacgcgaacggcgagatccagcggcacgcggagcagcaggcgctgcgcctcgaggtgcgcgccggcccggactcggcgggcatcgccctctacagccatgaagatgtgtgtgtctttaagtgctcagtgtcccgagagacagagtgcagccgtgtgggcaagcagtccttcatcatcaccctgggctgcaacagcgtcctcatccagttcgccacacccaacgatttctgttccttctacaacatcctgaaaacctgccggggccacaccctggagcggtctgtgttcagcgagcggacggaggagtcttctgccgtgcagtacttccagttttatggctacctgtcccagcagcagaacatgatgcaggactacgtgcggacaggcacctaccagcgcgccatcctgcaaaaccacaccgacttcaaggacaagatcgttcttgatgttggctgtggctctgggatcctgtcgttttttgccgcccaagctggagcacggaaaatctacgcggtggaggccagcaccatggcccagcacgctgaggtcttggtgaagagtaacaacctgacggaccgcatcgtggtcatcccgggcaaggtggaggaggtgtcactccccgagcaggtggacatcatcatctcggagcccatgggctacatgctcttcaacgagcgcatgctggagagctacctccacgccaagaagtacctgaagcccagcggaaacatgtttcctaccattggtgacgtccaccttgcacccttcacggatgaacagctctacatggagcagttcaccaaggccaacttctggtaccagccatctttccatggagtggacctgtcggccctccgaggtgccgcggtggatgagtatttccggcagcctgtggtggacacatttgacatccggatcctgatggccaagtctgtcaagtacacggtgaacttcttagaagccaaagaaggagatttgcacaggatagaaatcccattcaaattccacatgctgcattcagggctggtccacggcctggctttctggtttgacgttgctttcatcggctccataatgaccgtgtggctgtccacagccccgacagagcccctgacccactggtaccaggtgcggtgcctgttccagtcaccactgttcgccaaggcaggggacacgctctcagggacatgtctgcttattgccaacaaaagacagagctacgacatcagtattgtggcccaggtggaccagaccggctccaagtccagtaacctcctggatctgaaaaaccccttctttagatacacgggcacaacgccctcacccccacccggctcccactacacatctccctcggaaaacatgtggaacacgggcagcacctacaacctcagcagcgggatggccgtggcagggatgccgaccgcctatgacttgagcagtgttattgccagtggctccagcgtgggccacaacaacctgattcctttagccaacacggggattgtcaatcacacccactcccggatgggctccataatgagcacggggattgtccaagggtcctccggcgcccagggcagtggtggtggcagcacgagtgcccactatgcagtcaacagccagttcaccatgggcggccccgccatctccatggcgtcgcccatgtccatcccgaccaacaccatgcactacgggagctaggggcccgccccgcggactgacagcaccaggaaaccaaatgatgtccctgcccgccgcccccgccgggcggctttcccccttgtactggagaagctcgaacacccggtcacagctctctttgctatgggaactgggacacttttttacacgatgttgccgccgtccccaccctaacccccacctcccggccctgagcgtgtgtcgctgccatattttacacaaaatcatgttgtgggagccctcgtcccccctcctgcccgctctaccctgacctgggcttgtcatctgctggaacaggcgccatggggcctgccagccctgcctgccaggtcccttagcacctgtccccctgcctgtctccagtgggaaggtagcctggccaggcggggcctccccttcgacgaccaggcctcggtcacaacggacgtgacatgctgctttttttaattttatttttttatgaaaagaaccagtgtcaatccgcagaccctctgtgaagccaggccggccgggccgagccagcagcccctctccctagactcagaggcgccgcggggaggggtggccccgccgaggcttcaggggccccctccccaccaaagggttcacctcacacttgaatgtacaacccaccccactgtcgggaaggcctccgtcctcggcccctgcctcttgctgctgtcctgtccccgagcccctgcaggtccccccccgcccccccactcaagagttagagcaggtggctgcaggccttgggcccggagggaaggccactgccggccacttggggcagacacagacacctcaaggatctgtcacggaaggcgtcctttttccttgtagctaacgttaggcctgagtagctcccctccatccttgtagacgctccagtccctactactgtgacggcatttccatccctcccctgcccgggaagggaccttgcagggacctctccctccaaaaaaagaaaaaaagaaaaagaaagaaaaaataaatgaggaaacgtgttgca

SEQ ID NO: 5249 - protein, 608 aa, Homo sapiens
MAAAAAAVGPGAGGAGSAVPGGAGPCATVSVFPGARLLTIGDANGEIQRHAEQQALRLEVRAGPDSAGIALYSHEDVCVFKCSVSRETECSRVGKQSFIITLGCNSVLIQFATPNDFCSFYNILKTCRGHTLERSVFSERTEESSAVQYFQFYGYLSQQQNMMQDYVRTGTYQRAILQNHTDFKDKIVLDVGCGSGILSFFAAQAGARKIYAVEASTMAQHAEVLVKSNNLTDRIVVIPGKVEEVSLPEQVDIIISEPMGYMLFNERMLESYLHAKKYLKPSGNMFPTIGDVHLAPFTDEQLYMEQFTKANFWYQPSFHGVDLSALRGAAVDEYFRQPVVDTFDIRILMAKSVKYTVNFLEAKEGDLHRIEIPFKFHMLHSGLVHGLAFWFDVAFIGSIMTVWLSTAPTEPLTHWYQVRCLFQSPLFAKAGDTLSGTCLLIANKRQSYDISIVAQVDQTGSKSSNLLDLKNPFFRYTGTTPSPPPGSHYTSPSENMWNTGSTYNLSSGMAVAGMPTAYDLSSVIASGSSVGHNNLIPLANTGIVNHTHSRMGSIMSTGIVQGSSGAQGSGGGSTSAHYAVNSQFTMGGPAISMASPMSIPTNTMHYGS

SEQ ID NO: 5250 - DNA, 1563 bp, Homo sapiens
ggcacgaggggatgttgctgtcaggtctgagtcggttggagtctgacgggtaggcgagacgcgcaggcgcagagagccccagccacgccggcccaggtggcctcagcgagggatgcggagacgcccctgaacgaccatggcatcggccgacgagctgaccttccatgaattcgaggaggccactaatcttctggctgacaccccagatgcagccaccaccagcagaagcgatcagctgaccccacaagggcacgtggctgtggccgtgggctcaggtggcagctatggagccgaggatgaggtggaggaggagagtgacaaggccgcgctcctgcaggagcagcagcagcagcagcagccgggattctggaccttcagctactatcagagcttctttgacgtggacacctcacaggtcctggaccggatcaaaggctcactgctgccccggcctggccacaactttgtgcggcaccatctgcggaatcggccggatctgtatggccccttctggatctgtgccacgttggcctttgtcctggccgtcactggcaacctgacgctggtgctggcccagaggagggacccctccatccactacagcccccagttccacaaggtgaccgtggcaggcatcagcatctactgctatgcgtggctggtgcccctggccctgtggggcttcctgcggtggcgcaagggtgtccaggagcgcatggggccctacaccttcctggagactgtgtgcatctacggctactccctctttgtcttcatccccatggtggtcctgtggctcatccctgtgccttggctgcagtggctctttggggcgctggccctgggcctgtcagccgccgggctggtattcaccctctggcccgtggtccgtgaggacaccaggctggtggccacagtgctgctgtccgtggtcgtgctgctccacgccctcctggccatgggctgtaagttgtacttcttccagtcgctgcctccggagaacgtggctcctcctccccaaatcacatctctgccctcaaacatcgcgctgtcccctaccttgccgcagtccctggccccctcctaggaaggcccgggtcccacaggcaacacctaagtggaccaacccctctgcctgtcctgccccccagacgatgactgaaggctcctttgacaccttgagatgattctgctactttccagacttttcttacaaagcaaacacttttattttctatgcaaaggtgattcagagaatttatataaaggcgggcgaggggcagccgagcagggagctttgggacagggctggggcccccatatcccccccgggccacctgctttccctcctatggctcccctggaacaggagggagagccaagggggcggcccagcctggacagcgcccgctcctgcctgggtgcacacacggcgggcctgagctccagcatctgagtttgggggtatgagaaacaggggagcagaaggagaagaaaactgcctgtgctgcaaaaaaaaaaaaaaaaaaaaaaaaaaaaaaaaaaaaaaaaaaaaaaaaaaaa

SEQ ID NO: 5251 - protein, 316 aa, Homo sapiens
MASADELTFHEFEEATNLLADTPDAATTSRSDQLTPQGHVAVAVGSGGSYGAEDEVEEESDKAALLQEQQQQQQPGFWTFSYYQSFFDVDTSQVLDRIKGSLLPRPGHNFVRHHLRNRPDLYGPFWICATLAFVLAVTGNLTLVLAQRRDPSIHYSPQFHKVTVAGISIYCYAWLVPLALWGFLRWRKGVQERMGPYTFLETVCIYGYSLFVFIPMVVLWLIPVPWLQWLFGALALGLSAAGLVFTLWPVVREDTRLVATVLLSVVVLLHALLAMGCKLYFFQSLPPENVAPPPQITSLPSNIALSPTLPQSLAPS

SEQ ID NO: 5252 - DNA, 1394 bp, Homo sapiens
gaagagactcccgggctcttaacgtcgggtatcaggagtttcttcccggagcaaggacccccaagacggaagaggatggccgcggcggctctgaggagattttggtcccggcgccgcgcagaggcgggcgacgcggtagtggcgaagccgggagtgtgggcgcggctggggtcctgggcccgcgcgctgctccgggactacgccgaggcctgcagggacgcttcggcggaggctagggcccggccggggcgcgccgctgtgtatgtgggtctgctgggcggcgcggcggcctgcttcacgctggcgcccagcgagggtgccttcgaggaggcgctgctggaggcgtcggggaccctcctgctgctggcgccggccacccgcaaccgcgagtccgaagccttcgtgcagaggctgctctggctgcggggccgtggccgcctgcgctacgtcaacctggggctctgctcgctggtgtacgaggcgcccttcgacgcccaggccagcctctaccaggcgcgttgccgctacctgcagccccgctggaccgacttccccggccgggtcctggacgtgggcttcgtgggtcgctggtgggtgctgggggcctggatgcgcgactgcgacatcaacgacgacgaattcctgcacctgccggcgcatttgcgggtggtcgggccccagcagctgcattccgagaccaacgagcggctcttcgatgagaagtacaagcctgtcgtgctcaccgacgatcaggtggaccaggcgctgtgggaggagcaggtcttgcagaaggagaagaaggacaggctcgccctgagccaggcccactcgctggtgcaggcggaggccccgagatgaaaccctgaggcccccgagtcctggcaaactgcttgcctggggtggtgcagttctgagtgtgcctcacctgcagaacagctgagacagatgatgtgcaaagtgttttctcactggatttgcacaagtttggggagcctttctgccccccgtctttgttctttattagctgaagctaattcagagccacctgggtccgggagttggggacagcagaacgacttgacacatgttcatcactggcagagctggtcatgagccttttatataagcctttttcatcgggcctcagaggccctccttaaggaggtaccacattggtcagctgacttgcaaactcttctaaggccacttagattttctttttcaagtttgggttgtggcctggcatggtgatgtctgtaatcccagcagtttgcaaactgaggcaagagaatcgcttgaggccaggagtttgaggccagctagagtgacatagcaagactccgatgctacaaaaaagaataataatagtaattaactaaataaaatttgagctg

SEQ ID NO: 5253 - protein, 260 aa, Homo sapiens
MAAAALRRFWSRRRAEAGDAVVAKPGVWARLGSWARALLRDYAEACRDASAEARARPGRAAVYVGLLGGAAACFTLAPSEGAFEEALLEASGTLLLLAPATRNRESEAFVQRLLWLRGRGRLRYVNLGLCSLVYEAPFDAQASLYQARCRYLQPRWTDFPGRVLDVGFVGRWWVLGAWMRDCDINDDEFLHLPAHLRVVGPQQLHSETNERLFDEKYKPVVLTDDQVDQALWEEQVLQKEKKDRLALSQAHSLVQAEAPR

SEQ ID NO: 5254 - DNA, 5681 bp, Homo sapiens
cgccgcggtgctgagggggaggggagccggcgagcgcgcgcgcagcgggggcgcgggtggcgcgcgtgtgtgtgaagggggggcggtggccgaggcgggcgggcgcgcgcgcgaggcttcccctcgtttggcggcggcggcggcttctttgtttcgtgaagagaagcgagacgcccattctgcccccggccccgcgcggaggggcgggggaggcgccgggaagtcgacggcgccggcggctcctgcaggaggccactgtctgcagctcccgtgaagatgtccactccagacccacccctgggcggaactcctcggccaggtccttccccgggccctggcccttcccctggagccatgctgggccctagcccgggtccctcgccgggctccgcccacagcatgatggggcccagcccagggccgccctcagcaggacaccccatccccacccaggggcctggagggtaccctcaggacaacatgcaccagatgcacaagcccatggagtccatgcatgagaagggcatgtcggacgacccgcgctacaaccagatgaaaggaatggggatgcggtcagggggccatgctgggatggggcccccgcccagccccatggaccagcactcccaaggttacccctcgcccctgggtggctctgagcatgcctctagtccagttccagccagtggcccgtcttcggggccccagatgtcttccgggccaggaggtgccccgctggatggtgctgacccccaggccttggggcagcagaaccggggcccaaccccatttaaccagaaccagctgcaccagctcagagctcagatcatggcctacaagatgctggccagggggcagcccctccccgaccacctgcagatggcggtgcagggcaagcggccgatgcccgggatgcagcagcagatgccaacgctacctccaccctcggtgtccgcaacaggacccggccctggccctggccctggccccggcccgggtcccggcccggcacctccaaattacagcaggcctcatggtatgggagggcccaacatgcctcccccaggaccctcgggcgtgccccccgggatgccaggccagcctcctggagggcctcccaagccctggcctgaaggacccatggcgaatgctgctgcccccacgagcacccctcagaagctgattcccccgcagccaacgggccgcccttcccccgcgccccctgccgtcccacccgccgcctcgcccgtgatgccaccgcagacccagtcccccgggcagccggcccagcccgcgcccatggtgccactgcaccagaagcagagccgcatcacccccatccagaagccgcggggcctcgaccctgtggagatcctgcaggagcgcgagtacaggctgcaggctcgcatcgcacaccgaattcaggaacttgaaaaccttcccgggtccctggccggggatttgcgaaccaaagcgaccattgagctcaaggccctcaggctgctgaacttccagaggcagctgcgccaggaggtggtggtgtgcatgcggagggacacagcgctggagacagccctcaatgctaaggcctacaagcgcagcaagcgccagtccctgcgcgaggcccgcatcactgagaagctggagaagcagcagaagatcgagcaggagcgcaagcgccggcagaagcaccaggaatacctcaatagcattctccagcatgccaaggatttcaaggaatatcacagatccgtcacaggcaaaatccagaagctgaccaaggcagtggccacgtaccatgccaacacggagcgggagcagaagaaagagaacgagcggatcgagaaggagcgcatgcggaggctcatggctgaagatgaggaggggtaccgcaagctcatcgaccagaagaaggacaagcgcctggcctacctcttgcagcagacagacgagtacgtggctaacctcacggagctggtgcggcagcacaaggctgcccaggtcgccaaggagaaaaagaagaaaaagaaaaagaagaaggcagaaaatgcagaaggacagacgcctgccattgggccggatggcgagcctctggacgagaccagccagatgagcgacctcccggtgaaggtgatccacgtggagagtgggaagatcctcacaggcacagatgcccccaaagccgggcagctggaggcctggctcgagatgaacccggggtatgaagtagctccgaggtctgatagtgaagaaagtggctcagaagaagaggaagaggaggaggaggaagagcagccgcaggcagcacagcctcccaccctgcccgtggaggagaagaagaagattccagatccagacagcgatgacgtctctgaggtggacgcgcggcacatcattgagaatgccaagcaagatgtcgatgatgaatatggcgtgtcccaggcccttgcacgtggcctgcagtcctactatgccgtggcccatgctgtcactgagagagtggacaagcagtcagcgcttatggtcaatggtgtcctcaaacagtaccagatcaaaggtttggagtggctggtgtccctgtacaacaacaacctgaacggcatcctggccgacgagatgggcctggggaagaccatccagaccatcgcgctcatcacgtacctcatggagcacaaacgcatcaatgggcccttcctcatcatcgtgcctctctcaacgctgtccaactgggcgtacgagtttgacaagtgggccccctccgtggtgaaggtgtcttacaagggatccccagcagcaagacgggcctttgtcccccagctccggagtgggaagttcaacgtcttgctgacgacgtacgagtacatcatcaaagacaagcacatcctcgccaagatccgttggaagtacatgattgtggacgaaggtcaccgcatgaagaaccaccactgcaagctgacgcaggtgctcaacacgcactatgtggcaccccgccgcctgctgctgacgggcacaccgctgcagaacaagcttcccgagctctgggcgctgctcaacttcctgctgcccaccatcttcaagagctgcagcaccttcgagcagtggtttaacgcaccctttgccatgaccggggaaaaggtggacctgaatgaggaggaaaccattctcatcatccggcgtctccacaaagtgctgcggcccttcttgctccgacgactcaagaaggaagtcgaggcccagttgcccgaaaaggtggagtacgtcatcaagtgcgacatgtctgcgctgcagcgagtgctctaccgccacatgcaggccaagggcgtgctgctgactgatggctccgagaaggacaagaagggcaaaggcggcaccaagaccctgatgaacaccatcatgcagctgcggaagatctgcaaccacccctacatgttccagcacatcgaggagtccttttccgagcacttggggttcactggcggcattgtccaagggctggacctgtaccgagcctcgggtaaatttgagcttcttgatagaattcttcccaaactccgagcaaccaaccacaaagtgctgctgttctgccaaatgacctccctcatgaccatcatggaagattactttgcgtatcgcggctttaaatacctcaggcttgatggaaccacgaaggcggaggaccggggcatgctgctgaaaaccttcaacgagcccggctctgagtacttcatcttcctgctcagcacccgggctggggggctcggcctgaacctccagtcggcagacactgtgatcatttttgacagcgactggaatcctcaccaggacctgcaagcgcaggaccgagcccaccgcatcgggcagcagaacgaggtgcgtgtgctccgcctctgcaccgtcaacagcgtggaggagaagatcctagctgcagccaagtacaagctcaacgtggaccagaaggtgatccaggccggcatgttcgaccagaagtcctccagccatgagcggcgcgccttcctgcaggccatcctggagcacgaggagcaggatgagagcagacactgcagcacgggcagcggcagtgccagcttcgcccacactgcccctccgccagcgggcgtcaaccccgacttggaggagccacctctaaaggaggaagacgaggtgcccgacgacgagaccgtcaaccagatgatcgcccggcacgaggaggagtttgatctgttcatgcgcatggacctggaccgcaggcgcgaggaggcccgcaaccccaagcggaagccgcgcctcatggaggaggacgagctcccctcgtggatcatcaaggacgacgcggaggtggagcggctgacctgtgaggaggaggaggagaagatgttcggccgtggctcccgccaccgcaaggaggtggactacagcgactcactgacggagaagcagtggctcaaggccatcgaggagggcacgctggaggagatcgaagaggaggtccggcagaagaaatcatcacggaagcgcaagcgagacagcgacgccggctcctccaccccgaccaccagcacccgcagccgcgacaaggacgacgagagcaagaagcagaagaagcgcgggcggccgcctgccgagaaactctcccctaacccacccaacctcaccaagaagatgaagaagattgtggatgccgtgatcaagtacaaggacagcagcagtggacgtcagctcagcgaggtcttcatccagctgccctcgcgaaaggagctgcccgagtactacgagctcatccgcaagcccgtggacttcaagaagataaaggagcgcattcgcaaccacaagtaccgcagcctcaacgacctagagaaggacgtcatgctcctgtgccagaacgcacagaccttcaacctggagggctccctgatctatgaagactccatcgtcttgcagtcggtcttcaccagcgtgcggcagaaaatcgagaaggaggatgacagtgaaggcgaggagagtgaggaggaggaagagggcgaggaggaaggctccgaatccgaatctcggtccgtcaaagtgaagatcaagcttggccggaaggagaaggcacaggaccggctgaagggcggccggcggcggccgagccgagggtcccgagccaagccggtcgtgagtgacgatgacagtgaggaggaacaagaggaggaccgctcaggaagtggcagcgaagaagactgagccccgacattccagtctcgaccccgagcccctcgttccagagctgagatggcataggccttagcagtaacgggtagcagcagatgtagtttcagacttggagtaaaactgtataaacaaaagaatcttccatatttatacagcagagaagctgtaggactgtttgtgactggccctgtcctggcatcagtagcatctgtaacagcattaactgtcttaaagagagagagagagaattccgaattggggaacacacgatacctgtttttcttttccgttgctggcagtactgttgcgccgcagtttggagtcactgtagttaagtgtggatgcatgtgcgtcaccgtccactcctcctactgtattttattggacaggtcagactcgccgggggcccggcgagggtatgtcagtgtcactggatgtcaaacagtaataaattaaaccaacaacaaaacgca

SEQ ID NO: 5255 - protein, 1647 aa, Homo sapiens
MSTPDPPLGGTPRPGPSPGPGPSPGAMLGPSPGPSPGSAHSMMGPSPGPPSAGHPIPTQGPGGYPQDNMHQMHKPMESMHEKGMSDDPRYNQMKGMGMRSGGHAGMGPPPSPMDQHSQGYPSPLGGSEHASSPVPASGPSSGPQMSSGPGGAPLDGADPQALGQQNRGPTPFNQNQLHQLRAQIMAYKMLARGQPLPDHLQMAVQGKRPMPGMQQQMPTLPPPSVSATGPGPGPGPGPGPGPGPAPPNYSRPHGMGGPNMPPPGPSGVPPGMPGQPPGGPPKPWPEGPMANAAAPTSTPQKLIPPQPTGRPSPAPPAVPPAASPVMPPQTQSPGQPAQPAPMVPLHQKQSRITPIQKPRGLDPVEILQEREYRLQARIAHRIQELENLPGSLAGDLRTKATIELKALRLLNFQRQLRQEVVVCMRRDTALETALNAKAYKRSKRQSLREARITEKLEKQQKIEQERKRRQKHQEYLNSILQHAKDFKEYHRSVTGKIQKLTKAVATYHANTEREQKKENERIEKERMRRLMAEDEEGYRKLIDQKKDKRLAYLLQQTDEYVANLTELVRQHKAAQVAKEKKKKKKKKKAENAEGQTPAIGPDGEPLDETSQMSDLPVKVIHVESGKILTGTDAPKAGQLEAWLEMNPGYEVAPRSDSEESGSEEEEEEEEEEQPQAAQPPTLPVEEKKKIPDPDSDDVSEVDARHIIENAKQDVDDEYGVSQALARGLQSYYAVAHAVTERVDKQSALMVNGVLKQYQIKGLEWLVSLYNNNLNGILADEMGLGKTIQTIALITYLMEHKRINGPFLIIVPLSTLSNWAYEFDKWAPSVVKVSYKGSPAARRAFVPQLRSGKFNVLLTTYEYIIKDKHILAKIRWKYMIVDEGHRMKNHHCKLTQVLNTHYVAPRRLLLTGTPLQNKLPELWALLNFLLPTIFKSCSTFEQWFNAPFAMTGEKVDLNEEETILIIRRLHKVLRPFLLRRLKKEVEAQLPEKVEYVIKCDMSALQRVLYRHMQAKGVLLTDGSEKDKKGKGGTKTLMNTIMQLRKICNHPYMFQHIEESFSEHLGFTGGIVQGLDLYRASGKFELLDRILPKLRATNHKVLLFCQMTSLMTIMEDYFAYRGFKYLRLDGTTKAEDRGMLLKTFNEPGSEYFIFLLSTRAGGLGLNLQSADTVIIFDSDWNPHQDLQAQDRAHRIGQQNEVRVLRLCTVNSVEEKILAAAKYKLNVDQKVIQAGMFDQKSSSHERRAFLQAILEHEEQDESRHCSTGSGSASFAHTAPPPAGVNPDLEEPPLKEEDEVPDDETVNQMIARHEEEFDLFMRMDLDRRREEARNPKRKPRLMEEDELPSWIIKDDAEVERLTCEEEEEKMFGRGSRHRKEVDYSDSLTEKQWLKAIEEGTLEEIEEEVRQKKSSRKRKRDSDAGSSTPTTSTRSRDKDDESKKQKKRGRPPAEKLSPNPPNLTKKMKKIVDAVIKYKDSSSGRQLSEVFIQLPSRKELPEYYELIRKPVDFKKIKERIRNHKYRSLNDLEKDVMLLCQNAQTFNLEGSLIYEDSIVLQSVFTSVRQKIEKEDDSEGEESEEEEEGEEEGSESESRSVKVKIKLGRKEKAQDRLKGGRRRPSRGSRAKPVVSDDDSEEEQEEDRSGSGSEED

SEQ ID NO: 5256 - DNA, 5174 bp, Homo sapiens
gccccgagtgcaatcgcgggaagccagggtttccagctaggacacagcaggtcgtgatccgggtcgggacactgcctggcagaggctgcgagcatggggccctggggctggaaattgcgctggaccgtcgccttgctcctcgccgcggcggggactgcagtgggcgacagatgcgaaagaaacgagttccagtgccaagacgggaaatgcatctcctacaagtgggtctgcgatggcagcgctgagtgccaggatggctctgatgagtcccaggagacgtgcttgtctgtcacctgcaaatccggggacttcagctgtgggggccgtgtcaaccgctgcattcctcagttctggaggtgcgatggccaagtggactgcgacaacggctcagacgagcaaggctgtccccccaagacgtgctcccaggacgagtttcgctgccacgatgggaagtgcatctctcggcagttcgtctgtgactcagaccgggactgcttggacggctcagacgaggcctcctgcccggtgctcacctgtggtcccgccagcttccagtgcaacagctccacctgcatcccccagctgtgggcctgcgacaacgaccccgactgcgaagatggctcggatgagtggccgcagcgctgtaggggtctttacgtgttccaaggggacagtagcccctgctcggccttcgagttccactgcctaagtggcgagtgcatccactccagctggcgctgtgatggtggccccgactgcaaggacaaatctgacgaggaaaactgcgctgtggccacctgtcgccctgacgaattccagtgctctgatggaaactgcatccatggcagccggcagtgtgaccgggaatatgactgcaaggacatgagcgatgaagttggctgcgttaatgtgacactctgcgagggacccaacaagttcaagtgtcacagcggcgaatgcatcaccctggacaaagtctgcaacatggctagagactgccgggactggtcagatgaacccatcaaagagtgcgggaccaacgaatgcttggacaacaacggcggctgttcccacgtctgcaatgaccttaagatcggctacgagtgcctgtgccccgacggcttccagctggtggcccagcgaagatgcgaagatatcgatgagtgtcaggatcccgacacctgcagccagctctgcgtgaacctggagggtggctacaagtgccagtgtgaggaaggcttccagctggacccccacacgaaggcctgcaaggctgtgggctccatcgcctacctcttcttcaccaaccggcacgaggtcaggaagatgacgctggaccggagcgagtacaccagcctcatccccaacctgaggaacgtggtcgctctggacacggaggtggccagcaatagaatctactggtctgacctgtcccagagaatgatctgcagcacccagcttgacagagcccacggcgtctcttcctatgacaccgtcatcagcagagacatccaggcccccgacgggctggctgtggactggatccacagcaacatctactggaccgactctgtcctgggcactgtctctgttgcggataccaagggcgtgaagaggaaaacgttattcagggagaacggctccaagccaagggccatcgtggtggatcctgttcatggcttcatgtactggactgactggggaactcccgccaagatcaagaaagggggcctgaatggtgtggacatctactcgctggtgactgaaaacattcagtggcccaatggcatcaccctagatctcctcagtggccgcctctactgggttgactccaaacttcactccatctcaagcatcgatgtcaacgggggcaaccggaagaccatcttggaggatgaaaagaggctggcccaccccttctccttggccgtctttgaggacaaagtattttggacagatatcatcaacgaagccattttcagtgccaaccgcctcacaggttccgatgtcaacttgttggctgaaaacctactgtccccagaggatatggttctcttccacaacctcacccagccaagaggagtgaactggtgtgagaggaccaccctgagcaatggcggctgccagtatctgtgcctccctgccccgcagatcaacccccactcgcccaagtttacctgcgcctgcccggacggcatgctgctggccagggacatgaggagctgcctcacagaggctgaggctgcagtggccacccaggagacatccaccgtcaggctaaaggtcagctccacagccgtaaggacacagcacacaaccacccgacctgttcccgacacctcccggctgcctggggccacccctgggctcaccacggtggagatagtgacaatgtctcaccaagctctgggcgacgttgctggcagaggaaatgagaagaagcccagtagcgtgagggctctgtccattgtcctccccatcgtgctcctcgtcttcctttgcctgggggtcttccttctatggaagaactggcggcttaagaacatcaacagcatcaactttgacaaccccgtctatcagaagaccacagaggatgaggtccacatttgccacaaccaggacggctacagctacccctcgagacagatggtcagtctggaggatgacgtggcgtgaacatctgcctggagtcccgtccctgcccagaacccttcctgagacctcgccggccttgttttattcaaagacagagaagaccaaagcattgcctgccagagctttgttttatatatttattcatctgggaggcagaacaggcttcggacagtgcccatgcaatggcttgggttgggattttggtttcttcctttcctcgtgaaggataagagaaacaggcccggggggaccaggatgacacctccatttctctccaggaagttttgagtttctctccaccgtgacacaatcctcaaacatggaagatgaaaggggaggggatgtcaggcccagagaagcaagtggctttcaacacacaacagcagatggcaccaacgggaccccctggccctgcctcatccaccaatctctaagccaaacccctaaactcaggagtcaacgtgtttacctcttctatgcaagccttgctagacagccaggttagcctttgccctgtcacccccgaatcatgacccacccagtgtctttcgaggtgggtttgtaccttccttaagccaggaaagggattcatggcgtcggaaatgatctggctgaatccgtggtggcaccgagaccaaactcattcaccaaatgatgccacttcccagaggcagagcctgagtcactggtcacccttaatatttattaagtgcctgagacacccggttaccttggccgtgaggacacgtggcctgcacccaggtgtggctgtcaggacaccagcctggtgcccatcctcccgacccctacccacttccattcccgtggtctccttgcactttctcagttcagagttgtacactgtgtacatttggcatttgtgttattattttgcactgttttctgtcgtgtgtgttgggatgggatcccaggccagggaaagcccgtgtcaatgaatgccggggacagagaggggcaggttgaccgggacttcaaagccgtgatcgtgaatatcgagaactgccattgtcgtctttatgtccgcccacctagtgcttccacttctatgcaaatgcctccaagccattcacttccccaatcttgtcgttgatgggtatgtgtttaaaacatgcacggtgaggccgggcgcagtggctcacgcctgtaatcccagcactttgggaggccgaggcgggtggatcatgaggtcaggagatcgagaccatcctggctaacacgtgaaaccccgtctctactaaaaatacaaaaaattagccgggcgtggtggcgggcacctgtagtcccagctactcgggaggctgaggcaggagaatggtgtgaacccgggaagcggagcttgcagtgagccgagattgcgccactgcagtccgcagtctggcctgggcgacagagcgagactccgtctcaaaaaaaaaaaacaaaaaaaaaccatgcatggtgcatcagcagcccatggcctctggccaggcatggcgaggctgaggtgggaggatggtttgagctcaggcatttgaggctgtcgtgagctatgattatgccactgctttccagcctgggcaacatagtaagaccccatctcttaaaaaatgaatttggccagacacaggtgcctcacgcctgtaatcccagcactttgggaggctgagctggatcacttgagttcaggagttggagaccaggcctgagcaacaaagcgagatcccatctctacaaaaaccaaaaagttaaaaatcagctgggtacggtggcacgtgcctgtgatcccagctacttgggaggctgaggcaggaggatcgcctgagcccaggaggtggaggttgcagtgagccatgatcgagccactgcactccagcctgggcaacagatgaagaccctatttcagaaatacaactataaaaaaataaataaatcctccagtctggatcgtttgacgggacttcaggttctttctgaaatcgccgtgttactgttgcactgatgtccggagagacagtgacagcctccgtcagactcccgcgtgaagatgtcacaagggattggcaattgtccccagggacaaaacactgtgtcccccccagtgcagggaaccgtgataagcctttctggtttcggagcacgtaaatgcgtccctgtacagatagtggggattttttgttatgtttgcactttgtatattggttgaaactgttatcacttatatatatatatatacacacatatatataaaatctatttatttttgcaaaccctggttgctgtatttgttcagtgactattctcggggccctgtgtagggggttattgcctctgaaatgcctcttctttatgtacaaagattatttgcacgaactggactgtgtgcaacgctttttgggagaatgatgtccccgttgtatgtatgagtggcttctgggagatgggtgtcactttttaaaccactgtatagaaggtttttgtagcctgaatgtcttactgtgatcaattaaatttcttaaatg

SEQ ID NO: 5257 - DNA, 2680 bp, Homo sapiens
agtctgcgcggcgcggccaggcccggccgaccgcgtctcggtcttcgcgtctgccagcctggctggcagtccgtctgtccatcccgccgcgccggggcagtctaggcggagcgggggctcaggcggcggcggcctcgacgcgagtgagtgtcgtggttggggtgctggacccagagtgcctaccctcgcctgcctgggcctcagtttccacatctgcacaatgggggtgaccatccctgccctgctggctgccaggagcggctgtgagtcttcaggcgtggatgcagcctgggggaagccatagggcgctttcacaggcctggccttcaccatggcgggagggagaccgcatctgaagaggagtttctccatcatcccctgctttgtcttcgtggagtcggtgctgctgggcattgtgatcctgcttgcttaccgcctggagttcacggacaccttccctgtgcacacccagggattcttctgctatgacagtacctacgccaagccctacccagggcctgaggctgccagccgagtgcctcctgctcttgtctacgcactggtcactgccgggcccaccctcacgatcctgctgggagagctggcgcgtgcctttttccctgcaccaccttcagccgtcccagtcatcggggagagcaccatcgtgtctggggcctgctgccgcttcagccccccagtgcggaggctggtccgcttcctgggggtctactccttcggcctcttcaccacgaccatcttcgccaacgcggggcaggtggtgaccggcaatcccacgccacacttcctgtccgtgtgccgccccaactacacggccctgggctgcctgccaccttctccggatcggccaggtcccgaccgctttgtcactgaccagggtgcctgcgctggcagtcccagcctcgtggccgccgcgcgccgcgccttcccctgcaaggatgcggccctctgcgcctacgcggtcacctacacagcgatgtacgtgactctcgtgttccgcgtgaagggctcccgcctggtcaaaccctcgctctgcctggccttgctgtgcccggccttcctggtgggcgtggtccgcgtggccgagtaccgaaaccactggtcggacgtgctggctggcttcctgacaggggcggccatcgccacctttttggtcacctgcgttgtgcataactttcagagccggccaccctctggccgaaggctctctccctgggaggacctgggccaagcccccaccatggatagccccctcgaaaagaacccgaggtctgcaggccgcattcgacaccggcacggctcaccccatccaagtcgcagaactgcgcccgccgtggccacctgatccccagctgtgtctcctccagggccccagccatgtgttcgtcgccccgtgtgccccgtcctcgattgaggtctgagccgacgcccttgcccctgcccctacccctgccagcgcccacccccagccagggcccctcgccttcctcccctggacctggggggccaggcgggggtggtggacgtggccggaagctgctgctgcccacgcccctgctgcgggacctgtacaccctgagtggactctatccctcccccttccaccgggacaacttcagcccttacctgtttgccagccgtgaccacctgctgtgaggcccgaccacccacccagaatctgcccagtccccacttcttccctgccacgcgtgtgtgtgcgtgtgccacgtgagtgccaaagtcccctgccccccaagccagccagacccagacattagaagatggctagaaggacatttaggagacatctgcctctctggccctctgagatatcccgatgggcacaaatggaaggtgcgcacttgcccctactattgcccttttaagggccaaagcttgaccccattggccattgcctggctaatgagaacccctggttctcagaattttaaccaaaaggagttggctccaaccaatgggagccttcccctcacttcttagaatcctcctgcaagagggcaactccagccagtgttcagcgactgaacagccaataggagcccttggtttccagaatttctagagtgggtgggcatgattccagtcaatgggggaccgcccgtgtctaagcatgtgcaaaggagaggagggagatgaggtcattgtttgtcattgagtcttctctcagaatcagcgagcccagctgtagggtggggggcaggctcccccatggcagggtccttggggtaccccttttcctctcagcccctccctgtgtgcggcctctccacctctcacccactctctcctaatcccctacttaagtagggcttgccccacttcagaggttttggggttcagggtgctgtgtctccccttgcctgtgcccaggtcatcccaaacccttctgttatttattagggctgtgggaagggtttttcttctttttcttggaacctgcccctgttcttcacactgccccccatgcctcagcctcatacagatgtgccatcatggggggcatgggtggagcagaggggctccctcaccccgggcaggcaaaggcagtgggtagaggaggcactgcccccctttcctgccccctcctcatctttaataaagacctggcttctcatctttaataaagacctgtttgtaacag

SEQ ID NO: 5258 - DNA, 1849 bp, Homo sapiens
acttagaggcgcctggtcgggaagggcctggtcagctgcgtccggcggaggcagctgctgacccagctgtggactgtgccgggggcgggggacggaggggcaggagccctgggctccccgtggcgggggctgtatcatggaccacctcggggcgtccctctggccccaggtcggctccctttgtctcctgctcgctggggccgcctgggcgcccccgcctaacctcccggaccccaagttcgagagcaaagcggccttgctggcggcccgggggcccgaagagcttctgtgcttcaccgagcggttggaggacttggtgtgtttctgggaggaagcggcgagcgctggggtgggcccgggcaactacagcttctcctaccagctcgaggatgagccatggaagctgtgtcgcctgcaccaggctcccacggctcgtggtgcggtgcgcttctggtgttcgctgcctacagccgacacgtcgagcttcgtgcccctagagttgcgcgtcacagcagcctccggcgctccgcgatatcaccgtgtcatccacatcaatgaagtagtgctcctagacgcccccgtggggctggtggcgcggttggctgacgagagcggccacgtagtgttgcgctggctcccgccgcctgagacacccatgacgtctcacatccgctacgaggtggacgtctcggccggcaacggcgcagggagcgtacagagggtggagatcctggagggccgcaccgagtgtgtgctgagcaacctgcggggccggacgcgctacaccttcgccgtccgcgcgcgtatggctgagccgagcttcggcggcttctggagcgcctggtcggagcctgtgtcgctgctgacgcctagcgacctggaccccctcatcctgacgctctccctcatcctcgtggtcatcctggtgctgctgaccgtgctcgcgctgctctcccaccgccgggctctgaagcagaagatctggcctggcatcccgagcccagagagcgagtttgaaggcctcttcaccacccacaagggtaacttccagctgtggctgtaccagaatgatggctgcctgtggtggagcccctgcacccccttcacggaggacccacctgcttccctggaagtcctctcagagcgctgctgggggacgatgcaggcagtggagccggggacagatgatgagggccccctgctggagccagtgggcagtgagcatgcccaggatacctatctggtgctggacaaatggttgctgccccggaacccgcccagtgaggacctcccagggcctggtggcagtgtggacatagtggccatggatgaaggctcagaagcatcctcctgctcatctgctttggcctcgaagcccagcccagagggagcctctgctgccagctttgagtacactatcctggaccccagctcccagctcttgcgtccatggacactgtgccctgagctgccccctaccccaccccacctaaagtacctgtaccttgtggtatctgactctggcatctcaactgactacagctcaggggactcccagggagcccaagggggcttatccgatggcccctactccaacccttatgagaacagccttatcccagccgctgagcctctgccccccagctatgtggcttgctcttaggacaccaggctgcagatgatcagggatccaatatgactcagagaaccagtgcagactcaagacttatggaacagggatggcgaggcctctctcaggagcaggggcattgctgattttgtctgcccaatccatcctgctcaggaaaccacaaccttgcagtatttttaaatatgtatagtttttttg

SEQ ID NO: 5259 - protein, 508 aa, Homo sapiens
MDHLGASLWPQVGSLCLLLAGAAWAPPPNLPDPKFESKAALLAARGPEELLCFTERLEDLVCFWEEAASAGVGPGNYSFSYQLEDEPWKLCRLHQAPTARGAVRFWCSLPTADTSSFVPLELRVTAASGAPRYHRVIHINEVVLLDAPVGLVARLADESGHVVLRWLPPPETPMTSHIRYEVDVSAGNGAGSVQRVEILEGRTECVLSNLRGRTRYTFAVRARMAEPSFGGFWSAWSEPVSLLTPSDLDPLILTLSLILVVILVLLTVLALLSHRRALKQKIWPGIPSPESEFEGLFTTHKGNFQLWLYQNDGCLWWSPCTPFTEDPPASLEVLSERCWGTMQAVEPGTDDEGPLLEPVGSEHAQDTYLVLDKWLLPRNPPSEDLPGPGGSVDIVAMDEGSEASSCSSALASKPSPEGASAASFEYTILDPSSQLLRPWTLCPELPPTPPHLKYLYLVVSDSGISTDYSSGDSQGAQGGLSDGPYSNPYENSLIPAAEPLPPSYVACS

SEQ ID NO: 5260 - DNA, 2121 bp, Homo sapiens
atttttcagagccctaggaatccgagctgacggatccctgacaggggcgactgactcctagttatccccctaacccctaggggccttcagccccaaccccatcatgacatctcctctgtgcagggcggcctccgccaacgccctgcctcctcaggaccaggcttcgacgccctcttccagggtcaagggcagggaggcttcgggcaaacccagccacctccgaggcaagggcacagcccaggcgtggaccccaggccgttccaagggaggatccttccacagaggtgcagggaagccctctgtgcactctcaggtggctgagttacataaaaagatacaactgttagagggtgaccggaaggctttttttgagagctctcagtggaacatcaagaagaaccaggagaccatcagtcagctccgcaaggagactaaggcactggaactaaagctgctggacctgctcaagggagatgagaaagtggtccaggcagtgattcgcgaatggaagtgggagaagccatacctgaagaacaggacaggacaggccctggagcacctagaccaccggctgagggagaaggtgaagcagcagaacgccctgcggcaccaggtggtgttgcggcagaggcggctggaggagctccagctgcagcacagcctgcgccttctggagatggcggaggcgcaaaacagacacacggaggtggccaagaccatgcggaacctggagaaccgcctggagaaggcccagatgaaggcgcaggaggccgagcacattaccagcgtgtacctgcagctcaaggcctatctaatggacgagagcctcaacttggagaaccggctggactccatggaggctgaggtggtgaggaccaaacatgagctggaggcactgcacgtggtgaaccaagaggccctcaatgcccgggacattgccaagaaccagctgcagtacctagaggagaccttggttcgagagcgcaagaagcgggaacgctacataagtgagtgcaagaagcgcgccgaggagaagaaactggagaacgagcgcatggagcgcaagacccaccgcgagcacctgctgctacagtccgacgacaccatccaggacagcctgcatgccaaggaggaggagctgcggcagcgctggagcatgtaccagatggaggtgatctttggcaaggtcaaggacgccactggcactgacgagacgcactcgttggtgcggcggttcctggcccagggcgacaccttcgcgcagttggagacgctcaagagcgagaacgagcagacgttggtgaggctgaagcaggagaagcaacaactgcagcgggagctggaagacctcaagtactcgggggaggccacgctggtgagccagcagaaactgcaagccgaggcgcaggagcgtctcaagaaggaggagcggcggcacgccgaggccaaggaccagctggagcgcgccttgcgggcgatgcaagtggccaaggacagcctggagcacctggccagcaagctgatccacatcactgtggaggacggccgcttcgcgggaaaggagctggatccccaggcagataactatgtgccaaacctgctgggcctcgtggaggaaaagctgctgaaactgcaggcgcagctccagggccacgacgtgcaggagatgctgtgccacatcgctaaccgcgagttcctcgccagcttagagggaaggctgcccgaatacaacacccgcatcgccctgccccttgccacttccaaggacaagttttttgacgaagagagtgaggaggaggacaacgaggtagtgacccgcgcatcactcaagatccgttcccagaaattaatcgaaagtcacaagaagcaccgtcgctctcggaggtcctagactcgtcctgacacccaccaggcggcccccttcggagcccccgatccctccgggtctagcgcaggccccacggggccccttcaggggctgaacgcggcccggaccgggaacggaggcggccagcggcgcccggaggggaggaaggggccgggccagacgttcccacagtaaatctccccagctgggtccgccccggcctcagagttgcgcaataaatgttaccgaccatg

SEQ ID NO: 5261 - DNA, 2950 bp, Homo sapiens
gctgcgccgccattaagagctagccctcagaactatcctctctaaggtttcacagtcctgcccaagatggccgtctcggctctggcaccgcccccactcctgcctctcccaacatggcgaccctgagtctccgttcccggtgcggaacgtacgaccggaagtgacggggtccagaaatttccgctttctttctgcagcaggaaccgcggctgctggacaagaggggtgcggtggatactgacctttgctccggcctcgtcgtgaagacacagcgcatctccccgctgtaggcttcctcccacagaacccgtttcgggcctcagagcgtctggtgagatgctgttgccgctgctgctgctgctacccatgtgctgggccgtggaggtcaagaggccccggggcgtctccctcaccaatcatcacttctacgatgagtccaagcctttcacctgcctggacggttcggccaccatcccatttgatcaggtcaacgatgactattgcgactgcaaagatggctctgacgagccaggcacggctgcctgtcctaatggcagcttccactgcaccaacactggctataagcccctgtatatcccctccaaccgggtcaacgatggtgtttgtgactgctgcgatggaacagacgagtacaacagcggcgtcatctgtgagaacacctcagagagaagggccgtaaggagagagagtccctgcagcagatggccgaggtcacccgcgaagggttccgtctgaagaagatccttattgaggactggaagaaggcacgggaggagaagcagaaaaagctcattgagctacaggctgggaagaagtctctggaagaccaggtggagatgctgcggacagtgaaggaggaagctgagaagccagagagagaggccaaagagcagcaccagaagctgtgggaagagcagctggctgctgccaaggcccaacaggagcaggagctggcggctgatgccttcaaggagctggatgatgacatggacgggacggtctcggtgactgagctgcagactcacccggagctggacacagatggggatggggcgttgtcagaagcggaagctcaggccctcctcagtggggacacacagacagacgccacctctttctacgaccgcgtctgggccgccatcagggacaagtaccggtccgaggcactgcccaccgaccttccagcaccttctgcccctgacttgacggagcccaaggaggagcagccgccagtgccctcgtcgcccacagaggaggaggaggaggaggaggaggaggaggaagaagaggctgaagaagaggaggaggaggaggattccgaggtgcagggggagcagcccaaggaggccccaccgccactgtcacccccgcagccggccagccctgctgaggaagacaaaatgccgccctacgacgagcagacgcaggccttcatcgatgctgcccaggaggcccgcaacaagttcgaggaggccgagcggtcgctgaaggacatggaggagtccatcaggaacctggagcaagagatttcttttgactttggccccaacggggagtttgcttacctgtacagccagtgctacgagctcaccaccaacgaatacgtctaccgcctctgccccttcaagcttgtctcgcagaaacccaaactcgggggctctcccaccagccttggcacctggggctcatggattggccccgaccacgacaagttcagtgccatgaagtatgagcaaggcacgggctgctggcagggccccaaccgctccaccaccgtgcgcctcctgtgcgggaaagagaccatggtgaccagcaccacagagcccagtcgctgcgagtacctcatggagctgatgacgccagccgcctgcccggagccaccgcctgaagcacccaccgaagacgaccatgacgagctctagctggatgggcgcagaggtgggcggggaggtggagtctcgtcggcctgccccagcaaggggaggcggcgggccctgaggaagatggacccacatggccactctatcaacctgtgtccccatgttccctgcttttttgttttgtttttttgaggtggagtctcactctttggcccaggctggagtgcagtgatgcgacctcagctgactgcaacctctacctcccgggttcaaacaattgtcttgtctcagcctcccaagtagctgggattacaggtgtgcaccaccatgcctggctaatttttagtagagatggggtttcaccatgttggcctggatggtctcgaactcctgacctcagatgatccacctgccttggcctcccaaagtgctgggattacaggcatgagccaccacacccggccatctcctgcctttttttttttggatggagtttcactcttgttgccgagatcatgctactgcactctccagcctgggctacagagtgagactctcaaaaaaaaaaaataataataataagagaaaatagacaaggtctccaggctggtcaactcctggcctcaaatgatcctcccacctcagcctcccaagcagccgggactacaggcaaacatcaccatgtccagctgtccccagctttctaatctggtctttctcttgccccagaacctcaagaaggcatgaagccagcccctgcagtgccgtccacccgcccctctgggcctgcctgtggctctgttgccctcctctgtggcggcaggacctttgtggggcttcgtgccctgctctggggcccaggcggggctggtccacattcccaggccccaacagccttcaaagatgggtaaaggagcttgccctccctgggccccccaccttggtgactcgccccaccacccccagccctgtccctgccacccctcctagtggggactagtgaatgacttgacctgtgacctcaatacaataaatgtgatcccccaccc

SEQ ID NO: 5262 - DNA, 991 bp, Homo sapiens
ggcacgaggggctcatccacctgcagacatggggcgcagaaagtcaaaacgaaagccgcctcccaagaagaagatgacaggcaccctcgagacccagttcacctgccccttctgcaaccacgagaaatcctgtgatgtgaaaatggaccgtgcccgcaacaccggagtcatctcttgtaccgtgtgcctagaggaattccagacgcccataacgtatctgtcagaacccgtggatgtgtacagtgattggatagacgcctgcgaggcggccaatcagtagcgacacagaggacccgccccctgagcagccccgcgtactgtggatccagctgttcggttctggtccagagacattccaggggtccagggtgtgggtcctgggctgtcacagccgtgtgtgtgtgtgtgtgtgtgtgtgtgtgtgtgtgtgtgtgtgtagtgggtgtgcgtgtgggtgtgggtgtgagtgagtgtgggtgtgtgtggctgcacgtgtcactggggtggccgtgagtgtgtgctcacaggtacgcggtggtgtcgggttcctgggcctgaggggcctgaactgatctcacttggctccgaaagcctttgctgtgttccctgcagcccctggccccccagccttggggctctggctccccccggcggaattgggggactgtttcctgacatcctggacaagggaagcccactagaggctggaacaggacctctccagcctcctcaccagcaccgtgcccatctcaactggacttcccgccctccttctccaccttctagtgcccgtggccggggattcaaagccgccgttccccaggtccctgggctgggccctgacagggagccgcccccctccccatggtaaccaggaagcccgtttcatgttcagttgcttttgtagaggaagcaagggctgggatggggacagctgtcaatcacaagcccttaaataaagcagccagcgcacaaaaaaaaaaaaaaaaaa

SEQ ID NO: 5263 - protein, 83 aa, Homo sapiens
MGRRKSKRKPPPKKKMTGTLETQFTCPFCNHEKSCDVKMDRARNTGVISCTVCLEEFQTPITYLSEPVDVYSDWIDACEAANQ

SEQ ID NO: 5264 - DNA, 1354 bp, Homo sapiens
tttctgcccgtggacaccgccgaagaagcatcgttaaagtctctcttcaccctgccgtcatgtctaagtcagagtctcctaaagagcccgaacagctgaggaagctcttcattggagggttgagctttgaaacaactgatgagagcctgaggagccattttgagcaatggggaacgctcacggactgtgtggtaatgagagatccaaacaccaagcgctccaggggctttgggtttgtcacgtatgccactgtggaggaggtggatgcagctatgaatgcaaggccacacaaggtggatggaagagttgtggaaccaaagagagctgtctccagagaagattctcaaagaccaggtgcccacttaactgtgaaaaagatatttgttggtggcattaaagaagacactgaagaacatcacctaagagattattttgaacagtatggaaaaattgaagtgattgaaatcatgactgaccgaggcagtggcaagaaaaggggctttgcctttgtaacctttgacgaccatgactccgtggataagactgtcattcagaaataccatactgtgaatggccacaactgtgaagttagaaaagccctgtcaaagcaagagatggctagtgcttcatccagccaaagaggtcgaagtggttctggaaactttggtggtggtcgtggaggtggtttcggtgggaatgacaacttcggtcgtggaggaaacttcagtggtcgtggtggctttggtggcagccatggtggtggtggatatggtggcagtggggatggctataatggatttggtaatgatggaagcaattttggaggtggtggaagctacaatgattttggcaattacaacaatcagtcttcaaattttggacccatgaagggaggaaattttggaggcagaagctctggcccctatggcggtggaggccaatactttgcaaaaccacgaaaccaagtggctatggcggttccagcagcagcagtagctatggcagtggcagaagattttaattaggaaacaaagcttagcaggagaggagagccagagaagtgacagggaagctacaggttacaatagatttgtgaactcagccaagcacagtggtggcagggcctagctgctacaaagaagacatgttttagacaaatactcatgtgtatgggcaaaaaactcgaggactgtatttgtgactaattgtataacaggttattttagtttctgttctgtggaaagtgtaaagcattccaacaaagggttttaacgtagatttctttttgcaccccatgctgttgattgctaaatgtaatagtctgatcgtgatgctgaataaatgtctttttttt

SEQ ID NO: 5265 - protein, 321 aa, Homo sapiens
MSKSESPKEPEQLRKLFIGGLSFETTDESLRSHFEQWGTLTDCVVMRDPNTKRSRGFGFVTYATVEEVDAAMNARPHKVDGRVVEPKRAVSREDSQRPGAHLTVKKIFVGGIKEDTEEHHLRDYFEQYGKIEVIEIMTDRGSGKKRGFAFVTFDDHDSVDKTVIQKYHTVNGHNCEVRKALSKQEMASASSSQRGRSGSGNFGGGRGGGFGGNDNFGRGGNFSGRGGFGGSHGGGGYGGSGDGYNGFGNDGSNFGGGGSYNDFGNYNNQSSNFGPMKGGNFGGRSSGPYGGGGQYFAKPRNQVAMAVPAAAVAMAVAEDFN

SEQ ID NO: 5266 - DNA, 683 bp, Homo sapiens
ctctttcccttcagtgtgccactgaagatcctggtgtcgccatgggccgccgccccgcccgttgttaccggtattgtaagaacaagccgtacccaaagtctcgcttctgccgaggtgtccctgatgccaagattcgcatttttgacctggggcggaaaaaggcaaaagtggatgagtttccgctctgtggccacatggtgtcagatgaatatgagcagctgtcctctgaagccctggaggctgcccgaatttgtgccaataagtacatggtaaaaagttgtggcaaagatggcttccatatccgggtgcggctccaccccttccacgtcatccgcatcaacaagatgtcgtcctgtgctggggctgacaggctccaaacaggaatgcgaggtgcctttggaaagccccagggcactgtggccagggttcacattggccaagttatcatgtccatccgcaccaagctgcagaacaaggagcgtgtgattgaggccctgcgcagggccaagttcaagtttcctggccgccagaagatccacatctcaaagaagtggggcttcaccaagttcaatgctgatgaatttgaagacatggtggctgctctggacaagtggtgggccctgcactcatgagggcttccaatgtgctgcccccctcttaatactcaccaataaattctactt

SEQ ID NO: 5267 - DNA, 1351 bp, Homo sapiens
ctcttgcggagacgcgcgcgtcggggtttaacgcgtttctgggccgccgtaagcccggcctaggggcagctttgactcgagagccggctataggcgcatggaaggttccctggaacgggaggcgccagcgggggcgctggccgccgtgctaaagcacagctcgacgttgccgcccgaaagcacccaggtccggggctacgacttcaaccgcggtgtgaattaccgcgcactgctggaggccttcggcaccaccggcttccaagcaaccaacttcgggcgcgctgtacagcaagtcaatgccatgatcgagaagaagctggaaccactgtcacaggatgaagaccagcacgcggacctgacccagagccgccgcccacttaccagctgcaccattttcctgggatatacatccaacctcatcagttcaggcatccgtgagaccattcgctaccttgtgcagcacaacatggtggacgtattggtgaccacagctggcggcgtggaggaagacctcatcaagtgcctggcgcccacatacttgggcgagtttagcctcagggggaaggagctccgggagaacgggatcaataggatcggaaacctgctggtgcccaatgagaattactgcaagtttgaggactggctgatgcccattctggaccagatggtgatggagcagaacacagagggtgtaaagtggacgccttctaagatgatcgcccggctgggcaaggagatcaacaacccagagtccgtgtattactgggcccagaagaaccacatccctgtgtttagtcccgcacttacagacggctcgctgggcgacatgatcttcttccattcctacaagaacccgggcctggtcctggacatcgttgaggacctgaggctcatcaacacacaggccatctttgccaagtgcactgggatgatcattctgggcgggggcgtggtcaagcaccacattgccaatgccaacctcatgcggaacggggccgactacgctgtttacatcaacacagcccaggagtttgatggctctgactcaggtgcccgaccagacgaggctgtctcctggggcaagatccgggtggatgcacagcccgtcaaggtctatgctgacgcctccctggtcttccccctgcttgtggctgaaacctttgcccagaagatggatgccttcatgcatgagaagaacgaggactgagcggctgcggtcccaggaaggtcttaccccctcttctatttattaatttgcagacccagcccctcccctactttttggtcagctacgtctctagaataagatggtatctgaagtccttaaaaaaaaaaaaaaaaaaaaaaaaaa

SEQ ID NO: 5268 - protein, 369 aa, Homo sapiens
MEGSLEREAPAGALAAVLKHSSTLPPESTQVRGYDFNRGVNYRALLEAFGTTGFQATNFGRAVQQVNAMIEKKLEPLSQDEDQHADLTQSRRPLTSCTIFLGYTSNLISSGIRETIRYLVQHNMVDVLVTTAGGVEEDLIKCLAPTYLGEFSLRGKELRENGINRIGNLLVPNENYCKFEDWLMPILDQMVMEQNTEGVKWTPSKMIARLGKEINNPESVYYWAQKNHIPVFSPALTDGSLGDMIFFHSYKNPGLVLDIVEDLRLINTQAIFAKCTGMIILGGGVVKHHIANANLMRNGADYAVYINTAQEFDGSDSGARPDEAVSWGKIRVDAQPVKVYADASLVFPLLVAETFAQKMDAFMHEKNED

SEQ ID NO: 5269 - DNA, 1210 bp, Homo sapiens
ctcttgcggagacgcgcgcgtcggggtttaacgcgtttctgggccgccgtaagcccggcctaggggcagctttgactcgagagccggctataggcgcatggaaggttccctggaacgggaggcgccagcgggggcgctggccgccgtgctaaagcacagctcgacgttgccgcccgaaagcacccaggtccggggctacgacttcaaccgcggtgtgaattaccgcgcactgctggaggccttcggcaccaccggcttccaagcaaccaacttcgggcgcgctgtacagcaagtcaatgccatgatcgagaagaagctggaaccactgtcacaggatgaagaccagcacgcggacctgacccagagccgccgcccacttaccagctgcaccattttcctgggatatacatccaacctcatcagttcaggcatccgtgagaccattcgctaccttgtgcagcacaacatggtggacgtattggtgaccacagctggcggcgtggaggaagacctcatcaagtgcctggcgcccacatacttgggcgagtttagcctcagggggaaggagctccgggagaacgggatcaataggatcggaaacctgctggtgcccaatgagaattactgcaagtttgaggactggctgatgcccattctggaccagatggtgatggagcagaacacagagggtgtaaagtggacgccttctaagatgatcgcccggctgggcaaggagatcaacaacccagagtccgtgtattactgggcccagaagaaccacatccctgtgtttagtcccgcacttacagacggctcgctgggcgacatgatcttcttccattcctacaagaacccgggcctggtcctggacatcgttgaggcccaggagtttgatggctctgactcaggtgcccgaccagacgaggctgtctcctggggcaagatccgggtggatgcacagcccgtcaaggtctatgctgacgcctccctggtcttccccctgcttgtggctgaaacctttgcccagaagatggatgccttcatgcatgagaagaacgaggactgagcggctgcggtcccaggaaggtcttaccccctcttctatttattaatttgcagacccagcccctcccctactttttggtcagctacgtctctagaataagatggtatctgaagtccttaaaaaaaaaaaaaaaaaaaaaaaaaa

SEQ ID NO: 5270 - DNA, 1183 bp, Homo sapiens
ctcttgcggagacgcgcgcgtcggggtttaacgcgtttctgggccgccgtaagcccggcctaggggcagctttgactcgagagccggctataggcgcatggaaggttccctggaacgggaggcgccagcgggggcgctggccgccgtgctaaagcacagctcgacgttgccgcccgaaagcacccaggtccggggctacgacttcaaccgcggtgtgaattaccgcgcactgctggaggccttcggcaccaccggcttccaagcaaccaacttcgggcgcgctgtacagcaagtcaatgccatgatcgagaagaagctggaaccactgtcacaggatgaagaccagcacgcggacctgacccagagccgccgcccacttaccagctgcaccattttcctgggatatacatccaacctcatcagttcaggcatccgtgagaccattcgctaccttgtgcagcacaacatggtggacgtattggtgaccacagctggcggcgtggaggaagacctcatcaagtgcctggcgcccacatacttgggcgagtttagcctcagggggaaggagctccgggagaacgggatcaataggatcggaaacctgctggtgcccaatgagaattactgcaagtttgaggactggctgatgcccattctggaccagatggtgatggagcagaacacagagggtgtaaagtggacgccttctaagatgatcgcccggctgggcaaggagatcaacaacccagagtccgtgtattactgggcccagaagaaccacatccctgtgtttagtcccgcacttacagacggctcgctgggcgacatgatcttcttccattcctacaagaacccgggcctggtcctggacatcgttgagggtgcccgaccagacgaggctgtctcctggggcaagatccgggtggatgcacagcccgtcaaggtctatgctgacgcctccctggtcttccccctgcttgtggctgaaacctttgcccagaagatggatgccttcatgcatgagaagaacgaggactgagcggctgcggtcccaggaaggtcttaccccctcttctatttattaatttgcagacccagcccctcccctactttttggtcagctacgtctctagaataagatggtatctgaagtccttaaaaaaaaaaaaaaaaaaaaaaaaaa

SEQ ID NO: 5271 - protein, 313 aa, Homo sapiens
MEGSLEREAPAGALAAVLKHSSTLPPESTQVRGYDFNRGVNYRALLEAFGTTGFQATNFGRAVQQVNAMIEKKLEPLSQDEDQHADLTQSRRPLTSCTIFLGYTSNLISSGIRETIRYLVQHNMVDVLVTTAGGVEEDLIKCLAPTYLGEFSLRGKELRENGINRIGNLLVPNENYCKFEDWLMPILDQMVMEQNTEGVKWTPSKMIARLGKEINNPESVYYWAQKNHIPVFSPALTDGSLGDMIFFHSYKNPGLVLDIVEGARPDEAVSWGKIRVDAQPVKVYADASLVFPLLVAETFAQKMDAFMHEKNED

SEQ ID NO: 5272 - DNA, 1797 bp, Homo sapiens
ccagcagggagctgggagctgggggaaacgacgccaggaaagctatcgcgccagagagggcgacgggggctcgggaagcctgacagggcttttgcgcacagctgccggctggctgctacccgcccgcgccagcccccgagaacgcgcgaccaggcacccagtccggtcaccgcagcggagagctcgccgctcgctgcagcgaggcccggagcggccccgcagggaccctccccagaccgcctgggccgcccggatgtgcactaaaatggaacagcccttctaccacgacgactcatacacagctacgggatacggccgggcccctggtggcctctctctacacgactacaaactcctgaaaccgagcctggcggtcaacctggccgacccctaccggagtctcaaagcgcctggggctcgcggacccggcccagagggcggcggtggcggcagctacttttctggtcagggctcggacaccggcgcgtctctcaagctcgcctcttcggagctggaacgcctgattgtccccaacagcaacggcgtgatcacgacgacgcctacacccccgggacagtacttttacccccgcgggggtggcagcggtggaggtgcagggggcgcagggggcggcgtcaccgaggagcaggagggcttcgccgacggctttgtcaaagccctggacgatctgcacaagatgaaccacgtgacaccccccaacgtgtccctgggcgctaccggggggcccccggctgggcccgggggcgtctacgccggcccggagccacctcccgtttacaccaacctcagcagctactccccagcctctgcgtcctcgggaggcgccggggctgccgtcgggaccgggagctcgtacccgacgaccaccatcagctacctcccacacgcgccgcccttcgccggtggccacccggcgcagctgggcttgggccgcggcgcctccaccttcaaggaggaaccgcagaccgtgccggaggcgcgcagccgggacgccacgccgccggtgtcccccatcaacatggaagaccaagagcgcatcaaagtggagcgcaagcggctgcggaaccggctggcggccaccaagtgccggaagcggaagctggagcgcatcgcgcgcctggaggacaaggtgaagacgctcaaggccgagaacgcggggctgtcgagtaccgccggcctcctccgggagcaggtggcccagctcaaacagaaggtcatgacccacgtcagcaacggctgtcagctgctgcttggggtcaagggacacgccttctgaacgtcccctgcccctttacggacaccccctcgcttggacggctgggcacacgcctcccactggggtccagggagcaggcggtgggcacccaccctgggacctaggggcgccgcaaaccacactggactccggcccccctaccctgcgcccagtccttccacctcgacgtttacaagcccccccttccacttttttttgtatgttttttttctgctggaaacagactcgattcatattgaatataatatatttgtgtatttaacagggaggggaagagggggcgatcgcggcggagctggccccgccgcctggtactcaagcccgcggggacattgggaaggggacccccgccccctgccctcccctctctgcaccgtactgtggaaaagaaacacgcacttagtctctaaagagtttattttaagacgtgtttgtgtttgtgtgtgtttgttctttttattgaatctatttaagtaaaaaaaaaattggttctttattaa

SEQ ID NO: 5273 - protein, 347 aa, Homo sapiens
MCTKMEQPFYHDDSYTATGYGRAPGGLSLHDYKLLKPSLAVNLADPYRSLKAPGARGPGPEGGGGGSYFSGQGSDTGASLKLASSELERLIVPNSNGVITTTPTPPGQYFYPRGGGSGGGAGGAGGGVTEEQEGFADGFVKALDDLHKMNHVTPPNVSLGATGGPPAGPGGVYAGPEPPPVYTNLSSYSPASASSGGAGAAVGTGSSYPTTTISYLPHAPPFAGGHPAQLGLGRGASTFKEEPQTVPEARSRDATPPVSPINMEDQERIKVERKRLRNRLAATKCRKRKLERIARLEDKVKTLKAENAGLSSTAGLLREQVAQLKQKVMTHVSNGCQLLLGVKGHAF

SEQ ID NO: 5274 - DNA, 937 bp, Homo sapiens
cgcggcccagggctcacttggcgctgagaacgcgggtccacgcgtgtgatcgtccgtgcgtctagcctttgcccacgcagctttcagtcatggcctccggtaacgcgcgcatcggaaagccagcccctgacttcaaggccacagcggtggttgatggcgccttcaaagaggtgaagctgtcggactacaaagggaagtacgtggtcctctttttctaccctctggacttcacttttgtgtgccccaccgagatcatcgcgttcagcaaccgtgcagaggacttccgcaagctgggctgtgaagtgctgggcgtctcggtggactctcagttcacccacctggcttggatcaacaccccccggaaagagggaggcttgggccccctgaacatccccctgcttgctgacgtgaccagacgcttgtctgaggattacggcgtgctgaaaacagatgagggcattgcctacaggggcctctttatcatcgatggcaagggtgtccttcgccagatcactgttaatgatttgcctgtgggacgctccgtggatgaggctctgcggctggtccaggccttccagtacacagacgagcatggggaagtttgtcccgctggctggaagcctggcagtgacacgattaagcccaacgtggatgacagcaaggaatatttctccaaacacaattaggctggctaacggatagtgagcttgtgcccctgcctaggtgcctgtgctgggtgtccacctgtgcccccacctgggtgccctatgctgacccaggaaaggccagacctgcccctccaaactccacagtatgggaccctggagggctaggccaaggccttctcatgcctccacctagaagctgaatagtgacgccctcccccaagcccacccagccgcacacaggcctagaggtaaccaataaagtattaggg

SEQ ID NO: 5275 - protein, 198 aa, Homo sapiens
MASGNARIGKPAPDFKATAVVDGAFKEVKLSDYKGKYVVLFFYPLDFTFVCPTEIIAFSNRAEDFRKLGCEVLGVSVDSQFTHLAWINTPRKEGGLGPLNIPLLADVTRRLSEDYGVLKTDEGIAYRGLFIIDGKGVLRQITVNDLPVGRSVDEALRLVQAFQYTDEHGEVCPAGWKPGSDTIKPNVDDSKEYFSKHN

SEQ ID NO: 5276 - DNA, 739 bp, Homo sapiens
aaaaggcttcgcggcccagggctcacttggcgctgagaacgcgggtccacgcgtgtgatcgtccgtgcgtctagcctttgcccacgcagctttcagtcatggcctccggtaacgcgcgcatcggaaagccagcccctgacttcaaggccacagcggtggttgatggcgccttcaaagaggtgaagctgtcggactacaaagggaagtacgtggtcctctttttctaccctctggacttcacttttgtgtgccccaccgagatcatcgcgttcagcaaccgtgcagaggacttccgcaagctgggctgtgaagtgctgggcgtctcggtggactctcagttcacccacctggcttggatcaacaccccccggaaagagggaggcttgggccccctgaacatccccctgcttgctgacgtgaccagacgcttgtctgaggattacggcgtgctgaaaacagatgagggcattgcctacaggtactgtgggaccctcagcccggctcagggagcgccctgccccccattcctgtgatgctgggaccactcctgtacaatgtcttctctgcccccagccctgtggctagcagcgggtggttggtagtcccttccttgtctctggcagtgggagctatcagctcctcactgggaaccctgatgtcttcaggggcctctttatcatcgatggcaagggtgtccttcgccagatcactgttaatgatttgcctgtgggacgctccg

SEQ ID NO: 5277 - DNA, 1020 bp, Homo sapiens
ccatggcaggtcgctcctgcagtattagttcttgcagctggtggcggcggctgaggcggcatggatctcagcgagctggagagagacaatacaggccgctgtcgcctgagttcgcctgtgcccgcggtgtgccgcaaggagccttgcgtcctgggcgtcgatgaggcgggcaggggccccgtgctgggccccatggtctacgccatctgttattgtcccctgcctcgcctggcagatctggaggcgctgaaagtggcagactcaaagaccctattggagagcgagcgggaaaggctgtttgcgaaaatggaggacacggactttgtcggctgggcgctggatgtgctgtctccaaacctcatctctaccagcatgcttgggcgggtcaaatacaacctgaactccctgtcacatgatacagccactgggcttatacagtatgcattggaccagggcgtgaacgtcacccaggtattcgtggacaccgtagggatgccagagacataccaggcgcagctgcagcaaagttttcccgggattgaggtgacggtcaaggccaaagcagatgccctctacccggtggttagtgctgccagcatctgtgccaaggtggcccgggaccaggccgtgaagaaatggcagttcgtggagaaactgcaggacttggatactgattatggctcaggctaccccaatgatcccaagacaaaagcgtggttgaaggagcacgtggagcctgtgttcggcttcccccagtttgtccggttcagctggcgcacggcccagaccatcctggagaaagaggcggaagatgttatatgggaggactcagcatccgagaatcaggagggactcaggaagatcacatcctacttcctcaatgaagggtcccaagcccgtccccgttcttcccaccgatatttcctggaacgcggcctggagtcagcaaccagcctctagcagctgcctctacgcgctctacctgcttccccaacccagacattaaaattgtttaaggag

SEQ ID NO: 5278 - protein, 299 aa, Homo sapiens
MDLSELERDNTGRCRLSSPVPAVCRKEPCVLGVDEAGRGPVLGPMVYAICYCPLPRLADLEALKVADSKTLLESERERLFAKMEDTDFVGWALDVLSPNLISTSMLGRVKYNLNSLSHDTATGLIQYALDQGVNVTQVFVDTVGMPETYQAQLQQSFPGIEVTVKAKADALYPVVSAASICAKVARDQAVKKWQFVEKLQDLDTDYGSGYPNDPKTKAWLKEHVEPVFGFPQFVRFSWRTAQTILEKEAEDVIWEDSASENQEGLRKITSYFLNEGSQARPRSSHRYFLERGLESATSL

SEQ ID NO: 5279 - DNA, 1807 bp, Homo sapiens
ctggaaggagtcatggcggatggtcaggtggcggaactgctgctccggcggctggaggcgtctgatggcggcctggacagcgccgagttggcggctgagctgggcatggagcaccaggcggtggtgggcgccgtgaagagccttcaggcgctgggcgaggtcatcgaggctgaacttcggtccaccaagcactgggagcttactgcggagggcgaggagattgcccgggagggcagccatgaggcccgtgtgtttcgaagcattcccccagagggcctggcccagagcgagcttatgcgactgcccagtggcaaagtgggcttcagcaaggccatgtccaacaagtggattcgggtggacaagagtgcggctgacgggccccgggtgttccgagtggtggacagcatggaggatgaggtgcagcggcggctccagctggtccgggggggacaggctgagaagctgggggagaaggagaggagcgagctgaggaagaggaagctgttggctgaagtgactctgaagacctactgggtgagcaaaggcagtgcctttagtaccagcatctccaagcaagagacagagctgagcccagagatgatctccagtggctcttggcgggaccggcccttcaagccctacaacttcttggcccacggtgtcctccccgacagcggccaccttcacccgctgctcaaggtccgctcccagttccgacagatcttcctggagatggggttcaccgagatgccgactgataacttcattgagagctccttctggaactttgacgccctcttccagccccagcagcacccagcccgtgaccagcacgacaccttcttccttcgagatccagcggaggccctgcagctcccaatggactatgtccagcgggtcaagcggacccactctcagggcggctacggctcacaggggtacaagtataactggaagctggacgaggcccggaaaaacctactgcgaacccacaccacatcagccagcgcccgtgcgctctaccgccttgcccagaagaagcccttcactccggtcaagtacttctccatcgaccgcgtattccggaatgagaccctggacgccacgcacctggctgagttccaccagatcgagggcgtggtggcggatcatggtctcaccttgggccacctcatgggcgttctgcgggagttcttcaccaagctgggtatcacgcaactccgcttcaagccagcctacaacccatacacagagcccagcatggaggtgttcagctaccaccaaggcctgaagaagtgggtggaggtcggaaactcgggggtcttccgtccagagatgctgctgcccatggggcttcccgagaacgtgtcggtcattgcctggggcctctccctggagcgcccaacgatgatcaaatatggcatcaacaatatccgggagctggtgggccacaaggtgaacctgcagatggtgtatgacagtcccctgtgccgcctggatgccgagccgaggccccctcccacacaggaggctgcgtgacatgggccactctaggacaggtcatcctccccgagtccctgctgctgcgctcctttgcatccctggccagtgaccttgtatttatgaggctctgtgaggccagcccccaccttcctctttcccacctgtcccaggaccagaatcccagggacagaggactgggtagcaggttccttctgttgtcctgtgtggtgtgtctactgtgagggtgggccctgaggagacctgtgggccacctattgtctaataaagtgggcagttgccccca

SEQ ID NO: 5280 - protein, 508 aa, Homo sapiens
MADGQVAELLLRRLEASDGGLDSAELAAELGMEHQAVVGAVKSLQALGEVIEAELRSTKHWELTAEGEEIAREGSHEARVFRSIPPEGLAQSELMRLPSGKVGFSKAMSNKWIRVDKSAADGPRVFRVVDSMEDEVQRRLQLVRGGQAEKLGEKERSELRKRKLLAEVTLKTYWVSKGSAFSTSISKQETELSPEMISSGSWRDRPFKPYNFLAHGVLPDSGHLHPLLKVRSQFRQIFLEMGFTEMPTDNFIESSFWNFDALFQPQQHPARDQHDTFFLRDPAEALQLPMDYVQRVKRTHSQGGYGSQGYKYNWKLDEARKNLLRTHTTSASARALYRLAQKKPFTPVKYFSIDRVFRNETLDATHLAEFHQIEGVVADHGLTLGHLMGVLREFFTKLGITQLRFKPAYNPYTEPSMEVFSYHQGLKKWVEVGNSGVFRPEMLLPMGLPENVSVIAWGLSLERPTMIKYGINNIRELVGHKVNLQMVYDSPLCRLDAEPRPPPTQEAA

SEQ ID NO: 5281 - DNA, 1900 bp, Homo sapiens
gtccgtactgcagagccgctgccggagggtcgttttaaagggcccgcgcgttgccgccccctcggcccgccatgctgctatccgtgccgctgctgctcggcctcctcggcctggccgtcgccgagcctgccgtctacttcaaggagcagtttctggacggagacgggtggacttcccgctggatcgaatccaaacacaagtcagattttggcaaattcgttctcagttccggcaagttctacggtgacgaggagaaagataaaggtttgcagacaagccaggatgcacgcttttatgctctgtcggccagtttcgagcctttcagcaacaaaggccagacgctggtggtgcagttcacggtgaaacatgagcagaacatcgactgtgggggcggctatgtgaagctgtttcctaatagtttggaccagacagacatgcacggagactcagaatacaacatcatgtttggtcccgacatctgtggccctggcaccaagaaggttcatgtcatcttcaactacaagggcaagaacgtgctgatcaacaaggacatccgttgcaaggatgatgagtttacacacctgtacacactgattgtgcggccagacaacacctatgaggtgaagattgacaacagccaggtggagtccggctccttggaagacgattgggacttcctgccacccaagaagataaaggatcctgatgcttcaaaaccggaagactgggatgagcgggccaagatcgatgatcccacagactccaagcctgaggactgggacaagcccgagcatatccctgaccctgatgctaagaagcccgaggactgggatgaagagatggacggagagtgggaacccccagtgattcagaaccctgagtacaagggtgagtggaagccccggcagatcgacaacccagattacaagggcacttggatccacccagaaattgacaaccccgagtattctcccgatcccagtatctatgcctatgataactttggcgtgctgggcctggacctctggcaggtcaagtctggcaccatctttgacaacttcctcatcaccaacgatgaggcatacgctgaggagtttggcaacgagacgtggggcgtaacaaaggcagcagagaaacaaatgaaggacaaacaggacgaggagcagaggcttaaggaggaggaagaagacaagaaacgcaaagaggaggaggaggcagaggacaaggaggatgatgaggacaaagatgaggatgaggaggatgaggaggacaaggaggaagatgaggaggaagatgtccccggccaggccaaggacgagctgtagagaggcctgcctccagggctggactgaggcctgagcgctcctgccgcagagcttgccgcgccaaataatgtctctgtgagactcgagaactttcatttttttccaggctggttcggatttggggtggattttggttttgttcccctcctccactctcccccaccccctccccgccctttttttttttttttttaaactggtattttatctttgattctccttcagccctcacccctggttctcatctttcttgatcaacatcttttcttgcctctgtccccttctctcatctcttagctcccctccaacctggggggcagtggtgtggagaagccacaggcctgagatttcatctgctctccttcctggagcccagaggagggcagcagaagggggtggtgtctccaaccccccagcactgaggaagaacggggctcttctcatttcacccctccctttctcccctgcccccaggactgggccacttctgggtggggcagtgggtcccagattggctcacactgagaatgtaagaactacaaacaaaatttctattaaattaaattttgtgtctc

SEQ ID NO: 5282 - protein, 417 aa, Homo sapiens
MLLSVPLLLGLLGLAVAEPAVYFKEQFLDGDGWTSRWIESKHKSDFGKFVLSSGKFYGDEEKDKGLQTSQDARFYALSASFEPFSNKGQTLVVQFTVKHEQNIDCGGGYVKLFPNSLDQTDMHGDSEYNIMFGPDICGPGTKKVHVIFNYKGKNVLINKDIRCKDDEFTHLYTLIVRPDNTYEVKIDNSQVESGSLEDDWDFLPPKKIKDPDASKPEDWDERAKIDDPTDSKPEDWDKPEHIPDPDAKKPEDWDEEMDGEWEPPVIQNPEYKGEWKPRQIDNPDYKGTWIHPEIDNPEYSPDPSIYAYDNFGVLGLDLWQVKSGTIFDNFLITNDEAYAEEFGNETWGVTKAAEKQMKDKQDEEQRLKEEEEDKKRKEEEEAEDKEDDEDKDEDEEDEEDKEEDEEEDVPGQAKDEL

SEQ ID NO: 5283 - DNA, 1793 bp, Homo sapiens
ccggaagtggtcggcgcgcggcgcggcgcgcctgggcgctaagatggcggcggcgtgagttgcatgttgtgtgaggatcccggggccgccgcgtcgctcgggccccgccatggccgtcaccatcacgctcaaaacgctgcagcagcagaccttcaagatccgcatggagcctgacgagacggtgaaggtgctaaaggagaagatagaagctgagaagggtcgtgatgccttccccgtggctggacagaaactcatctatgccggcaagatcttgagtgacgatgtccctatcagggactatcgcatcgatgagaagaactttgtggtcgtcatggtgaccaagaccaaagccggccagggtacctcagcacccccagaggcctcacccacagctgccccagagtcctctacatccttcccgcctgcccccacctcaggcatgtcccatcccccacctgccgccagagaggacaagagcccatcagaggaatccgcccccacgacgtccccagagtctgtgtcaggctctgttccctcttcaggtagcagcgggcgagaggaagacgcggcctccacgctagtgacgggctctgagtatgagacgatgctgacggagatcatgtccatgggctatgagcgagagcgggtcgtggccgccctgagagccagctacaacaacccccaccgagccgtggagtatctgctcacgggaattcctgggagccccgagccggaacacggttctgtccaggagagccaggtatcggagcagccggccacggaagcagcaggagagaaccccctggagttcctgcgggaccagccccagttccagaacatgcggcaggtgattcagcagaaccctgcgctgctgcccgccctgctccagcagctgggccaggagaaccctcagcttttacagcaaatcagccggcaccaggagcagttcatccagatgctgaacgagccccctggggagctggcggacatctcagatgtggagggggaggtgggcgccataggagaggaggccccgcagatgaactacatccaggtgacgccgcaggagaaagaagctatagagaggttgaaggccctgggcttcccagagagcctggtcatccaggcctatttcgcgtgtgaaaaaaatgagaacttggctgccaacttcctcctgagtcagaactttgatgacgagtgatgccaggaagccaggccaccgaagcccccaccctacccttattccatgaaagttttataaaagaaaaaatatatatatattcatgtttatttaagaaatggaaaaaaaaatcaaaaatcttaaaaaaacaagcaaacagtccagcttcctgtcctcctaaagtggcccctgttcccatctcccgggccagacagctgtccccccgtcctcctccccagcccagcctgctcagagaagctggcaggactgggaggcgacagatgggcccctcttggcctctgtcccagctctctgcagccagacggaaaggcggctgcttgcctctccatcctccgaaaaacccctgaggacccccccccatcctcttctaggatgaggggaagctggagccccaactttgatcctccattggagtggcccaaatctttccatctagggcaagtcctgaaaggcccaaggccccctccccagtctggccttggcctccagcctggagaagggctaacatcagctcattgtcaaggccacccccaccccagaacagaaccgtgtctctgataaaggttttgaagtgaataaagttttaaaaact

SEQ ID NO: 5284 - protein, 363 aa, Homo sapiens
MAVTITLKTLQQQTFKIRMEPDETVKVLKEKIEAEKGRDAFPVAGQKLIYAGKILSDDVPIRDYRIDEKNFVVVMVTKTKAGQGTSAPPEASPTAAPESSTSFPPAPTSGMSHPPPAAREDKSPSEESAPTTSPESVSGSVPSSGSSGREEDAASTLVTGSEYETMLTEIMSMGYERERVVAALRASYNNPHRAVEYLLTGIPGSPEPEHGSVQESQVSEQPATEAAGENPLEFLRDQPQFQNMRQVIQQNPALLPALLQQLGQENPQLLQQISRHQEQFIQMLNEPPGELADISDVEGEVGAIGEEAPQMNYIQVTPQEKEAIERLKALGFPESLVIQAYFACEKNENLAANFLLSQNFDDE

SEQ ID NO: 5285 - DNA, 669 bp, Homo sapiens
atggcggcgtccgtgcgacaggcacgcagcctactaggtgtggcggcgaccctggccccgggttcccgtggctaccgggcgcggccgcccccgcgccgcaggccgggaccccggtggccagaccccgaggacctcctgaccccgcggtggcagctgggaccgcgctacgcggctaagcagttcgcgcgttacggcgccgcctccggggtggtccccggttcgttatggccgtcgccggagcagctgcgggagctggaggccgaagaacgcgaatggtacccgagcctggcgaccatgcaggagtcgctgcgggtgaagcagctggccgaagagcagaagcgtcgggagagggagcagcacatcgcagagtgcatggccaagatgccacagatgattgtgaactggcagcagcagcagcgggagaactgggagaaggcccaggctgacaaggagaggagggcccgactgcaggctgaggcccaggagctcctgggctaccaggtggacccaaggagtgcccgcttccaggagctgctccaggacctagagaagaaggagcgcaagcgcctcaaggaggaaaaacagaaacggaagaaggaggcgcgagctgctgcattggctgcagctgtggctcaagacccagcagcctctggggcacccagctcctga

SEQ ID NO: 5286 - DNA, 2137 bp, Homo sapiens
ctaattcgggaaacgtgcaccttgactaattcggttttctgtggctacgagagcaggcttggcgggcggaggcgccagcggatgtctcatgcaaggatcgtctctgtggctaagcctcactttccgctccgcccgggtgctctctagagcccggtttttcgagtggcagtctccagggctgccgaatacagcagcgatggagaacggcaccgggccctacggagaagaacgtccacgtgaagtccaggagacgacagtcaccgagggggctgccaaaatcgcctttcccagtgccaacgaggtcttttataacccggtgcaggaattcaatcgggacctgacatgtgctgtgatcaccgagtttgctcgcattcagcttggggccaaaggaatccagatcaaggttccaggagagaaggacacgcaaaaagtggtcgtggacttgtcagagcaagaggaggaaaaggttgaactgaaagagagtgaaaacctggcctcaggagaccaacctcgcacagcggccgtgggggagatctgtgaggaaggcctgcatgtgctggaaggcctggcagcttcaggcctacgttccattcgatttgccctagaggtgcctgggctcagatctgtggttgcaaacgatgcctccacccgggctgtggatctcatacgccggaatgtccagctcaatgacgtggcccacctggtacagccgagccaagcagatgcccggatgctgatgtaccagcaccagagggtgtcggagaggtttgacgtcatcgatctggacccctatggcagcccagccaccttcctggatgcagctgtgcaggctgtgagtgaaggagggttgctgtgtgtgacctgcacagacatggcggtgttggcggggaacagcggggagacgtgctacagcaagtacggggccatggccctcaagagccgggcctgccacgagatggccctgagaatcgtcctgcacagcctggacctccgcgccaactgctaccagcgcttcgtggtgccgctgctcagcatcagcgctgacttctacgtgcgtgtttttgtccgtgtcttcaccggccaggccaaggtcaaggcctcagccagcaagcaggcgctggtgttccagtgtgtgggctgcggggccttccaccttcagcgtctcggcaaagcgtcaggagtccccagcggccgggccaagttctctgcagcctgtggtccccctgtgacccccgagtgtgaacactgtgggcaacgacaccagcttggtggccccatgtgggcagagcccatccatgacctggattttgtgggccgtgtcctggaggctgtgagcgctaaccccggccgcttccacacctcggagcggatccgaggggtcctgagcgtcatcactgaggagctcccggacgtgcctctgtactacaccctggaccagctgagcagcaccatccactgcaacacaccaagcctcctgcagttgcggtcggccctcctccacgctgacttccgggtctcactctcccacgcctgtaagaacgctgtgaagacggatgcccctgcctctgccctctgggacatcatgcgttgctgggagaaggaatgtccggtgaaacgggagcgactatcagagactagcccagcgttccgcattctcagtgtggagcccaggctgcaggccaacttcaccatccgggaagatgccaaccccagctcccgacagcgaggactcaagcgcttccaggctaacccggaggccaactggggtccccggcctcgtgcccggccagggggcaaggcggccgacgaagctatggaggagagacgcaggctgcttcagaacaagcggaaggagccgccggaagatgtggcccagcgggctgcccggctcaagacatttccttgcaagaggtttaaggagggcacctgtcaacgcggggaccagtgctgctactcccacagccccccgacacccagggtttctgctgatgctgcccctgactgtccagagacctccaaccagaccccccctggacctggggctgccgctgggccaggcatagactgaaccaataaagagatgtcacgtcaccttcaaaaaaaaaaaaaaaaaaaaaaaaaaaaaaaaaaaaaaaaa

SEQ ID NO: 5287 - protein, 659 aa, Homo sapiens
MQGSSLWLSLTFRSARVLSRARFFEWQSPGLPNTAAMENGTGPYGEERPREVQETTVTEGAAKIAFPSANEVFYNPVQEFNRDLTCAVITEFARIQLGAKGIQIKVPGEKDTQKVVVDLSEQEEEKVELKESENLASGDQPRTAAVGEICEEGLHVLEGLAASGLRSIRFALEVPGLRSVVANDASTRAVDLIRRNVQLNDVAHLVQPSQADARMLMYQHQRVSERFDVIDLDPYGSPATFLDAAVQAVSEGGLLCVTCTDMAVLAGNSGETCYSKYGAMALKSRACHEMALRIVLHSLDLRANCYQRFVVPLLSISADFYVRVFVRVFTGQAKVKASASKQALVFQCVGCGAFHLQRLGKASGVPSGRAKFSAACGPPVTPECEHCGQRHQLGGPMWAEPIHDLDFVGRVLEAVSANPGRFHTSERIRGVLSVITEELPDVPLYYTLDQLSSTIHCNTPSLLQLRSALLHADFRVSLSHACKNAVKTDAPASALWDIMRCWEKECPVKRERLSETSPAFRILSVEPRLQANFTIREDANPSSRQRGLKRFQANPEANWGPRPRARPGGKAADEAMEERRRLLQNKRKEPPEDVAQRAARLKTFPCKRFKEGTCQRGDQCCYSHSPPTPRVSADAAPDCPETSNQTPPGPGAAAGPGID

SEQ ID NO: 5288 - DNA, 750 bp, Homo sapiens
atgtctctcgaagaccccttttttgtagtccgaggcgaggtgcagaaggcggtgaacacggcccgcgggctgtaccagcgctggtgcgagctcctgcaggaaagcgcggcggtcggacgcgaggagctggactggacgaccaatgagctgcggaatggcctgcgcagcatcgagtgggacctcgaggacctggaagagaccatcggtatagtggaagccaacccaggcaagttcaagctcccagccggggacctgcaggagagaaaggtgttcgtggagcggatgcgagaggcagtccaggaaatgaaggaccatatggtcagcccaacagccgtagcatttttggagaggaataacagagagatactcgcaggcaagccagctgcccagaagtcacccagcgacctgctggatgccagcgcagtctcggccacatctcgctacatcgaggagcagcaggccacacagcagctgatcatggatgaacaggatcaacagctggagatggtgtctgggagcatccaggttctgaagcacatgtccggccgcgttggagaagagctggacgagcagggcatcatgctggatgccttcgcccaagagatggaccacacccagtcccgcatggacggggtcctcaggaagttggccaaagtatcccacatgacgagtgaccgccgacagtggtgtgccatcgccgtgctagtgggggtgcttctcctcgttctcatcttactattctctctctga

SEQ ID NO: 5289 - protein, 249 aa, Homo sapiens
MSLEDPFFVVRGEVQKAVNTARGLYQRWCELLQESAAVGREELDWTTNELRNGLRSIEWDLEDLEETIGIVEANPGKFKLPAGDLQERKVFVERMREAVQEMKDHMVSPTAVAFLERNNREILAGKPAAQKSPSDLLDASAVSATSRYIEEQQATQQLIMDEQDQQLEMVSGSIQVLKHMSGRVGEELDEQGIMLDAFAQEMDHTQSRMDGVLRKLAKVSHMTSDRRQWCAIAVLVGVLLLVLILLFSL

SEQ ID NO: 5290 - DNA, 1817 bp, Homo sapiens
ggtttgtgtagagaggcgtgagcgagcccgttgtccggagtgcacctgctgcctgttctgtccctcccgggagcccccgccgctgtcgccgtcgagtcgccatggaagtgcagaaagaggcacagcgcatcatgaccctgtcggtgtggaagatgtatcactcccgcatgcagcgcggtggcctgcggctgcaccggagtctgcagctgtcgctggtcatgcgcagcgcccgggagctctacctctcggccaaggtggaggccctcgagcccgaggtgtcgttgccggccgccctcccctctgaccctcgcctgcacccgccccgagaagccgagtccacggccgagacagcgacccccgacggtgagcacccgtttccggagccaatggacacgcaggaggcgccgacagccgaggagacctccgcctgctgtgccccgcgccccgccaaagtcagccgcaaacgacgcagcagcagcctgagcgacggcggggacgctggactggtcccgagcaagaaagcccgtctggaagaaaaggaagaagaggagggagcgtcatccgaagtcgccgatcgcctgcagccccctccggcgcaagcggagggcgcctttcccaacctggcccgcgtcctgcagaggcgcttctccggcctcctgaactgcagccccgcggcccctccgacggcgccgcccgcgtgcgaggcaaagcccgcttgccgcccggcggacagcatgctcaacgtgctcgtgcgggccgtggtggccttctgaggaccccgagcggcgctgccggagcccagagcgcgcgtcgaaccgtcggcccgagggcgcagacctgaggcgaggccacccccctccatcctgggggaagcgcccgcgaaaaccgtggagagaagccgccgcccgggctgctgagaggcccggagagggactctgtccccggggagccatcgccttcagtgtgcagggacggcaccgaggagtctgagccgggggcgcgggcgccttccgcagagacctgcgcccacaggtgctgtcttagtggactgggacgtgaacctttcgctctccttctggactgggagaagggaggcttgggtgttgtgttttttgttttgtttgtttgtttgtttttaaagatctcctcagggtcggacttcattttgtactgtgggctgtgctggccctttcaaggtttttcaagagttggttttgcgtttccaacctcggagaattccaggcactccccttccccctccgctgacatacttgtataagcggtcatcgttgcgtcatggggcaggcgtggggagcttcctgtcgccttgcgtgggtgtggggcctgggaggaggtcctggggcgtgcacccgccctgggcagtggggaggagagtggcctgagttacttcacccccgcgtgctgctggttaatgtcccgcgtctctgcaccttcgggtgggagcggggactgatctactttcacattctcaagtttttctcatctgcattagaggtgcccagtaggttcccaggttccagcgtgcccctccctcagacacacggacacaatcagccgagaagttcctggtctgaatcacgagaatgtggaggggtggggggtgtcagtggaaaggcataaggctgagctgagaccagttgctggtgaaactgggccaatctggggaggggaacatccttgccagggagtttctgagggtctgctttgtttacctttcgtgcggtggattctttttaactccgtctacctggcgttttgttagaaatgtcagataggaaaataaaaaccatttgagt

SEQ ID NO: 5291 - protein, 223 aa, Homo sapiens
MEVQKEAQRIMTLSVWKMYHSRMQRGGLRLHRSLQLSLVMRSARELYLSAKVEALEPEVSLPAALPSDPRLHPPREAESTAETATPDGEHPFPEPMDTQEAPTAEETSACCAPRPAKVSRKRRSSSLSDGGDAGLVPSKKARLEEKEEEEGASSEVADRLQPPPAQAEGAFPNLARVLQRRFSGLLNCSPAAPPTAPPACEAKPACRPADSMLNVLVRAVVAF

SEQ ID NO: 5292 - DNA, 924 bp, Homo sapiens
caagtgcgcgcggacccctagctccctctgagttgcgctgggcttggctgctgcaccatgaccctggaggcgatccgctactcgcggggctccctgcagatcctagaccagctgctgctgcccaagcagagccgctacgaggcggtgggctcggtgcaccaggcctgggaggccatccgcgccatgaaggtgcggggcgccccggccatagccctggtgggctgtctcagcctcgccgtggagctgcaggcgggcgccgggggaccgggactcgccgcgctcgtggccttcgtgcgcgacaagctgagcttcctcgtcaccgcccggcccaccgctgtcaacatggcccgcgccgcccgcgacctggctgatgttgcagcccgggaggccgaacgggagggcgctacggaagaggcggtccgggagagagtgatctgctgcaccgaggacatgctggagaaagacctcagagacaaccgaagcattggggacctaggagcccgccacctcctggagcgggtggcccccagcggtggcaaggtgactgtgctgacccactgtaacactggtgctctggccaccgctggctatggtacagccctagacgtgaaacggagctatgcgagcattgggaagagcataccaggcagagggaactgccactgcgagggcccctgggcgggactgtgctcggtaagcctttggcaatccacgcccagactaggagcctgcacccctaaccaatggaccaccctgtctgtttgcccctccccggggccttctcctggtgggtggggcccccgcaggtgtgattcgctcactgcacagcctgggccgcctggagcatgccttctgcacagagacccggccctacaaccagggagcccggctgacggcctttgagctggtctatgagcagatccc

SEQ ID NO: 5293 - protein, 369 aa, Homo sapiens
MTLEAIRYSRGSLQILDQLLLPKQSRYEAVGSVHQAWEAIRAMKVRGAPAIALVGCLSLAVELQAGAGGPGLAALVAFVRDKLSFLVTARPTAVNMARAARDLADVAAREAEREGATEEAVRERVICCTEDMLEKDLRDNRSIGDLGARHLLERVAPSGGKVTVLTHCNTGALATAGYGTALGVIRSLHSLGRLEHAFCTETRPYNQGARLTAFELVYEQIPATLITDSMVAAAMAHRGVSAVVVGADRVVANGDTANKVGTYQLAIVAKHHGIPFYVAAPSSSCDLRLETGKEIIIEERPGQELTDVNGVRIAAPGIGVWNPAFDVTPHDLITGGIITELGVFAPEELRTALTTTISSRDGTLDGPQM

SEQ ID NO: 5294 - DNA, 3046 bp, Homo sapiens
gaattaaaaaaaaaaaaaagccttatttattatcattttccccaccgttggcatggcaacacaggcgtatactgagctacaggcagccccgccaccatcccagccgccacaggccccgccacaagcccagccccagccgccaccgccaccacccccagcggcaccccagcccccgcagccacccaccgctgctgccacccctcagccccaatatgtcaccgagctgcagagcccccagccccaggcacagccaccgggtggccagaagcagtacgtgacggagctcccggctgtacccgcaccctcgcagccaaccggtgcacccaccccttcgcctgcaccccagcagtacatcgtggtcactgtctctgaaggtgccatgcgggccagcgagacagtgtcggaggccagccccggctccaccgccagccagaccggcgttcctactcaggtggttcagcaggtgcagggcacccagcagcggctgctggtccagacgagcgtgcaggccaagccaggccacgtgtcgcccctccagctgaccaacatccaagtgccccagcaggctcttcccacgcagcgtctggtggtgcagagcgcagccccaggcagcaaaggtggccaggtctccctgacggtccatggtacccagcaggtgcactcgcccccagagcagtcgccggtgcaggccaacagctcttccagcaagacagccggggcccccacgggcacagtgccacagcagctgcaggtccacggcgtccagcagagtgtccccgtcacccaagagagatctgtggtccaggccactccacaagcgcccaaacccggcccggtgcagccgctgaccgtgcagggcctccagccagtccacgtggctcaagaggtgcagcagctccagcaggtgcccgtcccacacgtgtactccagccaggtgcagtatgtggagggcggcgatgccagctacacggccagtgccatccgttccagcacctactcctatcccgagacgccgctgtacacgcagacggcaagcaccagctactacgaggccgcaggcacggccacccaggtcagcacccccgccacctcccaggcggtggccagcagtggctccatgcccatgtacgtgtccggcagccaggtcgtcgccagctccaccagcactggggctggggccagcaacagcagcggaggtggtggcagtggtggtggcggcggcggcgggggaggcggtggcgggggtggcagtggcagcaccggaggcggcggcagcggagcaggcacctacgtgatccaaggcggctacatgctgggcagtgccagccagtcttactctcacaccacccgtgcctcgccagccacggtccagtggctcctggacaactatgagacggctgagggcgtgagtctgccacggagcaccctctactgccactacttactgcactgccaggagcagaagctggagcccgtcaacgccgcctccttcggcaagctcatccgctccgtcttcatgggcctgcgaacccgccgtctgggcaccaggggcaactccaagtaccactactatggcctgcgcatcaaggccagctcacccctgctgcggctgatggaggaccagcagcacatggccatgcggggccagcccttctcgcagaagcagaggctcaagcccatccagaagatggaaggcatgaccaacggcgtggcggtggggcagcagccgagcacggggctgtcggacatcagcgcccaggtgcagcagtaccagcaatttttggatgcctctcggagcctccctgacttcacagagctcgacctccagggcaaggtgctgcctgagggcgtcgggcccggggacatcaaagccttccaggtcctgtaccgggaacactgtgaggccattgtcgacgtcatggtgaacctgcagttcaccctggtggagacgctgtggaagaccttctggaggtacaacctcagccagcccagtgaggcgccaccgctggctgtacatgacgaggccgagaagcgactgcccaaagccatcctggtgctcctctccaagttcgagcccgtgctccaatggaccaagcactgtgacaacgtgctgtaccagggcctggtggaaatcctcattcccgacgtgctgcggcccatccccagtgccttgacccaagcgatccggaactttgccaagagcctggagagctggctcacccacgccatggtcaacatccccgaggagatgctgcgggtgaaggtggccgcggctggcgccttcgcgcagacactgcggcgctacacgtcgctcaaccacctggcgcaggcggcgcgcgctgtgctgcagaacaccgcacagatcaaccagatgctgagcgacctcaaccgcgtggacttcgccaacgtgcaggagcaggcctcgtgggtgtgccgctgcgaggaccgcgtggtgcagcggctggagcaggacttcaaggtgacgctgcagcagcagaactcgctggagcagtgggcggcctggctggacggcgtggtgagccaggtgctcaagccctaccagggcagcgccggcttccccaaggccgccaagctcttcctcctcaagtggtccttctacagctccatggtgatccgggacctgaccctgcgcagcgccgccagcttcggttccttccacctcatccggctgctctacgacgagtacatgtactacctgatcgagcaccgcgtagcccaggccaagggcgagacccccatcgccgtcatgggcgagttcgccaatctggccacctccctgaaccccctggaccccgacaaagacgaggaggaagaagaggaggaggagagcgaggacgagctgccgcaggacatctcactggcggctggcggcgagtcacccgcgctgggcccggagaccctggagccgccggccaagctggcgcggactgacgcgcgcggcctcttcgtgcaggcgctgccctccagctaagcccttggcctccccgccccacccgcccccgccacccctccacgccagggtccc

SEQ ID NO: 5295 - DNA, 626 bp, Homo sapiens
cgcgtccgccgattcctcctccttggtcgccgcgtccttggctggcgtcagaaaaatggctacaaacttcctagcacatgagaagatctggtttgacaagttcaaatatgacgacgcagaaaggagattctatcagcagatgaacaggcctgtggcaggtgcctcccgccaggagaacggcgccagccggagaccacagcgagctcgttgtccggatcgccagtctggaagtggagaaccagagcctgcgtggcgtggtacaggagctgcagcaggccatctccaagctggaggcccagctgaacgtgctggagaagagctcgcctggccaccgggccacggccccgcagacccagcacgtgtctcctatgcgccaagtggagtccccggccaagaagccagcctcaccagcagaggatgacgaggatgatgacatcgacctgtttggcagcgacaatgaggaggaggacaaggaggcggcacagctgcgggaggagcggctacggcagtacgcggagaaggccaagaagcctgcattagtggccaagtcctccatcctgctggatgtcaagccttgggacgatgagacggacatggcccagctggaggcctgtgtgcgctctatc

SEQ ID NO: 5296 - protein, 256 aa, Homo sapiens
MATNFLAHEKIWFDKFKYDDAERRFYQQMNRPVAGASRQSSGPGASSGPSGDHSELVVRIASLEVENQSLRGVVQELQQAISKLEAQLNVLEKSSPGHRATAPQTQHVSPMRQVESPAKKPASPAEDDEDDDIDLFGSDNEEEDKEAAQLREERLRQYAEKAKKPALVAKSSILLDVKPWDDETDMAQLEACVRSIELDGLVWGTSKLMPVGYGIRKLQIQCVVEDDKVGTYLLEEEITKFEEHVQSVDIAAFNKI

SEQ ID NO: 5297 - DNA, 674 bp, Homo sapiens
cctcctccttggtcgccgcgtccttggctggcgtcagaaaaatggctacaaacttcctagcacatgagaagatctggtttgacaagttcaaatatgacgacgcagaaaggagattctatcagcagatgaacaggcctgtggcaggtgcctcccgccaggagaacggcgccagcgtgatcctccatgacattgcaagaagccagcctcaccagcagaggatgacgaggatgatgacatcgacctgtttggcagcgacaatgaggaggaggacaaggaggcggcacagctgcgggaggagcggctacggcagtacgcggagaaggccaagaagcctgcattagtggccaagtcctccatcctgctggatgtcaagccttgggacgatgagacggacatggcccagctggaggcctgtgtgcgctctatcgagctggacgggctggtctgggggacctccaagctgatgcccgtgggctacggtatccggaagctacagattcagtgtgtggtggaggacgacaaggtggggacttacttgctggaggaggagatcactaaatttgaggagcacgtgcagagtgtcgatatcgcagctttcaacaagatctgaagcctgagtgtgtgtatgtgtgcgcgtgcgtaaggccctgccacgattaaagactgagaccggc

SEQ ID NO: 5298 - DNA, 2549 bp, Homo sapiens
  unsure 6: unknown base
cagtgngctccgggccgccggccgcagccagcacccgccgcgccgcagctccgggaccggccccggccgccgccgccgcgatgggcaacgccgccgccgccaagaagggcagcgagcaggagagcgtgaaagaattcttagccaaagccaaagaagattttcttaaaaaatgggaaagtcccgctcagaacacagcccacttggatcagtttgaacgaatcaagaccctcggcacgggctccttcgggcgggtgatgctggtgaaacacaaggagaccgggaaccactatgccatgaagatcctcgacaaacagaaggtggtgaaactgaaacagatcgaacacaccctgaatgaaaagcgcatcctgcaagctgtcaactttccgttcctcgtcaaactcgagttctccttcaaggacaactcaaacttatacatggtcatggagtacgtgcccggcggggagatgttctcacacctacggcggatcggaaggttcagtgagccccatgcccgtttctacgcggcccagatcgtcctgacctttgagtatctgcactcgctggatctcatctacagggacctgaagccggagaatctgctcattgaccagcagggctacattcaggtgacagacttcggtttcgccaagcgcgtgaagggccgcacttggaccttgtgcggcacccctgagtacctggcccctgagattatcctgagcaaaggctacaacaaggccgtggactggtgggccctgggggttcttatctatgaaatggccgctggctacccgcccttcttcgcagaccagcccatccagatctatgagaagatcgtctctgggaaggtgcgcttcccttcccacttcagctctgacttgaaggacctgctgcggaacctcctgcaggtagatctcaccaagcgctttgggaacctcaagaatggggtcaacgatatcaagaaccacaagtggtttgccacaactgactggattgccatctaccagaggaaggtggaagctcccttcataccaaagtttaaaggccctggggatacgagtaactttgacgactatgaggaagaagaaatccgggtctccatcaatgagaagtgtggcaaggagttttctgagttttaggggcatgcctgtgcccccatgggttttcttttttcttttttcttttttttggtcgggggggtgggagggttggattgaacagccagagggccccagagttccttgcatctaatttcacccccaccccaccctccagggttagggggagcaggaagcccagataatcagagggacagaaacaccagctgctccccctcatccccttcaccctcctgccccctctcccacttttcccttcctctttccccacagccccccagcccctcagccctcccagcccacttctgcctgttttaaacgagtttctcaactccagtcagaccaggtcttgctggtgtatccagggacagggtatggaaagaggggctcacgcttaactccagcccccacccacacccccatcccacccaaccacaggccccacttgctaagggcaaatgaacgaagcgccaaccttcctttcggagtaatcctgcctgggaaggagagatttttagtgacatgttcagtgggttgcttgctagaatttttttaaaaaaacaacaatttaaaatcttatttaagttccaccagtgcctccctccctccttcctctactcccacccctcccatgtccccccattcctcaaatccattttaaagagaagcagactgactttggaaagggaggcgctggggtttgaacctccccgctgctaatctcccctgggcccctccccggggaatcctctctgccaatcctgcgagggtctaggcccctttaggaagcctccgctctctttttccccaacagacctgtcttcacccttgggctttgaaagccagacaaagcagctgcccctctccctgccaaagaggagtcatcccccaaaaagacagagggggagccccaagcccaagtctttcctcccagcagcgtttccccccaactccttaattttattctccgctagattttaacgtccagccttccctcagctgagtggggagggcatccctgcaaaagggaacagaagaggccaagtccccccaagccacggcccggggttcaaggctagagctgctggggaggggctgcctgttttactcacccaccagcttccgcctcccccatcctgggcgcccctcctccagcttagctgtcagctgtccatcacctctcccccactttctcatttgtgcttttttctctcgtaatagaaaagtggggagccgctggggagccaccccattcatccccgtatttccccctctcataacttctccccatcccaggaggagttctcaggcctggggtggggccccgggtgggtgcgggggcgattcaacctgtgtgctgcgaaggacgagacttcctcttgaacagtgtgctgttgtaaacatatttgaaaactattaccaataaagtttgtt

SEQ ID NO: 5299 - protein, 351 aa, Homo sapiens
MGNAAAAKKGSEQESVKEFLAKAKEDFLKKWESPAQNTAHLDQFERIKTLGTGSFGRVMLVKHKETGNHYAMKILDKQKVVKLKQIEHTLNEKRILQAVNFPFLVKLEFSFKDNSNLYMVMEYVPGGEMFSHLRRIGRFSEPHARFYAAQIVLTFEYLHSLDLIYRDLKPENLLIDQQGYIQVTDFGFAKRVKGRTWTLCGTPEYLAPEIILSKGYNKAVDWWALGVLIYEMAAGYPPFFADQPIQIYEKIVSGKVRFPSHFSSDLKDLLRNLLQVDLTKRFGNLKNGVNDIKNHKWFATTDWIAIYQRKVEAPFIPKFKGPGDTSNFDDYEEEEIRVSINEKCGKEFSEF

SEQ ID NO: 5300 - DNA, 1700 bp, Homo sapiens
agatttgaaggcggcgcgcggactaggtgcgcacttcagttctcggagagaagaggcgggagtggacctggtcagccctaccccactgaccccaccggacccaggcgcggcctccgccacagccacagcccctgcccctgctgcggcgcggcgaggcgaggcgatggccaaggtgtcggtgctgaacgtggcggtcctggagaacccgagccctttccacagccccttccggttcgagatcagcttcgagtgcagtgaagccctggcggacgacctggagtggaagatcatttatgttggctcggctgagagtgaggaatttgatcagatcctagactcggtgctggtgggccctgtgccagcagggagacacatgtttgtctttcaggccgacgcccccaacccatccctcatcccagagactgatgccgtgggtgtgactgtggtcctcatcacctgcacctaccatggacaggagttcatccgagtgggctactacgtcaacaacgagtacctcaaccctgagctgcgtgagaacccgcccatgaagccagatttctcccagctccagcggaacatcttggcctcgaacccccgggtgacccgcttccatatcaactgggacaacaacatggacaggctggaggccatagagacccaggacccctccctgggctgcggcctcccactcaactgcactcctatcaagggcttggggctccctggctgcatccctggcctcctccctgagaactccatggactgcatctaactgcaggaacccagagtgtcccagcacgccgggaggggcaaccaggcctcccagcgagtcctgcagggcccatctagaggactttgggggccatcagctgcaatccaggtctgtcaaactcagcccctaggaaagaacaggccttgggtctcccctagtcctggccagaaggatgatctcgcttttcctctacaggcctataagaagcaggtacttcagttctaaattctgacttgtgttcttttcgtcttcataaattctaactaaggccactgtgccactgtgcacccttgagtaccattgatccaaagctttcccacagacctccctggcccacctagaggctttcttggtcagtgcctgtcaaggctccagtcctgctgagccaaaggctttgtcattcctttctcttcctgtacatctgagcagacccactccagctttctggtgtcacaggcgggaatgttagttagtaggtagacttagatcccatttctgtcctgctcccaggaagattcttaggtcctcttcaatccagcagcccctcccagaggtgtgatcagcaggatgctgaggaaccatgttgcctttcctgtcaatcacagccaccttcctgttatctcctaaatggatctggcttttcctggaggctgccatggttggaagatggtatcagagggcctgcctgggcagtctgtctccgggccagggtcagggaccctctgcctctggcagccttaacctgtcctctgctaggaccagggtgatttcaagccagggaagcaactgggaccctgaaaactgtccctccccagcccgctccccctctctgtgccctggtccccttgccgccatgtggatgctgttgtgattgctgtttgtatattatcaaaatgtttttatattaaaaatgtttggtctgaaaatt

SEQ ID NO: 5301 - protein, 202 aa, Homo sapiens
MAKVSVLNVAVLENPSPFHSPFRFEISFECSEALADDLEWKIIYVGSAESEEFDQILDSVLVGPVPAGRHMFVFQADAPNPSLIPETDAVGVTVVLITCTYHGQEFIRVGYYVNNEYLNPELRENPPMKPDFSQLQRNILASNPRVTRFHINWDNNMDRLEAIETQDPSLGCGLPLNCTPIKGLGLPGCIPGLLPENSMDCI

SEQ ID NO: 5302 - DNA, 1492 bp, Homo sapiens
ggaagcgcagcaactcgtgtctgagcgcccggcggaaaaccgaagttggaagtgtctcttagcagcgcgcggagaagaacggggagccagcatcatggcagaacaggatgtggaaaacgatcttttggattacgatgaagaggaagagccccaggctcctcaagagagcacaccagctccccctaagaaagacatcaagggatcctacgtttccatccacagctctggcttccgggactttctgctgaagccggagctcctgcgggccatcgtggactgtggctttgagcatccttctgaggtccagcatgagtgcattccccaggccatcctgggcatggacgtcctgtgccaggccaagtccgggatgggcaagacagcggtcttcgtgctggccaccctacagcagattgagcctgtcaacggacaggtgacggtcctggtcatgtgccacacgagggagctggccttccagatcagcaaggaatatgagcgcttttccaagtacatgcccagcgtcaaggtgtctgtgttcttcggtggtctctccatcaagaaggatgaagaagtgttgaagaagaactgtccccatgtcgtggtggggaccccgggccgcatcctggcgctcgtgcggaataggagcttcagcctaaagaatgtgaagcactttgtgctggacgagtgtgacaagatgctggagcagctggacatgcggcgggatgtgcaggagatcttccgcctgacaccacacgagaagcagtgcatgatgttcagcgccaccctgagcaaggacatccggcctgtgtgcaggaagttcatgcaggatcccatggaggtgtttgtggacgacgagaccaagctcacgctgcacggcctgcagcagtactacgtcaaactcaaagacagtgagaagaaccgcaagctctttgatctcttggatgtgctggagtttaaccaggtgataatcttcgtcaagtcagtgcagcgctgcatggccctggcccagctcctcgtggagcagaacttcccggccatcgccatccaccggggcatggcccaggaggagcgcctgtcacgctatcagcagttcaaggatttccagcggcggatcctggtggccaccaatctgtttggccgggggatggacatcgagcgagtcaacatcgtctttaactacgacatgcctgaggactcggacacctacctgcaccgggtggcccgggcgggtcgctttggcaccaaaggcctagccatcacttttgtgtctgacgagaatgatgccaaaatcctcaatgacgtccaggaccggtttgaagttaatgtggcagaacttccagaggaaatcgacatctccacatacatcgagcagagccggtaaccaccacgtgccagagccgcccacccggagccgcccgcatgcagcttcacctcccctttccaggcgccactgttgagaagctagagattgtatgagaataaacttgttattatg

SEQ ID NO: 5303 - DNA, 2965 bp, Homo sapiens
acgcgcgctcctctggccgcccctccctccgcgcggggacccctggcgggcggcaggaggacatggccagcgacgccgtgcagagtgagcctcgcagctggtccctgctagagcagctgggcctggccggggcagacctggcggcccccggggtacagcagcagctggagctggagcgggagcggctgcggcgggaaatccgcaaggagctgaagctgaaggagggtgctgagaacctgcggcgggccaccactgacctgggccgcagcctgggccccgtagagctgctgctgcggggctcctcgcgccgcctcgacctgctgcaccagcagctgcaggagctgcacgcccacgtggtgcttcccgacccggcggccacccacgatggcccccagtcccctggtgcgggtggccccacctgctcggccaccaacctgagccgcgtggcgggcctggagaagcagttggccattgagctgaaggtgaagcagggggcggagaacatgatccagacctacagcaatggcagcaccaaggaccggaagctgctgctgacagcccagcagatgttgcaggacagtaagaccaagattgacatcatccgcatgcaactccgccgggcgctgcaggccggccagctggagaaccaggcagccccggatgacacccaagggagtcctgacctgggggctgtggagctgcgcatcgaagagctgcggcaccacttccgagtggagcacgcggtggccgagggtgccaagaacgtactgcgcctgctcagcgctgccaaggccccggaccgcaaggcagtcagcgaggcccaggagaaattaacagaatccaaccagaagctggggctgctgcgggaggctctggagcggagacttggggagctgcccgccgaccaccccaaggggcggctgctgcgagaagagctcgctgcggcctcctccgctgccttcagcacccgcctggccgggccctttcccgccacgcactacagcaccctgtgcaagcccgcgccgctcacagggaccctggaggtacgagtggtgggctgcagagacctcccagagaccatcccgtggaaccctaccccctcaatggggggacctgggaccccagacagccgcccccccttcctgagccgcccagcccggggcctttacagccgaagcggaagcctcagtggccggagcagcctcaaagcagaagccgagaacaccagtgaagtcagcactgtgcttaagctggataacacagtggtggggcagacgtcttggaagccatgtggccccaatgcctgggaccagagcttcactctggagctggaaagggcacgggaactggagttggctgtgttctggcgggaccagcggggcctgtgtgccctcaaattcctgaagttggaggatttcttggacaatgagaggcatgaggtgcagctggacatggaaccccagggctgcctggtggctgaggtcaccttccgcaaccctgtcattgagaggattcctcggctccgacggcagaagaaaattttctccaagcagcaagggaaggcgttccagcgtgctaggcagatgaacatcgatgtcgccacgtgggtgcggctgctccggaggctcatccccaatgccacgggcacaggcacctttagccctggggcttctccaggatccgaggcccggaccacgggtgacatatcggtggagaagctgaacctcggcactgactcggacagctcacctcagaagagctcgcgggatcctccttccagcccatcgagcctgagctcccccatccaggaatccactgctcccgagctgccttcggagacccaggagaccccaggccccgccctgtgcagccctctgaggaagtcacctctgaccctcgaagatttcaagttcctggcggtgctgggccggggtcattttgggaaggtgctcctctccgaattccggcccagtggggagctgttcgccatcaaggctctgaagaaaggggacattgtggcccgagacgaggtggagagcctgatgtgtgagaagcggatattggcggcagtgaccagtgcgggacaccccttcctggtgaacctcttcggctgtttccagacaccggagcacgtgtgcttcgtgatggagtactcggccggtggggacctgatgctgcacatccacagcgacgtgttctctgagccccgtgccatcttttattccgcctgcgtggtgctgggcctacagtttcttcacgaacacaagatcgtctacagggacctgaagttggacaatttgctcctggacaccgagggctacgtcaagatcgcagactttggcctctgcaaggaggggatgggctatggggaccggaccagcacattctgtgggaccccggagttcctggcccctgaggtgctgacggacacgtcgtacacgcgagctgtggactggtggggactgggtgtgctgctctacgagatgctggttggcgagtccccattcccaggggatgatgaggaggaggtcttcgacagcatcgtcaacgacgaggttcgctacccccgcttcctgtcggccgaagccatcggcatcatgagaaggctgcttcggaggaacccagagcggaggctgggatctagcgagagagatgcagaagatgtgaagaaacagcccttcttcaggactctgggctgggaagccctgttggcccggcgcctgccaccgccctttgtgcccacgctgtccggccgcaccgacgtcagcaacttcgacgaggagttcaccggggaggcccccacactgagcccgccccgcgacgcgcggcccctcacagccgcggagcaggcagccttcctggacttcgacttcgtggccgggggctgctagccccctcccctgcccctgcccctgcccctgcccgagagctcttagtttttaaaaaggcctttgggatttgccgg

SEQ ID NO: 5304 - protein, 942 aa, Homo sapiens
MASDAVQSEPRSWSLLEQLGLAGADLAAPGVQQQLELERERLRREIRKELKLKEGAENLRRATTDLGRSLGPVELLLRGSSRRLDLLHQQLQELHAHVVLPDPAATHDGPQSPGAGGPTCSATNLSRVAGLEKQLAIELKVKQGAENMIQTYSNGSTKDRKLLLTAQQMLQDSKTKIDIIRMQLRRALQAGQLENQAAPDDTQGSPDLGAVELRIEELRHHFRVEHAVAEGAKNVLRLLSAAKAPDRKAVSEAQEKLTESNQKLGLLREALERRLGELPADHPKGRLLREELAAASSAAFSTRLAGPFPATHYSTLCKPAPLTGTLEVRVVGCRDLPETIPWNPTPSMGGPGTPDSRPPFLSRPARGLYSRSGSLSGRSSLKAEAENTSEVSTVLKLDNTVVGQTSWKPCGPNAWDQSFTLELERARELELAVFWRDQRGLCALKFLKLEDFLDNERHEVQLDMEPQGCLVAEVTFRNPVIERIPRLRRQKKIFSKQQGKAFQRARQMNIDVATWVRLLRRLIPNATGTGTFSPGASPGSEARTTGDISVEKLNLGTDSDSSPQKSSRDPPSSPSSLSSPIQESTAPELPSETQETPGPALCSPLRKSPLTLEDFKFLAVLGRGHFGKVLLSEFRPSGELFAIKALKKGDIVARDEVESLMCEKRILAAVTSAGHPFLVNLFGCFQTPEHVCFVMEYSAGGDLMLHIHSDVFSEPRAIFYSACVVLGLQFLHEHKIVYRDLKLDNLLLDTEGYVKIADFGLCKEGMGYGDRTSTFCGTPEFLAPEVLTDTSYTRAVDWWGLGVLLYEMLVGESPFPGDDEEEVFDSIVNDEVRYPRFLSAEAIGIMRRLLRRNPERRLGSSERDAEDVKKQPFFRTLGWEALLARRLPPPFVPTLSGRTDVSNFDEEFTGEAPTLSPPRDARPLTAAEQAAFLDFDFVAGGC

SEQ ID NO: 5305 - DNA, 1743 bp, Homo sapiens
cacggggaggcggaggcagcggcggcggcggcggcggcggcggcggcggcggagcagatcttctggtgaccccacttctcgctgctcatgccgctgggactggggcggcggaaaaaggcgccccctctagtggaaaatgaggaggctgagccaggccgtggagggctgggcgtgggggagccagggcctctgggcggaggtgggtcggggggcccccaaatgggcttgcccccccctcccccagccctgcggccccgcctcgtgttccacacccagctggcccatggcagtcccactggccgcatcgagggcttcaccaacgtcaaggagctgtatggcaagatcgccgaggccttccgcctgccaactgccgaggtgatgttctgcaccctgaacacccacaaagtggacatggacaagctcctggggggccagatcgggctggaggacttcatcttcgcccacgtgaaggggcagcgcaaggaggtggaggtgttcaagtcggaggatgcactcgggctcaccatcacggacaacggggctggctacgccttcatcaagcgcatcaaggagggcagcgtgatcgaccacatccacctcatcagcgtgggcgacatgatcgaggccattaacgggcagagcctgctgggctgccggcactacgaggtggcccggctgctcaaggagctgccccgaggccgtaccttcacgctgaagctcacggagcctcgcaaggccttcgacatgatcagccagcgttcagcgggtggccgccctggctctggcccacaactgggcactggccgagggaccctgcggctccgatcccggggccccgccacggtggaggatctgccctctgcctttgaagagaaggccattgagaaggtggatgacctgctggagagttacatgggtatcagggacacggagctggcggccaccatggtggagctgggaaaggacaaaaggaacccggatgagctggccgaggccctggacgaacggctgggtgactttgccttccctgacgagttcgtctttgacgtctggggcgccattggggacgccaaggtcggccgctactaggactgcccccggaccctgcgatgatgacccgggcgcaacctggtgggggcccccagcagggacactgacgtcaggacccgagcctccagcctgagcctagctcagcagcccaaggacgatggtgaggggaggtggggccaggccccctgccccgctccaatcggtaccatcccctccctggttcccagtctggccggggtccccggcccccctgtgccctgttccccacctacctcagctgggtcaggcacagggaggggagggatcagccaaattgggcggccacccccgcctccaccactttccaccatcagctgccaaactggtccctctgtctccctggggccttgggttctgtttgggggtcatgaccttcctagtttcctgacgcagggaatacaggggagagggttgtccttccccccagcaaatgcaataatgccctcacccctcctgagaggagccccctccctgtggagcctgttacctccgcatttgacacgagtctgctgtgaaccccgcaacctcctccccacctcccatctctccttccaggcccatccctggcccagagcaggagggagggagggacgatggcggtgggtttttgtatctgaatttgctgtcttgaacataaagaatctatctgctgtt

SEQ ID NO: 5306 - protein, 333 aa, Homo sapiens
MPLGLGRRKKAPPLVENEEAEPGRGGLGVGEPGPLGGGGSGGPQMGLPPPPPALRPRLVFHTQLAHGSPTGRIEGFTNVKELYGKIAEAFRLPTAEVMFCTLNTHKVDMDKLLGGQIGLEDFIFAHVKGQRKEVEVFKSEDALGLTITDNGAGYAFIKRIKEGSVIDHIHLISVGDMIEAINGQSLLGCRHYEVARLLKELPRGRTFTLKLTEPRKAFDMISQRSAGGRPGSGPQLGTGRGTLRLRSRGPATVEDLPSAFEEKAIEKVDDLLESYMGIRDTELAATMVELGKDKRNPDELAEALDERLGDFAFPDEFVFDVWGAIGDAKVGRY

SEQ ID NO: 5307 - DNA, 1136 bp, Homo sapiens
gtttagtctatcgctgcggttgcgagcgctgtagggagcctgtgctgtgccgcgcagttaggcagcagcagccgcggagcagtagccgccgtgggagggagccatgaagcattacgaggtggagattctggacgcaaagacaagggagaagctgtgtttcttggacaaggtggagccccacgccaccattgcggagatcaagaacctcttcactaagacccatccgcagtggtaccccgcccgccagtccctccgcctggaccccaagggcaagtccctgaaggatgaggatgttctgcagaagctgcccgtgggcaccacggccacactgtacttccgggacctgggggcccagatcagctgggtgacggtcttcctaacagagtacgcggggccccttttcatctacctgctcttctacttccgagtgcccttcatctatggccacaaatatgactttacgtccagtcggcatacagtggtgcacctcgcctgcatctgtcactcattccactacatcaagcgcctgctggagacgctcttcgtgcaccgcttctcccatggcactatgcctttgcgcaacatcttcaagaactgcacctactactggggcttcgccgcgtggatggcctattacatcaatcaccctctctacactccccctacctacggagctcagcaggtgaaactggcgctcgccatctttgtgatctgccagctcggcaacttctccatccacatggccctgcgggacctgcggcccgctgggtccaagacgcggaagatcccataccccaccaagaaccccttcacgtggctcttcctgctggtgtcctgccccaactacacctacgaggtggggtcctggatcggtttcgccatcatgacgcagtgtctcccagtggccctgttctccctggtgggcttcacccagatgaccatctgggccaagggcaagcaccgcagctacctgaaggagttccgggactacccgcccctgcgcatgcccatcatccccttcctgctctgagcgctcacccctgctgaggctcagcccctcaacccggtggcattctgggggaggagtggggcccacagctctccagcacccggaataaagcccgcctgccccagtc

SEQ ID NO: 5308 - DNA, 2311 bp, Homo sapiens
ggcacgaggcggggcgccgctgagccaagtgggccacccgggcacggccacgctcccgggtcacgtgacacggagggggccgaattctgctggaggcagcgccatatcctggaggtgaaggtaccacctcatggagacccccgcggccgccgcccccgctgggagcttattcccctccttcctgctcctggcctgcgggacgctggtggccgccttgctgggcgccgctcaccgcctggggctcttctatcagctgctgcacaaggtggacaaggcaagcgtccggcatggcggagagaacgtggccgctgtgctgagggcccatggtgtgcggttcatcttcacgctggtcggtgggcacatttccccgctgctggtggcctgtgagaaactgggcatccgtgtggtggacacacgccatgaggtcacggccgtctttgctgctgatgctatggcccgcctgtccgggacggtgggcgtggcggcagtgacagcaggccctggcctcaccaacacggtgactgcggtgaagaatgctcagatggctcagtccccaatcctgcttctgggtggggctgccagcactctgctgcagaaccggggtgcgctccaggctgttgatcagctgtcccttttccggccactctgtaagttttgtgtgtctgtgcggagggtgcgggacattgtgcccaccctgagggccgcgatggctgccgcccagtcgggcaccccaggtccggtgtttgtggagctgcccgttgacgtgctgtacccctacttcatggtccagaaggagatggtgccagccaagccacccaagggcctcgtgggccgagtggtctcctggtatttagagaattacctggccaacctctttgcaggagcctgggagcctcagcccgagggaccgctgcccctggacatcccccaggcttccccgcagcaggttcagcgctgtgtggagatcctgagccgggccaagaggcctctgatggtgctggggagtcaggccctgctcaccccaacgtctgccgacaagcttcgggctgccgtggagaccttgggtgttccctgcttccttggagggatggcacgggggctgttaggccgcaaccaccccctccacatccgggagaaccgcagtgcggccctgaagaaggcggacgtcattgtcctagcaggaactgtgtgtgacttccgcctatcctatggccgtgtcctcagccacagcagcaagatcatcatcgtcaatcgtaatcgggaagagatgttgctcaactcagacatcttctggaagccccaggaggctgtgcagggagatgtgggttccttcgtgctgaagttagtggagggccttcagggccagacctgggccccagactgggtggaggagctgcgggaagccgaccggcagaaggagcagacctttcgggagaaggcagcgatgcctgtggcccagcacctgaacccagtgcaggtgctgcagctggtggaggaaacgctacctgacaactcaattctggtggtggatggcggggacttcgtgggcactgctgcccatctggtacagccccgcggccccctgcgctggctcgatcctggggcctttgggactctgggagttggtgcaggatttgcacttggggccaagctgtgccggccagatgctgaggtctggtgcctgtttggggacggagcttttggctacagcctcatcgaatttgatacattcgtcagacacaagatcccagtgatggccttggtagggaatgatgctggctggacacagatttctcgggagcaggtgccctctctgggcagcaacgtggcctgtggcctggcctacactgattatcacaaggcagccatgggtctgggggcccggggcttgctgctctcacgggagaacgaggatcaggtggtcaaggtgctgcacgatgcccagcagcagtgccgagacggccacccggttgtggtcaacatcctcattgggaggacggacttccgcgatggctccattgctgtatagggccttgtgggtcaggacgcttggctgccttcctccccctggactgtgtccagctggtttggagtctcatcattgcttgccctgggcctatcccatgaggcccagtgactccacaacctccctgaggaggggatggaggggtcaaatctcagagaggctctcttgtgagctcttggaccctcctcttcacggacccaactgtgccgtttgtcccctctcttatggagactgaataaaccacctctggcccatgtaggcccaagtaaaaaaaaaaaaaaaaaa

SEQ ID NO: 5309 - protein, 632 aa, Homo sapiens
METPAAAAPAGSLFPSFLLLACGTLVAALLGAAHRLGLFYQLLHKVDKASVRHGGENVAAVLRAHGVRFIFTLVGGHISPLLVACEKLGIRVVDTRHEVTAVFAADAMARLSGTVGVAAVTAGPGLTNTVTAVKNAQMAQSPILLLGGAASTLLQNRGALQAVDQLSLFRPLCKFCVSVRRVRDIVPTLRAAMAAAQSGTPGPVFVELPVDVLYPYFMVQKEMVPAKPPKGLVGRVVSWYLENYLANLFAGAWEPQPEGPLPLDIPQASPQQVQRCVEILSRAKRPLMVLGSQALLTPTSADKLRAAVETLGVPCFLGGMARGLLGRNHPLHIRENRSAALKKADVIVLAGTVCDFRLSYGRVLSHSSKIIIVNRNREEMLLNSDIFWKPQEAVQGDVGSFVLKLVEGLQGQTWAPDWVEELREADRQKEQTFREKAAMPVAQHLNPVQVLQLVEETLPDNSILVVDGGDFVGTAAHLVQPRGPLRWLDPGAFGTLGVGAGFALGAKLCRPDAEVWCLFGDGAFGYSLIEFDTFVRHKIPVMALVGNDAGWTQISREQVPSLGSNVACGLAYTDYHKAAMGLGARGLLLSRENEDQVVKVLHDAQQQCRDGHPVVVNILIGRTDFRDGSIAV

SEQ ID NO: 5310 - DNA, 8070 bp, Homo sapiens
gcggcgcggaggctggcccgggacgcgcccggagcccagggaaggagggaggaggggagggtcgcggccggccgccatggggccgggggcccgtggccgccgccgccgccgtcgcccgatgtcgccgccaccgccaccgccacccgtgcgggcgctgcccctgctgctgctgctagcggggccgggggctgcagcccccccttgcctggacggaagcccgtgtgcaaatggaggtcgttgcacccagctgccctcccgggaggctgcctgcctgtgcccgcctggctgggtgggtgagcggtgtcagctggaggacccctgtcactcaggcccctgtgctggccgtggtgtctgccagagttcagtggtggctggcaccgcccgattctcatgccggtgcccccgtggcttccgaggccctgactgctccctgccagatccctgcctcagcagcccttgtgcccacggtgcccgctgctcagtggggcccgatggacgcttcctctgctcctgcccacctggctaccagggccgcagctgccgaagcgacgtggatgagtgccgggtgggtgagccctgccgccatggtggcacctgcctcaacacacctggctccttccgctgccagtgtccagctggctacacagggccactatgtgagaaccccgcggtgccctgtgcaccctcaccatgccgtaacgggggcacctgcaggcagagtggcgacctcacttacgactgtgcctgtcttcctgggtttgagggtcagaattgtgaagtgaacgtggacgactgtccaggacaccgatgtctcaatggggggacatgcgtggatggcgtcaacacctataactgccagtgccctcctgagtggacaggccagttctgcacggaggacgtggatgagtgtcagctgcagcccaacgcctgccacaatgggggtacctgcttcaacacgctgggtggccacagctgcgtgtgtgtcaatggctggacaggcgagagctgcagtcagaatatcgatgactgtgccacagccgtgtgcttccatggggccacctgccatgaccgcgtggcttctttctactgtgcctgccccatgggcaagactggcctcctgtgtcacctggatgacgcctgtgtcagcaacccctgccacgaggatgctatctgtgacacaaatccggtgaacggccgggccatttgcacctgtcctcccggcttcacgggtggggcatgtgaccaggatgtggacgagtgctctatcggcgccaacccctgcgagcacttgggcaggtgcgtgaacacgcagggctccttcctgtgccagtgcggtcgtggctacactggacctcgctgtgagaccgatgtcaacgagtgtctgtcggggccctgccgaaaccaggccacgtgcctcgaccgcataggccagttcacctgtatctgtatggcaggcttcacaggaacctattgcgaggtggacattgacgagtgtcagagtagcccctgtgtcaacggtggggtctgcaaggaccgagtcaatggcttcagctgcacctgcccctcgggcttcagcggctccacgtgtcagctggacgtggacgaatgcgccagcacgccctgcaggaatggcgccaaatgcgtggaccagcccgatggctacgagtgccgctgtgccgagggctttgagggcacgctgtgtgatcgcaacgtggacgactgctcccctgacccatgccaccatggtcgctgcgtggatggcatcgccagcttctcatgtgcctgtgctcctggctacacgggcacacgctgcgagagccaggtggacgaatgccgcagccagccctgccgccatggcggcaaatgcctagacctggtggacaagtacctctgccgctgcccttctgggaccacaggtgtgaactgcgaagtgaacattgacgactgtgccagcaacccctgcacctttggagtctgccgtgatggcatcaaccgctacgactgtgtctgccaacctggcttcacagggcccctttgtaacgtggagatcaatgagtgtgcttccagcccatgcggcgagggaggttcctgtgtggatggggaaaatggcttccgctgcctctgcccgcctggctccttgcccccactctgcctccccccgagccatccctgtgcccatgagccctgcagtcacggcatctgctatgatgcacctggcgggttccgctgtgtgtgtgagcctggctggagtggcccccgctgcagccagagcctggcccgagacgcctgtgagtcccagccgtgcagggccggtgggacatgcagcagcgatggaatgggtttccactgcacctgcccgcctggtgtccagggacgtcagtgtgaactcctctccccctgcaccccgaacccctgtgagcatgggggccgctgcgagtctgcccctggccagctgcctgtctgctcctgcccccagggctggcaaggcccacgatgccagcaggatgtggacgagtgtgctggccccgcaccctgtggccctcatggtatctgcaccaacctggcagggagtttcagctgcacctgccatggagggtacactggcccttcctgcgatcaggacatcaatgactgtgaccccaacccatgcctgaacggtggctcgtgccaagacggcgtgggctccttttcctgctcctgcctccctggtttcgccggcccacgatgcgcccgcgatgtggatgagtgcctgagcaacccctgcggcccgggcacctgtaccgaccacgtggcctccttcacctgcacctgcccgccaggctacggaggcttccactgcgaacaggacctgcccgactgcagccccagctcctgcttcaatggcgggacctgtgtggacggcgtgaactcgttcagctgcctgtgccgtcccggctacacaggagcccactgccaacatgaggcagacccctgcctctcgcggccctgcctacacgggggcgtctgcagcgccgcccaccctggcttccgctgcacctgcctcgagagcttcacgggcccgcagtgccagacgctggtggattggtgcagccgccagccttgtcaaaacgggggtcgctgcgtccagactggggcctattgcctttgtccccctggatggagcggacgcctctgtgacatccgaagcttgccctgcagggaggccgcagcccagatcggggtgcggctggagcagctgtgtcaggcgggtgggcagtgtgtggatgaagacagctcccactactgcgtgtgcccagagggccgtactggtagccactgtgagcaggaggtggacccctgcttggcccagccctgccagcatggggggacctgccgtggctatatggggggctacatgtgtgagtgtcttcctggctacaatggtgataactgtgaggacgacgtggacgagtgtgcctcccagccctgccagcacgggggttcatgcattgacctcgtggcccgctatctctgctcctgtcccccaggaacgctgggggtgctctgcgagattaatgaggatgactgcggcccaggcccaccgctggactcagggccccggtgcctacacaatggcacctgcgtggacctggtgggtggtttccgctgcacctgtcccccaggatacactggtttgcgctgcgaggcagacatcaatgagtgtcgctcaggtgcctgccacgcggcacacacccgggactgcctgcaggacccaggcggaggtttccgttgcctttgtcatgctggcttctcaggtcctcgctgtcagactgtcctgtctccctgcgagtcccagccatgccagcatggaggccagtgccgtcctagcccgggtcctgggggtgggctgaccttcacctgtcactgtgcccagccgttctggggtccgcgttgcgagcgggtggcgcgctcctgccgggagctgcagtgcccggtgggcgtcccatgccagcagacgccccgcgggccgcgctgcgcctgccccccagggttgtcgggaccctcctgccgcagcttcccggggtcgccgccgggggccagcaacgccagctgcgcggccgccccctgtctccacgggggctcctgccgccccgcgccgctcgcgcccttcttccgctgcgcttgcgcgcagggctggaccgggccgcgctgcgaggcgcccgccgcggcacccgaggtctcggaggagccgcggtgcccgcgcgccgcctgccaggccaagcgcggggaccagcgctgcgaccgcgagtgcaacagcccaggctgcggctgggacggcggcgactgctcgctgagcgtgggcgacccctggcggcaatgcgaggcgctgcagtgctggcgcctcttcaacaacagccgctgcgaccccgcctgcagctcgcccgcctgcctctacgacaacttcgactgccacgccggtggccgcgagcgcacttgcaacccggtgtacgagaagtactgcgccgaccactttgccgacggccgctgcgaccagggctgcaacacggaggagtgcggctgggatgggctggattgtgccagcgaggtgccggccctgctggcccgcggcgtgctggtgctcacagtgctgctgccgccagaggagctactgcgttccagcgccgactttctgcagcggctcagcgccatcctgcgcacctcgctgcgcttccgcctggacgcgcacggccaggccatggtcttcccttaccaccggcctagtcctggctccgaaccccgggcccgtcgggagctggcccccgaggtgatcggctcggtagtaatgctggagattgacaaccggctctgcctgcagtcgcctgagaatgatcactgcttccccgatgcccagagcgccgctgactacctgggagcgttgtcagcggtggagcgcctggacttcccgtacccactgcgggacgtgcggggggagccgctggagcctccagaacccagcgtcccgctgctgccactgctagtggcgggcgctgtcttgctgctggtcattctcgtcctgggtgtcatggtggcccggcgcaagcgcgagcacagcaccctctggttccctgagggcttctcactgcacaaggacgtggcctctggtcacaagggccggcgggaacccgtgggccaggacgcgctgggcatgaagaacatggccaagggtgagagcctgatgggggaggtggccacagactggatggacacagagtgcccagaggccaagcggctaaaggtagaggagccaggcatgggggctgaggaggctgtggattgccgtcagtggactcaacaccatctggttgctgctgacatccgcgtggcaccagccatggcactgacaccaccacagggcgacgcagatgctgatggcatggatgtcaatgtgcgtggcccagatggcttcaccccgctaatgctggcttccttctgtgggggggctctggagccaatgccaactgaagaggatgaggcagatgacacatcagctagcatcatctccgacctgatctgccagggggctcagcttggggcacggactgaccgtactggcgagactgctttgcacctggctgcccgttatgcccgtgctgatgcagccaagcggctgctggatgctggggcagacaccaatgcccaggaccactcaggccgcactcccctgcacacagctgtcacagccgatgcccagggtgtcttccagattctcatccgaaaccgctctacagacttggatgcccgcatggcagatggctcaacggcactgatcctggcggcccgcctggcagtagagggcatggtggaagagctcatcgccagccatgctgatgtcaatgctgtggatgagcttgggaaatcagccttacactgggctgcggctgtgaacaacgtggaagccactttggccctgctcaaaaatggagccaataaggacatgcaggatagcaaggaggagacccccctattcctggccgcccgcgagggcagctatgaggctgccaagctgctgttggaccactttgccaaccgtgagatcaccgaccacctggacaggctgccgcgggacgtagcccaggagagactgcaccaggacatcgtgcgcttgctggatcaacccagtgggccccgcagcccccccggtccccacggcctggggcctctgctctgtcctccaggggccttcctccctggcctcaaagcggcacagtcggggtccaagaagagcaggaggccccccgggaaggcggggctggggccgcaggggccccgggggcggggcaagaagctgacgctggcctgcccgggccccctggctgacagctcggtcacgctgtcgcccgtggactcgctggactccccgcggcctttcggtgggccccctgcttcccctggtggcttcccccttgaggggccctatgcagctgccactgccactgcagtgtctctggcacagcttggtggcccaggccgggcgggtctagggcgccagccccctggaggatgtgtactcagcctgggcctgctgaaccctgtggctgtgcccctcgattgggcccggctgcccccacctgcccctccaggcccctcgttcctgctgccactggcgccgggaccccagctgctcaacccagggacccccgtctccccgcaggagcggcccccgccttacctggcagtcccaggacatggcgaggagtacccggcggctggggcacacagcagccccccaaaggcccgcttcctgcgggttcccagtgagcacccttacctgaccccatcccccgaatcccctgagcactgggccagcccctcacctccctccctctcagactggtccgaatccacgcctagcccagccactgccactggggccatggccaccaccactggggcactgcctgcccagccacttcccttgtctgttcccagctcccttgctcaggcccagacccagctggggccccagccggaagttacccccaagaggcaagtgttggcctgagacgctcgtcagttcttagatcttgggggcctaaagagacccccgtcctgcctcctttctttctctgtctcttccttccttttagtctttttcatcctcttctctttccaccaaccctcctgcatccttgccttgcagcgtgaccgagataggtcatcagcccagggcttcagtcttcctttatttataatgggtgggggctaccacccaccctctcagtcttgtgaagagtctgggacctccttcttccccacttctctcttccctcattcctttctctctccttctggcctctcatttccttacactctgacatgaatgaattattattatttttatttttctttttttttttacattttgtatagaaacaaattcatttaaacaaacttattattattattttttacaaaatatatatatggagatgctccctccccctgtgaaccccccagtgcccccgtggggctgagtctgtgggcccattcggccaagctggattctgtgtacctagtacacaggcatgactgggatcccgtgtaccgagtacacgacccaggtatgtaccaagtaggcacccttgggcgcacccactggggccaggggtcgggggagtgttgggagcctcctccccaccccacctccctcacttcactgcattccagatgggacatgttccatagccttgctggggaagggcccactgccaactccctctgccccagccccacccttggccatctccctttgggaactagggggctgctggtgggaaatgggagccagggcagatgtatgcattcctttgtgtccctgtaaatgtgggactacaagaagaggagctgcctgagtggtactttctcttcctggtaatcctctggcccagcctcatggcagaatagaggtatttttaggctatttttgtaatatggcttctggtcaaaatccctgtgtagctgaattcccaagccctgcattgtacagccccccactcccctcaccacctaataaaggaatagttaacactc

SEQ ID NO: 5311 - DNA, 594 bp, Homo sapiens
cttttcacaagatggtgccgaaagtgaagaaggaagctcctgcccctcctaaagccgaagccaaagcgaaggctttaaaggccaagaaggcagtgttgaaaggtgtccacagccacaaaaagaagatccacacgtcacccaccttccggcggccgaagacactgcgactccggagacagcccaaatatcctcggaagagcgctcccaggagaaacaagcttgaccactatgctatcatcaagtttccgctgaccactgagtctgccatgaagaagatagaagacaacaacacacttgtgttcattgtggatgttaaagccaacaagcaccagatcaaacaggctgtgaagaagctctatgacattgatgtggccaaggtcaacaccctgattcggcctgatggagagaagaaggtatatgttcgactgactcctgattacgatgctttggatgttgccaactatatcttttcaccatatacatgcctctctgtcaatttctggttgggctgggaggccacacacagacactgacatgacagggcttgggcaagactcctgttctacttatccttttgaaatattcaccctgcca

SEQ ID NO: 5312 - DNA, 2049 bp, Homo sapiens
gagcccagccgagcgtccgccgctgcccgtgcgcctctgcgctccgcgccatggccggcctcaactccctggaggcggtgaaacgcaagatccaggccctgcagcagcaggcggacgaggcggaagaccgcgcgcagggcctgcagcgggagctggacggcgagcgcgagcggcgcgagaaagctgaaggtgatgtggccgccctcaaccgacgcatccagctcgttgaggaggagttggacagggctcaggaacgactggccacggccctgcagaagctggaggaggcagaaaaagctgcagatgagagtgagagaggaatgaaggtgatagaaaaccgggccatgaaggatgaggagaagatggagattcaggagatgcagctcaaagaggccaagcacattgcggaagaggctgaccgcaaatacgaggaggtagctcgtaagctggtcatcctggagggtgagctggagagggcagaggagcgtgcggaggtgtctgaactaaaatgtggtgacctggaagaagaactcaagaatgttactaacaatctgaaatctctggaggctgcatctgaaaagtattctgaaaaggaggacaaatatgaagaagaaattaaacttctgtctgacaaactgaaagaggctgagacccgtgctgaatttgcagagagaacggttgcaaaactggaaaagacaattgatgacctggaagagaaacttgcccaggccaaagaagagaacgtgggcttacatcagacactggatcagacactaaacgaacttaactgtatataagcaaaacagaagagtcttgttccaacagaaactctggagctccgtgggtctttctcttctcttgtaagaagttccttttgttattgccatcttcgctttgctggaaatgtcaagcaaattatgaatacatgaccaaatattttgtatcggagaagctttgagcaccagttaaatctcattccttccctttttttttcaaatggcaccagctttttcagctctcttattttttccttaagtagcatttattcctaaggtaggcagggtatttcctagtaagcatactttcttaagacggaggccatttggttcctgggagaataggcagccccacactttgaagaatacagaccccagtatctagtcgtggatataattaaaacgctgaagaccataaccttttgggtcaactgttggtcaaactataggagagaccagggaccatcacatgggtagggattttccatccagagccaataaaaggactggtgggggccgggggtggctattgtgggaagtcataacccacagatagatcaacctaagaatcctggcccttctccactctccaccatgcaggacaaacatcttctcaagcagtcaacgtagaatgcttgggaaatagtcataattacccacatatagtaattaatagatggtaattaattgatccttgatgtgatgttcttttgcatatttccttcattctaaagttgttccctggccgggagcgtttgctttcgcctgtaatcccaacactttgggaggccaggacagatcacttgaggtcaggagttcgagaccagcccagccaacatggcgaaaccatgtctctactaaaaatacaaaaattatggtgacgcctgcctgtagtcccagctactcgggaggctgaggcaggaggatcgcttgaacccaggaagtggagactgcagtgagccgatatcgcaccacagcgctccagcctggtcgacagagtgagactccatctcaagaaaaaataaaaataaagttgttctctgaagagcaaatgtctcattccagtaatgacccactcagcaggaatatggtggagttcagtccaattcaggtcagccatatccaaaagaccacaagtcattactaagttgagcaaaagagtttttatctattagcagaaagggcctctctggcagcagagattaaaaactggcccaacttcatttccatacttcagggaacagcaaattgaggatttacttatctaggactt

SEQ ID NO: 5313 - protein, 248 aa, Homo sapiens
MAGLNSLEAVKRKIQALQQQADEAEDRAQGLQRELDGERERREKAEGDVAALNRRIQLVEEELDRAQERLATALQKLEEAEKAADESERGMKVIENRAMKDEEKMEIQEMQLKEAKHIAEEADRKYEEVARKLVILEGELERAEERAEVSELKCGDLEEELKNVTNNLKSLEAASEKYSEKEDKYEEEIKLLSDKLKEAETRAEFAERTVAKLEKTIDDLEEKLAQAKEENVGLHQTLDQTLNELNCI

SEQ ID NO: 5314 - DNA, 2048 bp, Homo sapiens
gctcggtgctgatggacggtgctggtggccagtggagaggcgctggccgcacttcccgtcggggagagagtgtaatatggcgaagacctacgattacctgttcaagctgctgctgatcggggactcgggggtggggaagacctgtgtcctgttccgcttctccgaggacgccttcaactccacttttatctccaccataggaattgactttaaaattaggaccatagagctcgatggcaagagaattaaactgcagatatgggacacagccggtcaggaacggtttcggacgatcacaacggcctactacaggggtgcaatgggcatcatgctggtctacgacatcaccaacgagaagtccttcgacaacatccggaactggattcgcaacattgaggagcacgcctctgcagacgtcgaaaagatgatactcgggaacaagtgtgatgtgaatgacaagagacaagtttccaaggaacggggagaaaagctggccctcgactatggaatcaagttcatggagaccagcgcgaaggccaacatcaatgtggaaaatgcatttttcactctcgccagagatatcaaagcaaaaatggacaaaaaattggaaggcaacagcccccaggggagcaaccagggagtcaaaatcacaccggaccagcagaagaggagcagctttttccgatgtgttcttctgtgaggaacaccgccttactctgagcctcgctcagcccagctgactgtgcctgttctgagtgagcccctcactcagccggggccctcccacctccaacgccccgcccacgccgcggccaccgggcccacggccaccagaatgcaattgagaaatcgtttattttagtaactgtctgatctttttcaactttggagatggaataagttaaaaatttgctatttttcctgtaacatctgctgaacgggcccacccacacgttgtatattcagagagagagagggagtcaaggtgtgaccgtcgaccacagccagtgtcaggcctctgcctctgggcctttgctttgtggcctcactgcaacacaaagctccaccaggaggctggttcacgtcccctaccacggaagcgaggtcccagaaggccagcggtggttccaggagcaacagctcccaaaccctgagcaaggcaaccgatcgccaggaccaggaagcatcacccaggagatttggcgcccacttccacctcttctctcagttttggacaagtgacaaaccattttgccccctcactcttcttttttaactgttaaaccaaaggaaagcacaaatgaaggaaatcctgtgtaaagcattgagaaggaaagaagcctggagcagcctctcctgtccacagccaggggttaggtctgcaggcccgtctgcggtccccatcgagcatcaaggggacgctgtgtgtgctgcaagtgaccccgaaaacaaccacagccgtcacatggtcctcctgaagttggggcaccctcctctcagcaccaaaatggcccccactccttcgtgtcctcccgctatctccaaatcggacgttctttctagctgagatttttatttttccacatctgtagtgccatgaagcgattctgtctttgacttccaatggcaaacctgggtgatcgggaacaagcacgttgtacccttggctggacatggccaagacacaaggcattccacggcggcaagctgaccgcacagcagtctggcttgattttcagccgtcatcattgggttctgttttgacagctctgctgtcccatagggactgcgactgggaccaggtcaaccacgccaggggggtgtcaccagccttttctttttttctttctttttttttttttcctccttaagctgctgtcaatccaaaccattggcatcatcgtttcttttcaattaaaaccaacatatcagcaatagtctgctctccccgggaatctctaacatgctctgtttacatcgataaatgcacttaaggaaaacaaacaaattaaagctcatcttaaagtccaaaaaaaaaaaaaaaaaaa

SEQ ID NO: 5315 - protein, 207 aa, Homo sapiens
MAKTYDYLFKLLLIGDSGVGKTCVLFRFSEDAFNSTFISTIGIDFKIRTIELDGKRIKLQIWDTAGQERFRTITTAYYRGAMGIMLVYDITNEKSFDNIRNWIRNIEEHASADVEKMILGNKCDVNDKRQVSKERGEKLALDYGIKFMETSAKANINVENAFFTLARDIKAKMDKKLEGNSPQGSNQGVKITPDQQKRSSFFRCVLL

SEQ ID NO: 5316 - DNA, 2278 bp, Homo sapiens
ggtgagctgtcgcgggcggcgcccggccttgctcaacgcccagcagtccccaccgtcgctgccgccgccaccgccctcggccgctgccgaggcctcctgcagccatcatgtccgccagcgccgtctacgtgctggacctgaagggcaaggtgctcatctgccggaactaccgtggcgacgtggacatgtcagaggtggagcacttcatgcccatcctgatggagaaggaggaggaggggatgctgtcgcccatcctggcccacgggggggtccgtttcatgtggatcaaacacaacaacctgtatctggttgccacatccaagaagaacgcgtgcgtgtcgctggtcttttctttcctctataaggtggtgcaggtgttttccgagtacttcaaggagctggaggaggagagcatccgggacaactttgttatcatctacgagctgctggacgagctcatggacttcggctacccccagaccaccgacagcaagatcctgcaggagtacatcactcaggaaggccacaagctggaaacaggggccccgcggccaccagccaccgtcaccaacgcggtgtcctggcggtccgaaggcatcaagtatcggaagaatgaggtgttcttggacgtcatcgagtctgtcaacctcttggtcagcgccaacggcaatgtcctgcgcagcgagatcgtgggctccatcaagatgcgagtcttcctctcgggcatgcccgagctgcgcctgggcctcaacgacaaggtcctctttgacaacacgggccgcggcaaaagcaaatccgtggagctggaggatgtgaagttccaccagtgtgtgcggctatcacgcttcgagaatgaccgcaccatctccttcatcccacccgacggcgagttcgagctcatgtcctaccgtctcaacacccacgtcaagcctttgatatggatcgagtcggtgatcgagaagcactcccacagccgcatcgagtacatgatcaaggccaaaagccagttcaagcggcggtcaacagccaacaacgtggagatccacattcccgtgcccaatgatgccgactcacccaagttcaagacgacggtggggagcgttaagtgggtccccgagaacagcgagatcgtgtggtccatcaagtccttcccgggcggcaaggagtacctgatgcgggcccacttcggcctgcctagtgtggaggccgaagacaaggagggcaagcccccgatcagtgtcaagttcgagatcccttacttcactacctccggcatccaggtgcgctacctgaagatcattgagaagagtgggtaccaggccctgccctgggtgcgttatatcacgcagaatggagattaccagctccggacccagtgaggggctgtcgcagccaacaccccggcctcgggctcctggtggcagcaccagggacacacctgccaaacccaccagatggaggggccctcctggtctctggccacccttccagcctctgcccagggactcctgccttcaccagggcatctgctctgccgtcgacactcgtctcagaagcccctttcccagaagaggctggtcttcaagaagtctcgtttctttgcccctgaagtcagtttcaggggaaggatgtgaaatttttccgtgtagaggttacagccttttatgctgttgagctcccaggtaccaaaaagcttggccaacgcttgccagccagccagctgcaggtggcatctgccacgaaggaagcgccacgctcgccaggccagcaggggcgtcgttttgttgccattttgttgaacgttatgggtttatgggtgttcctggaacttgtctttgtgcattcgttgctgtttgtgttaccctcactgtccccatgtcccacccacgtcctacggcactcaggaagcacttggtgaggacgagccctcacccttcttgtcttccttcccggcagcgccgcagcgggccatttacacgtcgaggctggcacctggcgcgctcgggggccactgtagcgtctgcctgctccctggactcgcaggcctcgcctgtggcgccttcccagggccagcctgggtcacgagatgctgtcactcagccagatcagtattgacccaccaggggaggtggggtttggtgagagacgccagcctcagactttttcccactgagggtccagagagcggggccacgtgtcacccacgtctgcgcttggtcacccgtcctccccaccctgtgtgtgtttatgtcatagttacattaaattccattcattg

SEQ ID NO: 5317 - DNA, 3345 bp, Homo sapiens
ccttcaggcctgaatgtggcggctgcctctgcgaatggacggcgtgggaagagaatggcttctgcaaggaaagccagccgtcccatgcgtgatgtttttggtgacttcagtgatgtttccttggaagattcaacaatggaagaaatcagaaacttccagatcagtagaaatcttaccaaaatagcacctggtcatagcagatttctaaaaagaaaccaaactctagatgagaaacacttactcctgaaagagaaccctgtgctcgggagtggacccaggcttgcctcatgtagaccgcccaccactgcctccaggatccgagccaatgccgcactcatgaagctggcccagctggaaacccggatcatgaatcggaagctgcagaggaatttgtctgacacggaatctgactcaatgaccgccgatgctggtcttccaaagagagctgacagaatcctctctgggggtgcactcgaactcgcgtcccagaacacagacaaaacttcccagaatcaagcccgtgaacttcctgtcaccgaaaataatgcacagaacgcgaaggtcagtaggtttctaaagaagaaacaagcacctgttgaaaacatatcccctgaagcacctgctgggaaagagaggactttgcaaacccccaaacagaaagaacctgctagaacatttgattctccagacagtgacgaagaagaaatgaaagtattgctaggaagcttgatggactcttctagagaaaaaaacacgaatcaaggcttcagcagcgctaacgtcagcgaggaagaagaaagaaaactattttcggtcccatctcaactgagagcatttactgtacccagcgtggaactctccagcgcaaagccttctcagacatcacacctgccaacctccctggcagcagacagaacccttcacagcactcgctcaagagcagactacccacagagtcacgtttccagtgacaccgcctcccacacgccgtcagtttccatcacaggcgccttttcaaactcagtgtctttaaagatggggcatgtcaagcttgtgtcctccccgggaaggagtgaggctgagactgtggacgagccagtctcagaaggtgctgatgacagcctcgacgagtttagaataaatattttatcgcttgacggtctggctccagctgtcagtgagaactccgatttggaacaggaagaggaaagtgctcagagacaaaaaacagctggcaaaatcttcagagccgaggcgtccactgggcaggatgccccgaggcaggcccaggcgaggagctgggcatcacagggaaaggccgcctctgcagagggggatgagagcgaggtctcggagcatctcagtgccagctcggcttctgccatccagcaggacagcacttccagcatgcagccaccatctgaagcccccatggtgaacacagtcagctcagcttattcggaggattttgaaaactctccaagtctgacagcatctgagccaaccgcccattccaaggagtctcttgacagaacactggacgctttgtctgaatcctcttcaagtgtgaagacagaccttccacaaacagccgagtctaggaaaaagtcgggcaggcacgtgacaagagtgcttgtgaaggacacagctgtgcagacgccagatcctgccttcacctacgagtggaccaaggtggccagcatggcagccatggggcctgccctgggaggcgcctacgtggacccgacacccatcgccaatcatgttatcagtgcagatgcaatagaagccctgaccgcttacagcccggccgtgctggcactccatgatgtgctgaagcagcagctgagcctgacgcagcagttcatccaggccagccggcacctgcacgcctccctcctgcgctccctggacgcggactccttccactaccacaccctggaggaagccaaagagtacattaggtgccacagacctgccccactgaccatggaggatgccctggaggaggtgaacaaggagctgtgagcgccagcaggtggagcttgacgtgacgtcttaacaaaagcaaagcaccgcagcttcccagagttaccagcgcagcacttaagacaggatcttacggcggggtggggctcctggaccgtgaccggcgtcgtcttcctggggagtacgacttggaccgggaccgcgactgggaccgggagcggcttctggaggagcgcgacctgctccgacttctgcagggaagggtgcccaagggtcagcagcagccaggcgtcgtggggaggccacaggaaggggcctcaggcactgccctgaggcagcctctgcctacctagatctggagcgggagtaggaacgggagcaggagcgcgaccttgaccttgagtacgagcctgaagacttggaggatcttgagttggagcgggaggaagaacgccctcgactcttggatctgctccgagacctcgagggtccgctgtggggagaggcctgatgatcaggtgccccagtggatgggctgcacccagcccaccctggccctcaggttcctagaccaccccagatgcaggggctctggctgtggatgtggcgccatagccacagcaacggtaccaagttcctaaatagtgtggccgagcctgctgctgtgtgaattcaggccttgtggaaaacaccgccccataggcacaggctgtgtgagggtggacgtgatgagtgtatctggggtctgctcccacccatcacaagctgtggaccctggccccccggccactgcagacatctgcgcttttacctgttcctcttctcctggcctttcctccgccgggcccgcatttttgctcggaagaactcatagaggccgttctgctcccagccttcactgtaagacacggcattccgtgtgtgaccacgtgacacccacccacaaggaagtcgtgaaaaagtcatcaggagttaatccacagaaccttggagagtacatggccctgtggctgtgggctccgagcatgggcgcagtagagcttggttcagtgttcccacagggctgtcctcctgcagcccagtggctcctctggtgcccacgcccttgccaccctgctgttccgctgaggtggtggggacccatggtctgtggaactgggaaacaggaacactgactcatgggtggacaggcctgcagcccagcacaggaaggaggggtgaccactgggaagggtgggctgagggccctgtggcagccggctgcttgagacgtgccgccgtgccacaccttccctaacttcttctgatgtgtctccattaaaacgcccttcattgaaaaaaaaaaaaaaaaaaaaa

SEQ ID NO: 5318 - protein, 657 aa, Homo sapiens
MASARKASRPMRDVFGDFSDVSLEDSTMEEIRNFQISRNLTKIAPGHSRFLKRNQTLDEKHLLLKENPVLGSGPRLASCRPPTTASRIRANAALMKLAQLETRIMNRKLQRNLSDTESDSMTADAGLPKRADRILSGGALELASQNTDKTSQNQARELPVTENNAQNAKVSRFLKKKQAPVENISPEAPAGKERTLQTPKQKEPARTFDSPDSDEEEMKVLLGSLMDSSREKNTNQGFSSANVSEEEERKLFSVPSQLRAFTVPSVELSSAKPSQTSHLPTSLAADRTLHSTRSRADYPQSHVSSDTASHTPSVSITGAFSNSVSLKMGHVKLVSSPGRSEAETVDEPVSEGADDSLDEFRINILSLDGLAPAVSENSDLEQEEESAQRQKTAGKIFRAEASTGQDAPRQAQARSWASQGKAASAEGDESEVSEHLSASSASAIQQDSTSSMQPPSEAPMVNTVSSAYSEDFENSPSLTASEPTAHSKESLDRTLDALSESSSSVKTDLPQTAESRKKSGRHVTRVLVKDTAVQTPDPAFTYEWTKVASMAAMGPALGGAYVDPTPIANHVISADAIEALTAYSPAVLALHDVLKQQLSLTQQFIQASRHLHASLLRSLDADSFHYHTLEEAKEYIRCHRPAPLTMEDALEEVNKEL

SEQ ID NO: 5319 - DNA, 4114 bp, Homo sapiens
ggcacgagggcagacggcgctggtggtcgatcgtgtggcgccggaggacgttccccgcggccggagccatggagatgccgctgccccccgatgaccaggagcttcgaaatgtcatcgacaagctcgcccagttcgtggctcgcaatgggcccgagtttgagaagatgactatggagaagcagaaggacaaccccaaattctcgtttcttttcggaggcgaattctacagttactacaagtgcaagctggcgctggagcagcagcagctcatctgcaagcagcagaccccggagctggagccagccgccaccatgccacccctgccacagcccccgctggcccccgccgcgcccatcccgccggcccagggcgcgccatccatggacgagctcatccagcagagccagtggaacctccagcagcaggagcagcacttgctggcgctcagacaggagcaagtgacagcggccgtggcccacgcggtggagcagcagatgcagaagcttctggaggagacccagctagacatgaacgagtttgacaacctcctgcagcccatcatcgacacgtgcaccaaggacgccatctcggccgggaagaactggatgttcagcaatgccaagtccccgccgcactgtgagctgatggccggccacctccggaaccgcatcacggctgatggggcacacttcgagctgcggctgcacctcatctacctgatcaatgacgtgctgcaccactgccagcgcaagcaggcccgggagctgctggccgccctgcagaaggtcgtggtgcccatctactgcaccagcttcttggccgtggaggaagacaagcagcagaagatcgcccggctcctgcagctctgggagaaaaacggctacttcgatgactccatcattcagcagctacagagcccagccctggggcttggtcagtaccaggccaccctcatcaacgagtactcctcagtggtccagccggtgcagctggccttccagcagcagatccagaccctcaagacgcagcacgaggagtttgtcaccagcctggcccagcagcagcagcagcagcaacagcagcagcagcagctccagatgccgcagatggaggctgaagtcaaggccacgcctccaccgcctgctccacccccggccccagcacctgcccctgccatcccgcccaccacccagcctgatgacagcaagcctcccatccagatgcctggctcttcagagtacgaagctccaggaggggtccaggatcctgcagctgccggcccccggggccccgggccacacgaccagatcccaccaaacaagcccccttggtttgaccagcctcaccccgtggctccttggggccagcagcagccgccagagcagccaccctacccgcaccaccagggcggcccaccccactgccccccctggaacaacagccatgagggcatgtggggcgagcagcgcggtgaccccggctggaacggccagcgcgacgcgccctggaacaaccagcccgacgccgcctggaacagccagttcgagggcccctggaacagccagcacgagcagccgccctggggcgggggccagcgcgagccacccttccgcatgcagcggcccccacacttccgggggcccttcccgccccaccagcagcacccgcagttcaaccagcctccgcacccccacaacttcaaccgcttcccgccccgcttcatgcaggacgacttcccgccacggcaccccttcgagcggccgccctatccccaccgcttcgactacccccagggggacttccctgccgaaatggggccccctcaccaccaccctggccaccgcatgcctcatcctggcatcaacgagcacccgccttgggctggaccccagcaccctgacttcggccctcccccccatggcttcaacgggcagcccccacacatgcggcgacagggcccgccccacatcaaccacgatgaccccagcctggtccccaatgtgccctacttcgatctccctgctgggctgatggcccccctcgtgaagctggaagatcacgagtacaagcctttggaccctaaagacatccgcctcccaccccccatgccgcccagcgagaggctgctggctgcagtggaggccttctacagccccccgtcccacgacaggcccaggaacagtgaaggctgggagcagaacggcctctatgagttcttccgagcaaaaatgcgggcccggcggaggaaaggccaggagaagaggaacagcggaccctcgaggtctcggagcagatccaagagtcgagggcgttcttcctcccgctccaactcaagatcctccaagtcttcaggctcgtactcaaggtcaaggtcgcgctcctgctcccgttcctactcccgctccagatctagaagtcggagcaggtcgcgctcctccagaagccgctcccggtcccagtcgcggtcccggtccaagtcgtactccccaggaagaagacgccggtcacggtccaggagccccaccccgccttcctctgctggtctgggttctaattcggcgcctcccattcctgactcaaggctcggagaagagaacaaaggccatcagatgctggtgaagatgggctggagcggctcaggcggcctcggtgcgaaggagcaagggatccaggaccccatcaagggcggggacgtccgggataagtgggaccagtataaaggcgtgggcgtggctctggatgacccctatgagaactaccgcaggaacaagagctactccttcatcgcccgcatgaaggccagggacgagtgtaagtaggcgcccatgccgggagccgcgccggtggccagcggtgccggctgtgggaccttcctggctgactggcagaggaagattgcagtgacagctcagttcttacaccgtctccacttgtggagagccacaggaagagaaggaagaccagcgcatgcccagtgggaacgccgtgctccatggcgtggagggcacgggtgccacccacaaaccacaccaggaggcgctgcagccaccagggccccaggctcgttttcctttatagcgaagcaaaaaacacaagaccctccgcccgagtaaattcttcagccacgaagggatggatgtgcatctgccctaagtcagattgaagcctcctcctaggctccaggaggagcatgtgcaggaagggttggcctgagccagagccggcaccccagctccttcctccagctccccgcacccaccggccctgacctggcttcccctcggctgtgtagggacaaagccgaagcccagtgccatgactgcccgcggattgaaaaacagaaacacaaaactttgacttgacttgcgaagtgaagcagggttttcatttttactctccttggtttaggtctagaaagaagaatactgacctgagaggaggcccagtgagattctgaaacctaattcttcgaaggcgtactggcccttagttcagttattttagttgtataagttgatattttttttctggaatgtagccatttgctgttatctgggaaacaagattctaacaggaaaccagcctaagacacttcaggttgagcgctgcctcggagtctgtgcccgtcgcgtcccctgcttgagttttgcacttggaagaaccctgcaccggctggcgtgtgcgacggcccagtcccatccagagcatggagcccgaccccagccagcgccttccactccatcatttcatttcacacccccgaagggaggggaggccaggaggggagctgctcctgccagaagctggtgggtgaccgttgggaatcggccacacctggtgtccatgggcagcctggtgcaattccattcatttgtacagaaacatttttgaaaaattcttttcaataagatgcaaaatcttccaacttttcaacccaacgtgatgaatatttgattttgttctagatttcctgtagctgtgaattgttaaaatgtatgattcaggataaaacgtaaacacgtgctgttagtaatttcttgtggatttcattgttttgccttcaaataaagcctttttttaaagaaaaaaaaaaaaaaaaaaaaaaaaaaaaaaa

SEQ ID NO: 5320 - protein, 884 aa, Homo sapiens
MTMEKQKDNPKFSFLFGGEFYSYYKCKLALEQQQLICKQQTPELEPAATMPPLPQPPLAPAAPIPPAQGAPSMDELIQQSQWNLQQQEQHLLALRQEQVTAAVAHAVEQQMQKLLEETQLDMNEFDNLLQPIIDTCTKDAISAGKNWMFSNAKSPPHCELMAGHLRNRITADGAHFELRLHLIYLINDVLHHCQRKQARELLAALQKVVVPIYCTSFLAVEEDKQQKIARLLQLWEKNGYFDDSIIQQLQSPALGLGQYQATLINEYSSVVQPVQLAFQQQIQTLKTQHEEFVTSLAQQQQQQQQQQQQLQMPQMEAEVKATPPPPAPPPAPAPAPAIPPTTQPDDSKPPIQMPGSSEYEAPGGVQDPAAAGPRGPGPHDQIPPNKPPWFDQPHPVAPWGQQQPPEQPPYPHHQGGPPHCPPWNNSHEGMWGEQRGDPGWNGQRDAPWNNQPDAAWNSQFEGPWNSQHEQPPWGGGQREPPFRMQRPPHFRGPFPPHQQHPQFNQPPHPHNFNRFPPRFMQDDFPPRHPFERPPYPHRFDYPQGDFPAEMGPPHHHPGHRMPHPGINEHPPWAGPQHPDFGPPPHGFNGQPPHMRRQGPPHINHDDPSLVPNVPYFDLPAGLMAPLVKLEDHEYKPLDPKDIRLPPPMPPSERLLAAVEAFYSPPSHDRPRNSEGWEQNGLYEFFRAKMRARRRKGQEKRNSGPSRSRSRSKSRGRSSSRSNSRSSKSSGSYSRSRSRSCSRSYSRSRSRSRSRSRSSRSRSRSQSRSRSKSYSPGRRRRSRSRSPTPPSSAGLGSNSAPPIPDSRLGEENKGHQMLVKMGWSGSGGLGAKEQGIQDPIKGGDVRDKWDQYKGVGVALDDPYENYRRNKSYSFIARMKARDECK

SEQ ID NO: 5321 - DNA, 2949 bp, Homo sapiens
gtgccacatcctggctctgtgcgctgggctcccgccgctgctgcgcgcctggcgcgtgccccccgcgccgcccgtctcgggccccggacccagtccgcatccgtcgtccggcccgctgctgccgccgcgcttctacccgcgctacgtgctaccgctcgccttcggcaagtacttcgcgtccgtgtcagcgcacgtcagcatctggaaggtgcccgtgtcctatgcacacaccgtcaaggccaccatgcccatctgggtggtcctcctgtcccggatcattatgaaggagaagcagagcaccaaggtatacttgtcactcatccccatcatcagcggtgtcctgctggccaccgtcaccgagttgtcttttgacatgtggggactcgtcagcgccctcgccgccacgctgtgcttctcgcttcagaacattttctccaaaaaggtcttgcgagattcacggatccaccatctccggctgctcaacatcctgggctgccacgccgtcttctttatgatccccacctgggttctggtggacctctcggctttcctggtcagcagcgacttgacctacgtctaccagtggccctggacgctcctgctcctggctgtcagcggcttctgtaactttgcccagaatgttatcgccttcagcatcctcaacctcgttagccccctgagctactcggtcgccaatgccaccaaaagaatcatggtcatcacggtgtccctgatcatgctgcgcaacccagtcaccagcaccaacgtcctgggcatgatgaccgccatcctgggggtcttcctctataacaagaccaagtacgatgcaaaccagcaagccaggaagcacctcctccccgtcaccacagcagacctgagcagcaaggagcgtcaccggagcccactggagaagccccacaacggcctcctcttcccccagcacggggactatcagtacggccgcaacaacatcttaacagaccacttccaatacagccggcagagctacccaaactcgtacagtttgaaccgctatgatgtgtagagtccaaaggacaggaccagactgttggtgactccttccccggcccccacagcagtatcagaaacttctgacaatcagtgaatgtacaacccagccgaggggacggtgcataactctccatcagaagccctggggttcctggccccccgtgagccgcaggaggatgcgttgcctgcagtgcagacggccgtgagctctgggcaaacctaaacagagaccagtgtctcatgctctttcttcctggagtctgtcatctgagggccgtgtccctgcggagatcttggccacgttgtacctttccatgtggaattattccccaagcagtgtagctcagagcacttgtgtctgcattccagataacattcaggacctgtgtgaaaagctggggtcactgtggctgtagaccatgaactggcagtgggggtgtccagggcggtgcttgagaacgtcagactggctagtttaattccctggcgcagatacgcataggaccaacagggtcaccaagcagacagggagcccgcgagaatcattcaaaacatccccagccacagagatggatccagtttcctggtcatccccttagcagttcacaagttcctggcaaatgttccaaagcaaaaagcgattgcaattagcatccagttcctgcagcctggtgctctgccctgcacgtcagggttggcatccacccagatccagatggaagggaaacttctctcttctcctttgcctcctcttccctcaccagagcagggcgcttctcttggggtggtgagaaggatcttcgagaaatcgtgttcagtatttcaagctctatttctgtggcacatgtcttttgagaggcatcttcacctcttctgtgatgacttggtatgttgtttggtagagagatcttgattttcggaggatcttgcatttttctagggaatattttgtagttgtgtgtgtgtgtttttgccttggtccccattatgggatgcattaggactggcctatgcatcgaaaatctttttgtttgtaaacgtttaaaaacaaagttccccggccaggcacagtggctcacacctgtaatcccagcactttgggaggccaagatgggcggatcacgaggtcaggagttcgagaccagcctggccaacatagtgaaaccccatctctactaaaaatacagaaattagccgggcatggtgtcgcgtgcctgtagtcccagctcctcaggctgctgaggcaggcgaattgcttgaacctgggaggcagaagttgtggtgagccgagattgtgcactccagcctgggtaacagagcgagactccatctcaaaaaaaaacaaaacaaaaccaagttcccactggtgatgcctgtctgacacgttttggtatttagtaggaaatgaagtgtttcgaagcttcgagagaagcttcaaaattgtcacaattgctgaaaacagaatgaatcgtgaacattatctcaatattttgtataatagacaagaccacagtgttttggttccctgacctgtttttgtgtttatgttaggatctgaatcatgttctgggtaaggggacgaggagcgaacactgcactaagatttggtttgccaaatcagattctttggtcaagagtcagtttggggccaggcgtggtggctcatgcctgtaatctcagcactttgggaggctgaggtgggtggatcactggagtttgagaccaccctggccaacatggtgaaaccccatctctactaaaacaaaaattagccaggcatggtggcacctgcctgtaatcccagctacttgggaggctgaggcaggagaatcacttgagcccaggaggtggaggtttcagcgagctgagatcacaccactgcactccagccttggtgacagagtgagactctgtctc

SEQ ID NO: 5322 - protein, 266 aa, Homo sapiens
MPIWVVLLSRIIMKEKQSTKVYLSLIPIISGVLLATVTELSFDMWGLVSALAATLCFSLQNIFSKKVLRDSRIHHLRLLNILGCHAVFFMIPTWVLVDLSAFLVSSDLTYVYQWPWTLLLLAVSGFCNFAQNVIAFSILNLVSPLSYSVANATKRIMVITVSLIMLRNPVTSTNVLGMMTAILGVFLYNKTKYDANQQARKHLLPVTTADLSSKERHRSPLEKPHNGLLFPQHGDYQYGRNNILTDHFQYSRQSYPNSYSLNRYDV

SEQ ID NO: 5323 - DNA, 1171 bp, Homo sapiens
ggcacgaggggaacatcttcatgatgttctgcatgattgtgctgttcggctcttgaatcccagcgatgaaaccaggaactcactttcccgggatgccgagtctccattcctccattcctgatgacttcaagaatgtttttgaccagaaaaccgacaaccttcccagaaagtccaagctcgtggtgggtggaaaagtgttcgccgaggtgtgcatggtttcccagccacgtccctgttttcaaagatagtttcactttggtctctgaattgaaatgctgtctactgaaagggtttcaggagcgtttatgtaaggggctgtgatgaaattgcattccccatagataaaagaaaaatcatttctatccagagatctgagcagaaggattggcttgttagtttaacacagccgtatttttggacattcagtgttacttgctgagtctgacagcctctgggcccggccaggggccctgttaacaaactgctttcacatcccaacagggtctgcttggccactcagtgcagctgcgattaaccctaaaggctttaaggaacgggccacctgtaacagagacaccagccttcctgtatagacactaaattgttagcaagagtgttgagctagttcctggtgaagtgtttccacagaagacatgtggagcagttgtggggatattaagggaaactttcctctgccttgacccctttgttaaataaaatgactttgggagccattcattgtacagttgcaggaatgagagtgattttatgatgtggtacattgggaccatgttctaaaaccttgggtttctgagtctgctttttgagtaggtgattttgaggttgaaaaaccaggggccttcatctaggaaatacagcattttccagaagcttctttgaaagggaatcctggttttgttgccaaaatgaaacgcccggggttggcgctgaatcccacaactgtgtgatttgcttgttgagttttttgttgtctggtttttttgtttgtttgtttataccaataagaatgagcctgaatgttggtggtttttgaaatcctgacttggaggtaaacctggaggaaggaaaaaaagtaaatatgcaggcttttaggactgagtagccttgaaaataaacctcatttctaaaaaggaaaaaaaaaaaaaaaaaa

SEQ ID NO: 5324 - protein, 51 aa, Homo sapiens
MPSLHSSIPDDFKNVFDQKTDNLPRKSKLVVGGKVFAEVCMVSQPRPCFQR

SEQ ID NO: 5325 - DNA, 7455 bp, Homo sapiens
atgagtgtgaaagaggcaggcagctcgggccgccgggagcaggcggcctaccacctgcacatctacccccagctgtccaccaccgagagccaggcctcgtgccgcgtgactgccaccaaggacagcaccacctcggacgtcatcaaggacgccattgccagcctgcggctggacggcaccaaatgttatgtgctggtggaggtcaaagagtcgggaggcgaggaatgggtgctggacgccaacgactcgcctgtgcaccgggtgctgctatggccccggcgggcacaggacgagcaccctcaggaggatggctactacttcctgctgcaggagcgcaacgcagatggaaccatcaagtacgtgcatatgcagctggtggcgcaggccacagccacccggcgcctagtggagcgtggcctcctgccacggcagcaggcggactttgatgacctgtgtaacctccccgagctaaccgagggcaacctcctgaagaacctcaagcaccgcttcctgcaacaaaagatctacacgtacgcggggagcatcctggtggccatcaacccctttaagttcctgcccatctacaaccccaagtacgtgaagatgtatgagaaccagcagctgggcaagctggagccacacgtcttcgcgctggccgacgtggcctactacaccatgctcaggaagcgcgtgaaccagtgcatcgtgatctcgggtgagagcggctccggcaagacccagagcaccaacttcctcatccactgcctcaccgccctcagccagaagggctacgccagcggcgtcgagaggaccatcctgggtgctggccctgtgctggaggcttttggaaatgccaagacagcccacaacaacaactccagccggtttgggaaattcatccaagtcagctacctagagagtggcatcgtgagaggagctgtcgtcgagaaatatctgcttgaaaagtctcgcctggtgtctcaggagaaggatgagaggaactaccatgtgttttattatttgttacttggggtcagcgaggaagagcgccaagaatttcagctcaagcagcctgaagattatttctacctcaaccagcataacttgaagattgaagatggggaggacctgaagcatgactttgagaggctcaagcaggccatggagatggtgggcttcctccccgccaccaagaagcagatttttgccgtcctctcggccatcctgtacctgggcaacgtcacttataagaagagagctacaggccgagaggaagggttggaggtcgggccacccgaggtgctggacaccctgtcgcagcttctgaaggtgaagcgagaaatcttggtggaggttctgaccaaaagaaaaacggtgaccgtcaacgacaagcttatccttccctacagcctcagcgaggccatcactgcccgcgactccatggccaagtctctgtacagcgccctgttcgactggattgtgctgcggatcaaccacgcactcctcaacaagaaggacgtggaagaggcagtctcgtgcctgtccattggggtcctggacatcttcgggtttgaagacttcgagaggaacagctttgagcagttctgcatcaactacgccaatgagcagctgcagtattacttcaaccagcacatcttcaagctggagcaggaggaatatcagggcgaggggatcacgtggcacaacatcggctacacagacaatgtcggctgcatccatctcatcagcaagaaacccacgggcctcttctacctgctggacgaggagagcaacttcccccacgccacgagccagaccctgctggccaagttcaaacagcaacatgaggacaataagtacttcctgggcaccccggtcatggagccagctttcatcatccagcacttcgcagggaaggtgaaatatcagatcaaggacttccgggagaagaacatggactacatgcggccagacatcgtggccctgctgcggggcagtgacagctcctacgtgcgggagctcatcggcatggaccccgtggccgtgttccgctgggccgtgctccgggctgctatccgggccatggcagtgcttcgggaggccggacgcctgcgggccgagagggccgaaaaggctgcaggtatgagcagccctggtgcccaaagtcacccagaagagctgccaagaggagccagcaccccttcggaaaaactttaccgcgatttgcataaccaaatgatcaagagcatcaaaggattgccctggcagggcgaggacccccgtagccttctccagtccctcagtcggctccagaaaccccgcgccttcatcctgaaaagtaaaggtatcaaacaaaagcagatcattccaaagaacctactggactccaagtccctgaaactcatcatcagcatgactctgcacgaccgcaccaccaagtccctactgcacctgcacaagaagaaaaagccaccaagcatcagcgcccagttccagacatcccttaacaagctcttggaggcactggggaaggcggagcccttctttatccgctgcatccgttccaatgctgaaaagaaagagctgtgctttgacgacgagctggtcctgcagcagctgcgctacaccggcatgctggagaccgtgcgcatccggaggtcagggtacagcgccaagtacacgttccaggatttcaccgagcagttccaggtgctcctgcccaaggatgcccagccctgcagggaggtcatctccaccctcctggagaaaatgaagatagacaagaggaactaccagatcgggaagaccaaggtcttcctgaaggagacggagcggcaagccctgcaggagacgctgcaccgggaggtggtgcggaaaatcctgctgctgcagagctggttccggatggtgctggagcgtcggcacttcctgcagatgaagcgggccgccgtcaccatccaggcctgctggcggtcctaccgggtccggagggcgctggagaggacgcaggctgccgtgtacctccaggcctcatggaggggctactggcagcggaagctctaccggcaccagaaacagagcatcatccgcctgcagagcctgtgtcgggggcacctgcagcgcaagagcttcagccagatgatctcggagaagcagaaggcagaagagaaggagagggaagccctggaagccgcaagagcaggtgctgaggagggcggacagggtcaggcggctggagggcagcaggtagctgagcaggggccggagccagcggaggatggcgggcacctggcatcggagcctgaggtgcagccaagtgacaggtcccccctagagcactcctcacctgagaaggaggccccaagcccagagaagactctcccaccccagaaaaccgtggcggctgaaagtcacgagaaagtccccagcagccgggagaagcgtgagtcgcgtcggcaaagagggctggagcacgtcaagttccagaacaaacacatccagtcctgcaaggaggagagtgccctcagagaaccttccagaagggtcacccaggagcaaggggtgagtctcctggaagacaaaaaggagagcagagaagatgaaacccttctagtcgtagagacggaggctgagaacacatctcaaaagcagcccacagagcaaccccaggccatggcagttggcaaggtctctgaagaaactgagaagacgctgcccagtgggagccccaggcctggccagttggagcggccgaccagcctggccctggacagcagggtcagcccaccggcccctggcagcgcccccgagacccccgaggacaagagcaaaccatgtggcagcccaagggttcaggaaaagcccgacagccccggaggctccacgcagatccagcggtacctggacgccgagcggctggccagcgccgtggaactgtggcggggcaagaagctggtggccgccgccagccctagtgccatgctcagccagtccctggacctcagcgacagacaccgggccacaggggccgccctcacgcccacagaggagaggcgcacctccttctccacgagcgacgtctccaagctcctcccgtccctggccaaggctcagcctgcagcagaaaccacggacggagagcgaagtgcgaaaaagccagctgtccagaagaagaagccaggcgacgcatcctccctcccagacgcagggctgtccccgggctctcaggtcgactctaaatccacgtttaagaggctttttctgcataaaaccaaggataaaaaatacagcctggagggcgcagaggagctggagaatgcagtgtccgggcacgtggtgctggaagccaccaccatgaagaagggcctggaagccccctccggacagcagcatcgccacgctgcaggtgagaagcgcaccaaggaaccaggaggcaaagggaagaagaaccgaaatgtcaagattgggaagatcacagtgtcagagaagtggcgggaatcggtgttccgccagatcaccaacgccaatgagctcaagtacctggacgagttcctgctcaacaagataaatgacctccgttcccagaagacgcccattgagagcttgtttatcgaagccaccgagaagttcaggagcaacatcaaaacgatgtactctgtcccgaacgggaagatccacgtgggctacaaggatctgatggagaactaccagatcgtcgtcagcaacctggccactgagcgtggccagaaggacaccaacctggtcctcaacctcttccagtcactgctagatgagttcacccgtggctacaccaagaacgacttcgagccagtgaagcagagcaaagctcagaagaagaagcggaagcaggagcgtgctgtccaggagcacaacgggcacgtgttcgccagctaccaggttagcatcccgcagtcgtgcgagcagtgcctctcctatatctggctcatggacaaggccctgctctgcagcgtgtgcaagatgacctgccacaagaagtgcgtgcacaagattcagagccactgctcctacacctacgggaggaagggcgagccaggcgttgagcctggccacttcggcgtgtgcgtagacagcctgaccagcgacaaggcctcggtgcccatcgtgctggagaagctcctggaacacgtggagatgcacggcctgtacaccgagggcctctaccgcaagtcgggtgctgccaaccgcactcgggagctccggcaggcgctgcagacagaccccgcagcagtcaagctggagaacttccccatccacgccatcacaggggtgctgaagcagtggctgcgggagctgcccgagcccctcatgaccttcgcacagtacggcgacttcctccgagccgtcgagctgccggagaagcaggagcagctggctgccatctatgccgtcctggagcaccttccagaagccaaccacaactccctggagagactcatcttccaccttgtcaaggtggccctgctcgaggatgtcaaccgcatgtcacctggggcgctggccattatcttcgcaccctgcctcctgcgctgccctgacaactcggacccgctgaccagcatgaaggacgtcctcaagatcaccacgtgcgtggagatgctgatcaaggagcagatgaggaaatacaaagtgaagatggaggagatcagccaactggaggctgcagagagtatcgccttccgcaggctttcgctcctgcgacaaaatgctccatggcctctcaaactggggttttcgtctccctatgagggggtcctgaacaagagccccaagacccgggacatccaggaggaggagctggaggtgctgctggaggaggaggcagccggcggcgatgaggaccgggaaaaggagattctcattgaacggatccagtccatcaaggaggagaaggaggacatcacctaccggctgccggagctggacccaaggggctcggacgaggagaacctggactcggagacgtcggccagcaccgagagcctgctggaggagcgggccgggcggggggcctcggaagggccccctgcgcctgctctcccttgccccggcgcgcccaccccgagccccctccccaccgtggccgcccctccacgacgaaggccgtcgtccttcgtaacggtcagagtgaagaccccccggcggacccccatcatgcccacggccaacatcaagctcccaccaggcctgccctcccacctgcctcgctgggcaccgggtgcccgggaggcggctgccccagtgcggcgccgggagccacctgcccgccgcccggaccagatacattccgtgtacatcacgcccggggcagacctgccagtgcagggcgccctggagcccctagaagaggatggccagccacctggggccaagcggaggtactcggatcccccaacgtactgcctgccccccgcctcgggccagaccaatggctgagagccacagctgacaaagtctgcatgtccgaggacggcccctgcactggagctgggcgccagagctgcagagctagtgttcggccctcagagaaggatccagaatcaaaagctcaagagtgacgtgaggtgggcaccggccccaagtgcagagtcaaggcagggagaggccggctggagccaggccccctcgcacgcagcccccaaatcatggacgcacctgtggggagcaccacatctccacctgcggcctcacatctccccactcccctttttgtacgtttaactgtttctttgtacgtggtttacgtaactttaaactgtaacagccttaatggaagaccaaatggttttttatatgtgtatgtacaaagttttctattaacgctgcccgtctcccttataacctggacgtgagctgtcagagcagaagccactaggccactgcgcgtctgaggctcagaccctgctgtggttggcttggggtggccaatgggctgggaccctccatgagagttttggacacttgggtcacctgacccgtgcctctctgacacatgtctccggggggcagccacctggccaatgtgcatttttgcacatgctggaaccttccatgggggtctgggctattggctggagccaggacatgagtcaggggcaccatggacctcacgtgccagggagacttgaatgtggctgtcactcttccggacgccaagggctgcaggaggctgcttttggcactacccaccccgtgtgacagaataggagccagcgactcaggactgctcacgggtcaggagggcaacgcctgaagtcagacctccctataggtcaacagggacaacctggggatctctggagcagggccctcctctctcaggcttggcccactcccccagacacctggacacgtggccacaaatctgggacaaggggcccccgcacagcatgaaataaaaagtgcctgagaagtgtg

SEQ ID NO: 5326 - DNA, 1432 bp, Homo sapiens
cctgatcagcggggccgggggcggcgccgtacaacttccggctgtaaagatggcggcttcctagtgagtcggcggctgatttagaaggaggttcaggctacggtgagccgaagccacacaggagccatggaagtggcagagcccagcagccccactgaagaggaggaggaggaagaggagcactcggcagagcctcggccccgcactcgctccaatcctgaaggggctgaggaccgggcagtaggggcacaggccagcgtgggcagccgcagcgagggtgagggtgaggccgccagtgctgatgatgggagcctcaacacttcaggagccggccctaagtcctggcaggtgcccccgccagcccctgaggtccaaattcggacaccaagggtcaactgtccagagaaagtgattatctgcctggacctgtcagaggaaatgtcactgccaaagctggagtcgttcaacggctccaaaaccaacgccctcaatgtctcccagaagatgattgagatgttcgtgcggacaaaacacaagatcgacaaaagccacgagtttgcactggtggtggtgaacgatgacacggcctggctgtctggcctgacctccgacccccgcgagctctgtagctgcctctatgatctggagacggcctcctgttccaccttcaatctggaaggacttttcagcctcatccagcagaaaactgagcttccggtcacagagaacgtgcagacgattcccccgccatatgtggtccgcaccatccttgtctacagccgtccaccttgccagccccagttctccttgacggagcccatgaagaaaatgttccagtgcccatatttcttctttgacgttgtttacatccacaatggcactgaggagaaggaggaggagatgagttggaagatatgtttgccttcatgggcagcctggataccaagggtaccagctacaagtatgaggtggcactggctgggccagccctggagttgcacaactgcatggcgaaactgttggcccaccccctgcagcggccttgccagagccatgcttcctacagcctgctggaggaggaggatgaagccattgaggttgaggccactgtctgaaccatccctgtacatctgcaccttcttgtgcaaggaagtccttggcctaaagccttggttctcaaactgggttccttgggacctccggggtgggggggttccaggaggcacgtagggtaccttgcagggtcctaggagggaaacccaggattccaggagggatcccaggaactgtgggcacccattttctgtgtctcccagcccatttccactcctagtttgtcatggataatttttgttcttccctgtgtgatttttgccatcaaaataaaaatttgagactcgttaaaaaaaaaaaaaaaaaaaaaaaaaaaaaa

SEQ ID NO: 5327 - protein, 367 aa, Homo sapiens
MEVAEPSSPTEEEEEEEEHSAEPRPRTRSNPEGAEDRAVGAQASVGSRSEGEGEAASADDGSLNTSGAGPKSWQVPPPAPEVQIRTPRVNCPEKVIICLDLSEEMSLPKLESFNGSKTNALNVSQKMIEMFVRTKHKIDKSHEFALVVVNDDTAWLSGLTSDPRELCSCLYDLETASCSTFNLEGLFSLIQQKTELPVTENVQTIPPPYVVRTILVYSRPPCQPQFSLTEPMKKMFQCPYFFFDVVYIHNGTEEKEEEMSWKICLPSWAAWIPRVPATSMRWHWLGQPWSCTTAWRNCWPTPCSGLARAMLPTACWRRRMKPLRLRPLSEPSLYICTFLCKEVLGLKPWFSNWVPWDLRGGGVPGGT

SEQ ID NO: 5328 - DNA, 983 bp, Homo sapiens
gtggaattcatggcatctacttcgtatgactattgcagagtgcccatggaagacggggataagcgctgtaagcttctgctggggataggaattctggtgctcctgatcatcgtgattctgggggtgcccttgattatcttcaccatcaaggccaacagcgaggcctgccgggacggccttcgggcagtgatggagtgtcgcaatgtcacccatctcctgcaacaagagctgaccgaggcccagaagggctttcaggatgtggaggcccaggccgccacctgcaaccacactgtgatggccctaatggcttccctggatgcagagaaggcccaaggacaaaagaaagtggaggagcttgagggagagatcactacattaaaccataagcttcaggacgcgtctgcagaggtggagcgactgagaagagaaaaccaggtcttaagcgtgagaatcgcggacaagaagtactaccccagctcccaggactccagctccgctgcggcgccccagctgctgattgtgctgctgggcctcagcgctctgctgcagtgagatcccaggaagctggcacatcttggaaggtccgtcctgctcggcttttcgcttgaacattcccttgatctcatcagttctgagcgggtcatggggcaacacggttagcggggagagcacggggtagccggagaagggcctctggagcaggtctggaggggccatggggcagtcctgggtgtggggacacagtcgggttgacccagggctgtctccctccagagcctccctccggacaatgagtcccccctcttgtctcccaccctgagattgggcatggggtgcggtgtggggggcatgtgctgcctgttgttatgggttttttttgcggggggggttgcttttttctggggtctttgagctccaaaaaataaacacttcctttgagggagagcaaaaaaaaaaaaaaaaaaaaaaaaaaaaaaaaaaaa

SEQ ID NO: 5329 - protein, 180 aa, Homo sapiens
MASTSYDYCRVPMEDGDKRCKLLLGIGILVLLIIVILGVPLIIFTIKANSEACRDGLRAVMECRNVTHLLQQELTEAQKGFQDVEAQAATCNHTVMALMASLDAEKAQGQKKVEELEGEITTLNHKLQDASAEVERLRRENQVLSVRIADKKYYPSSQDSSSAAAPQLLIVLLGLSALLQ

SEQ ID NO: 5330 - DNA, 1447 bp, Homo sapiens
ttccggcggaagttgctgggcgcggaaagccggcaagacctttttttccgccatcatcgctcacgcgcgcaaccctggcgacgcgtggtggcgaggctccgcctccccacgccattggccagcagctcctcgggcacgcgtatactgcgcttccgggcaatctccgccccccccccccgcatggccttctgggagttgtagttcggtcgcgagcgctgccgtcgggaggcgctccgaggttcgaggctgtgccccgcgaccccgccttcggcgctcggctcgcaggatggatcccgtacccgggacagactcggcgccgctggctggcctggcctggtcgtcggcctctgcacccccgccgcgggggttcagcgcgatctcctgcaccgtcgagggggcacccgccagctttggcaagagcttcgcgcagaaatctggctacttcctgtgccttagttctctgggcagcctagagaacccgcaggagaacgtggtggccgatatccagatcgtggtggacaagagccccctgccgctgggcttctcccccgtctgcgaccccatggattccaaggcctctgtgtccaagaagaaacgcatgtgtgtgaagctgttgcccctgggagccacggacacggctgtgtttgatgtccggctgagtgggaagaccaagacagtgcctggataccttcgaataggggacatgggcggctttgccatctggtgcaagaaggccaaggccccgaggccagtgcccaagccccgaggtctcagccgggacatgcagggcctctctctggatgcagccagccagccaagtaagggcggcctcctggagcggacagcgtcaaggctgggctctcgggcatccactctgcggaggaatgactccatctacgaggcctccagcctctatggcatctcagccatggatggggttcccttcacactccacccacgatttgagggcaagagctgcagccccctggccttctctgcttttggggacctgaccatcaagtctctggcggacattgaggaggagtataactacggcttcgtggtggagaagaccgcggctgcccgcctgccccccagcgtctcatagtccctcacccttccgcggaaagagcccccttactccacctccccgccagcctggggccaccccccctcactgcatcctggggccacccccactcactgcatcctgggaaccttcgccctgcaaggcgtttgctatcttcagccactgggcggagctgcagccctggaggagggggcgggtcgaggctgcgtggtgatggggtctccgcccccacgccctgccgggcagggctggagctggacagaagccagtgcctttaagtcatttgtgtcaaaaccctctggggtccggaggctgtgcgggtgtcctcctggcaataaacactacccggttctcgcc

SEQ ID NO: 5331 - DNA, 1586 bp, Homo sapiens
gcttcctcctccccgccgccgccctcgccatggccgcgccggccccgggcctcatctcggtgttctcgagttcccaggagctgggtgcggcgctagcgcagctggtggcccagcgcgcagcatgctgcctggcaggggcccgcgcccgtttcgcgctcggcctgtcgggcgggagcctcgtctcgatgctagcccgcgagctacccgccgccgtcgcccctgccgggccagctagcttagcgcgctggacgctgggcttctgcgacgagcgcctcgtgcccttcgatcacgccgagagcacgtacggcctctaccgggtgagagctacgggggccgccggggatcacgccgagagggccacagccaccgcctacaccccggctacggaggccgccgggggccatgccgaaagggccgcgcccactgtctgcacctcggctacgggggccactgggtatcatgccaagagggccgtgcccactgcctgcacctcggctacgtgggtcgctgggggtcatgccaagagggccgcgcccaccggttgccctcggctacgggggccactgggggtcatgccgagatggtcacgcccactgcctgcacctcgactacgggggccgctgggggtctagccgacagggctcgcccgcctcctgaaccccgcctacagtgggtcccgcaggacctcactgcgccctctgcctttatctaggcagggctagaaatggtctacttgcagtccgtcttcctgcttcatccggtggccaggcagagggaacggcacgggcaagggcctggaagggaatccgagtggcccatgtcaaacgatgcccataactcagccccgtagcggacgggggcacgaggaatcaggtgtagagcctgaatctcagggtcctgatctctaaccccagcgagttctcggggatccctgggcagctttgccgctctgatggctctgcttccaggctgttcatctttggctttgagcctcaggattctatagaatcagaggagcgcgctcttttaaagacagggtaactgaggcttggaggagccttggcctggccgagggaagagtgggaggggcgggctcaaaggccaggaacctcaagtcacttgagtctggcagcgtcaagggacaccccatgctgggtgtgccgtcttctctttgcatagaatcttgagctgatgatggttttgtgggttttttattaagagaaaaggcttactgaacgctttatatgcatcaattcatgagtccgtaccacagcctatgagatgttacactcatttcacagatggagaaactgaggccagaagaggtgagcttacctgcccaaggcatctagtgaccagaggggcagccagggtgtgatcctgcctcatctgacttcgtagttgggtacacatttaacttccgccttcctgtgtgtgttttccaagagcatcattaaaaagttttggccgggtgcggtggctcacgcgtgtaatcccagcactttgggaggccgacgtgagtagatcacctgaggtcaggatttcgagaccagcctggccaacatggcaaaactctgtctctacta

SEQ ID NO: 5332 - DNA, 3269 bp, Homo sapiens
aagatggcggcggtggctggatctggggctgccgcggctccgagctcactgctcctcgtggtgggcagcgagttcgggagcccggggctcctcacctacgtcctggaggagctcgaaagaggcatccggtcttgggatgtcgatcctggcgtctgcaaccttgatgaacagctcaaggtctttgtgtcccgacactctgccaccttctccagcattgtgaaaggccagcggagcctgcaccaccgtggagacaacctggagaccctggtcctcctgaacccatcagacaagtccctgtatgatgagctccggaaccttctgttggaccctgcctctcacaagctactggtgttggctgggctctgcctggaggagacgggggagctgctgctacagacagggggcttctcgcctcaccacttcctccaggtcctgaaggacagagagatccgggacatcctggccaccacgcccccacctgtgcagccgcccatactcaccatcacctgccccaccttcggtgactgggctcagccggcacccgctgtgcctggccttcagggggcgctccggctccagctgcggctgaaccccccggcgcagctgcccaactctgagggcctgtgcgaattcctggagtacgtggctgagtctctggagccaccgtcccccttcgagctgctggagcccccgacctccgggggcttcctcaggctgggccggccctgctgctacatcttccctggaggcctcggggatgccgccttcttcgccgtcaatggcttcactgtgctggtcaacggtggctcaaaccccaagtccagtttctggaagctggtgcggcacctggaccgcgtggatgccgtgctggtgacccaccctggcgccgacagcctccccggcctcaacagcctgctgcggcgcaaactggcggagcgctccgaggtggctgctggtgggggctcctgggacgacaggctgcgcaggctcatctcccccaacctgggggtcgtgttcttcaacgcctgcgaggccgcgtcgcggctggcgcgcggcgaggatgaggcggagctggcgctgagcctcctggcgcagctgggcatcacgcctctgccactcagccgcggccccgtgccagccaaacccaccgtgctcttcgagaagatgggcgtgggccggctggacatgtatgtgctgcacccgccctccgccggcgccgagcgcacgctggcctctgtgtgcgccctgctggtgtggcaccccgccggccccggcgagaaggtggtgcgcgtgctgttccccggttgcaccccgcccgcctgcctcctggacggcctggtccgcctgcagcacttgaggttcctgcgagagcccgtggtgacgccccaggacctggaggggccggggcgagccgagagcaaagagagcgtgggctcccgggacagctcgaagagagagggcctcctggccacccaccctagacctggccaggagcgccctggggtggcccgcaaggagccagcacgggctgaggccccacgcaagactgagaaagaagccaagaccccccgggagttgaggaaagaccccaaaccgagtgtctcccggacccagccgcgggaggtgcgccgggcagcctcttctgtgcccaacctcaagaagacgaatgcccaggcggcacccaagccccgcaaagcgcccagcacgtcccactctggcttcccgccggtggcaaatggaccccgcagcccgcccagcctccgatgtggagaagccagcccccccagtgcagcctgcggctctccggcctcccagctggtggccacgcccagcctggagctggggccgatcccagccggggaggagaaggcactggagctgcctttggccgccagctcaatcccaaggccacgcacaccctcccctgagtcccaccggagccccgcagagggcagcgagcggctgtcgctgagcccactgcggggcggggaggccgggccagacgcctcacccacagtgaccacacccacggtgaccacgccctcactacccgcagaggtgggctccccgcactcgaccgaggtggacgagtccctgtcggtgtcctttgagcaggtgctgccgccatccgcccccaccagtgaggctgggctgagcctcccgctgcgtggcccccgggcgcggcgctcggcttccccacacgatgtggacctgtgcctggtgtcaccctgtgaatttgagcatcgcaaggcggtgccaatggcaccggcacctgcgtcccccggcagctcgaatgacagcagtgcccggtcacaggaacgggcaggtgggctgggggccgaggagacgccacccacatcggtcagcgagtccctgcccaccctgtctgactcggatcccgtgcccctggcccccggtgcggcagactcagacgaagacacagagggctttggagtccctcgccacgaccctttgcctgaccccctcaaggtccccccaccactgcctgacccatccagcatctgcatggtggaccccgagatgctgcccccccaagacagcacggcaaacggagaacgtcagccgcacccggaagcccctggcccgccccaactcacgcgctgccgcccccaaagccactccagtggctgctgccaaaaccaaggggcttgctggtggggaccgtgccagccgaccactcagtgcccggagtgagcccagtgagaagggaggccgggcacccctgtccagaaagtcctcaacccccaagactgccactcgaggcccgtcggggtcagccagcagccggcccggggtgtcagccaccccacccaagtccccggtctacctggacctggcctacctgcccagcgggagcagcgcccacctggtggatgaggagttcttccagcgcgtgcgcgcgctctgctacgtcatcagtggccaggaccagcgcaaggaggaaggcatgcgggccgtcctggacgcgctactggccagcaagcagcattgggaccgtgacctgcaggtgaccctgatccccactttcgactcggtggccatgcatacgtggtacgcagagacgcacgcccggcaccaggcgctgggcatcacggtgttgggcagcaacagcatggtgtccatgcaggatgacgccttcccggcctgcaaggtggagttctagccccatcgccgacacgccccccactcagcccagcccgcctgtccctagattcagccacatcagaaataaactgtgactacacttg

SEQ ID NO: 5333 - protein, 903 aa, Homo sapiens
MAAVAGSGAAAAPSSLLLVVGSEFGSPGLLTYVLEELERGIRSWDVDPGVCNLDEQLKVFVSRHSATFSSIVKGQRSLHHRGDNLETLVLLNPSDKSLYDELRNLLLDPASHKLLVLAGLCLEETGELLLQTGGFSPHHFLQVLKDREIRDILATTPPPVQPPILTITCPTFGDWAQPAPAVPGLQGALRLQLRLNPPAQLPNSEGLCEFLEYVAESLEPPSPFELLEPPTSGGFLRLGRPCCYIFPGGLGDAAFFAVNGFTVLVNGGSNPKSSFWKLVRHLDRVDAVLVTHPGADSLPGLNSLLRRKLAERSEVAAGGGSWDDRLRRLISPNLGVVFFNACEAASRLARGEDEAELALSLLAQLGITPLPLSRGPVPAKPTVLFEKMGVGRLDMYVLHPPSAGAERTLASVCALLVWHPAGPGEKVVRVLFPGCTPPACLLDGLVRLQHLRFLREPVVTPQDLEGPGRAESKESVGSRDSSKREGLLATHPRPGQERPGVARKEPARAEAPRKTEKEAKTPRELRKDPKPSVSRTQPREVRRAASSVPNLKKTNAQAAPKPRKAPSTSHSGFPPVANGPRSPPSLRCGEASPPSAACGSPASQLVATPSLELGPIPAGEEKALELPLAASSIPRPRTPSPESHRSPAEGSERLSLSPLRGGEAGPDASPTVTTPTVTTPSLPAEVGSPHSTEVDESLSVSFEQVLPPSAPTSEAGLSLPLRGPRARRSASPHDVDLCLVSPCEFEHRKAVPMAPAPASPGSSNDSSARSQERAGGLGAEETPPTSVSESLPTLSDSDPVPLAPGAADSDEDTEGFGVPRHDPLPDPLKVPPPLPDPSSICMVDPEMLPPQDSTANGERQPHPEAPGPPQLTRCRPQSHSSGCCQNQGACWWGPCQPTTQCPE

SEQ ID NO: 5334 - DNA, 618 bp, Homo sapiens
cttttgcgggtggcggcgaacgcggagagcacgccatgaaggcctcgggcacgctacgagagtacaaggtagtgggtcgctgcctgcccacccccaaatgccacacgccgcccctctaccgcatgcgaatctttgcgcctaatcatgtcgtcgccaagtcccgcttctggtactttgtatctcagttaaagaagatgaagaagtcttcaggggagattgtctactgtgggcaggtgtttgagaagtcccccctgcgggtgaagaacttcgggatctggctgcgctatgactcccggagcggcacccacaacatgtaccgggaataccgggacctgaccaccgcaggcgctgtcacccagtgctaccgagacatgggtgcccggcaccgcgcccgagcccactccattcagatcatgaaggtggaggagatcgcggccagcaagtgccgccggccggctgtcaagcagttccacgactccaagatcaagttcccgctgccccaccgggtcctgcgccgtcagcacaagccacgcttcaccaccaagaggcccaacaccttcttctaggtgcagggccctcgtccgggtgtgccccaaataaactcaggaacgccccggt

SEQ ID NO: 5335 - protein, 176 aa, Homo sapiens [sequence omitted]

SEQ ID NO: 5336 - DNA, 960 bp, Homo sapiens
cggcgctggggtaagaagcctgctgagggatgcccaagaagttccagggtgagaacaccaagtcggcagcggcccgggcacgtagggcagaggccaaggcggccgctgatgccaagaagcagaaggagctggaggatgcctactggaaggacgacgacaaacacgtcatgaggaaggagcagcgcaaggaggagaaggagaagcggcgcctcgaccagctggaacgtaagaaggagacgcagcgcctactggaggaggaggactccaagctcaagggcggcaaggcgccgcgggtggccacgtccagcaaggtcacccgggcccagatcgaggacacgctgcgccgagaccatcagctcagggaggccccggacacagccgagaaagccaagagccatctggaggtgccgctggaggagaacgtgaaccgccgcgtgctggaggagggcagcgtggaggcgcgcaccatcgaggacgccattgcagtgctcagcgtggcggaggaggcggccgaccggcacccagaaagacgcatgcgggcagccttcacagcctttgaggaagcccagctgccgcggctcaaacaagagaaccccaacatgcggctgtcgcagctgaaacagctgctcaagaaggagtggctccgctctcctgacaaccccatgaaccagcgggccgtgcccttcaatgcccccaagtgagcccagaacttggggagccagttcacccacgggtggtccaggtcacgactctgcacgcccttaggccaggtcagctgcgagggtcacagagcgttccgggggccaaggcgccgggccccggggccatgctcttatcaccagccacccgtcctcccgccagagggtccctgccccgagtgacaccccatcccctcccatcccccggcgcgtgtgtgtagagcctcagggctgagtgcccaataaaggtggcggcaaggct

SEQ ID NO: 5337 - DNA, 3237 bp, Homo sapiens
cctgaaggctgtgggacccatgatcctggttagattctccttctgcttgtccctggctgtgctgcctcaggcacattacttaacctttctgggcctctgccacctcatctgtaaaatgggcatgatggtgaagccaggttgccagataaaatataggctactcagctaaatgtgaagttcagatcaatattgaatttggttttactgtaagtatatcccatgcaacatttgggatatacttatactaaaaaaaaattattcattgatgctatggtttgaatggtcccccaaagttcatatgtttgaaacttaatcctcaaagcagtcctttcaaccttgtcaacctgtcggcgcggcctctggtgcagtggcggcggctcctgttcctgccgcagctctctccccttcttacctccccaccagatcccggagatcgcccgccatggctttacttactgcggccgcccggctcttgggaaccaagaatgcatcttgtcttgttcttgcagcccagcatgccagtgcttcctccatgaatttgaaagacatattggctgacctcatacctaaggagcaggccagaattaagaccttcaggcagcaacatggcaagaaggtggtgggccaaatcactgtggacatgatgtatggtggcatgagaggcatgaagggattggtctatgaaacatcagttcttgatcctgatgagggcatccgtttctgaggctttagtatccctgaatgccagaaactgctacccaaggctaagggtggggaagaacccctgcctgagggcttattttggctgctggtaactggatgtatcccaacagaggaacaggtatcttggctctcaaaagagtgggcaaagagggcagctctgccttcccatgtggtcaccatgctggacaactttcccaccaatctacaccccatgtctcagctcagtgcagctgttacagccctcaacagtgaaagtaactttgcccaagcatatgcacggggtatcagccgaacccaagtactgggagttgatttatgaagactctgtggatctaatcacaaagctaccttgtgtcgcagcaaagatctaccgaaatctctatggagaaggcagtggtattggggccattgactctaacctggactggtctcacagtttcaccaacatgttaggctatactgatcatcagttccctgagctcatgcacctgtacctcactatccacagtgaccatgagggcggcaatgtaagtgcccataccagccacttggtgggcagtggcctttcagacccttacctgtcctttgcagcagccatgaacgggctggcagggcctctccatggactggcaaatcaggaagtgcttgtctggctaacacagctgcagaaggaagttggcaaagatgtgtcagatgagaagttatgagactacatctggaacacactcaactcaggacgggctgttccaggctatggccatgcagtactaaggaagactgatccacgatatacctgtcagcgagagtttgctctgaaacacctgcctaatgaccccatgtttaagttggttgctcagctatgcaagattgtgcccaatgtcctcttagagcagggtaaggccaagaatccttggcccaatgtagatgctcacagtggggtgctgctccagtattatggcatgatggagatgaattactacacagtcctgtttggggtgtcacgagcattgggtgtactggcacagctcatctggagccgagccttaggcttccctctagaaaggcccaagtccatgagcacagagggtctgatgaagtttgtggactctaagtcagggtaaaactggagactgggggaaagtgactaccagaaagtgaggaagcctaaataaaaagtatacttttgtttcagggggcctttaaagacttaagattaaattatatctgaggcactgataatatgtttgaggttaaaatataaattaagactttaaaagatgaaaaatggtcccttcttccctaatcagctcctttcccctgcctggtatgagttgcccatcacaggcatggtcctggaggatgaccaggactaatgcatgtggtatgagtaggtttggccccctcactatctctagagtgagaatctggctcctgtttccatggctcaaagccggttgcagagaatctgcagtcacttcggagctttagcttcttctctgccaagccctcaataagccagcaaaccaggactctgccccttctgtttccataggaatcatgttggatagtcagctgtaccaagccccttggccttcccatgcacacaaacacctcctagcaagacctgttggttagctggacatgctttggcaatttttttatactgccaagtgaccataaaggcatggcatttgttgtgactggcacccaatgtttgattttttttttaaactatccaattaaaattaaggtctgggagtgttctgtttcccattactttaatactcacccccctcccagactttctacacctgtttcacctcaggctgaggatgttctggacctccccctcttagtccctactagagacctctcaacagatctgtgggcccagtcattgggttttatcagtgcttaatgtgaactaagttttttacttccaacagaatacaagccactaccttctgacctccccaccccccaccaacccccagcttttaatatgctgtggggcatagaacagggactccggaatgaccagcatgatattttcagagtcttgtccctggggtattagcacctctttttgaacagagaattgattcaagattggacatggtctcctctgattatcaggtactggggctgagggcattaaaaatagtaagcctccttcctcgtcccctgcctcaagaaattgcctccttatttatcaacatctttttcctccctttccctgagagctcacagtacaatgtttgtttcagaagccccatttgcacaggttttcagcaactcagaatgctctacttctttttctttgagaaaggattgagatacgctcctgctgtgcccccatctttcctccaaactcctgcctgtgtttgtgtggatacccagtcccagaaccacactgttgagttggacacactgtaaacccctggctaactgtcaagtcatgatgcagacttcaggttgttctgtataaaatgcaaaataaatgttttaattaac

SEQ ID NO: 5338 - DNA, 4327 bp, Homo sapiens
tgggcactgagcacattcggttatttccagaaacgctccgcggtcttggggatcagcctcagttgtgccagtgcggccgtagagagtgttcggccatttccgaaagcgctcgggcgtctctaagcccagccgagcccagtctcggatccctcgccgacccgattgcactcggctacctctggaaacgctcggctgtctcgggggcaccctctagtccaccagtcccgcgggattacgttcggctacttccggaaacactcgggtgcccccttacctcaggctccgcctcggcctcggttcatccgcccggctcgaatgcgctcgggcatttccgccgggggcgggccaggccgctcggaaccgtggcggcggcggaggcggggatcccgcggctgcggcgacggtggccgcggtggagccacggggcgggcttggcttggtgtgacggcggctgcggcggcggtggcggccgcgaccaggtcggcgtcctcagctggccgagcatggtggcagcctgcacccttggctcccttgtctggtgcagccagcagagccgccagccttgggcgcccatggccctccgtgtgagggcgtgagcggcctgccccagcctcacctgctgatggaggactcaatggcccagtgacctgacaccacaccaccaactccctcccaccagctgacgaatggtggacccagtgacgagtggcccttgtaagggtcatggaataatttgaagcgaggcatgagcggcccctgtggtcgcctgtgactgctggagatagaggtcccagcaccccaagccaacccagcggaccctcccagccctgcttcaaccaatggggccagtggggctccaagcagccacctaaccatccagaccccaccccactcacgcggccatggcgggccctgagggcttccagtaccgcgctctgtacccgttccgccgggagcggccggaggacctggagctgctgcccggcgacgtgctggtagtgagccgggcggccttgcaggcgctgggcgtggccgagggtggcgagcgctgcccacagagcgtgggctggatgcccggcctcaacgagcgcacacggcagcgaggtgacttccctggcacctatgtggagttcctggggcccgtggccctggcccggcccggccctcgcccacggggcccccgcccactgcccgccaggccccgtgatggggcccctgagccaggcctcacactccccgacttgcccgagcagttctccccacctgatgtggctccccctcttctggtgaagcttgtggaggccattgaaaggacagggctggacagcgaatctcactaccgcccggagctgcccgcaccgcgtacagactggtccctgagcgacgtggatcagtgggacacggcagccctggctgacggcattaagagcttcctgctggcactgcccgcgccgctcgtgacccccgaggcctcggccgaggcgcgccgggccctgcgggaggccgcggggcccgtggggccggcgctggagccaccgacgctgccgctgcaccgcgcgctcacgctgcgcttcctgctccagcacctgggccgcgtggccagccgcgccccggccctgggtcccgcggtccgggccctgggcgccacctttgggccgctgctgctgcgcgcgccgccgccgccgtcctcgccgccgccagggggcgctcccgacgggagtgagcccagccctgacttcccggcgctgctggtggagaagctgcttcaggaacacttggaagagcaggaggttgcgcccccagcgctgccgcctaaaccccccaaggcaaagccggcctccacagtcctggccaatggagggagcccaccctccctgcaggatgctgagtggtactggggggacatttcaagggaggaggtgaacgagaaactccgggacactcccgatggcaccttcctagtccgagatgcttctagcaagatccagggcgagtacacgctgaccctcaggaaaggcgggaacaataagctgatcaaggtcttccaccgagatgggcactatggcttctcagagccactcaccttctgctccgttgtggacctcatcaatcactaccgccacgagtctctggcccagtacaatgccaagctggacacacggctcctctaccctgtgtccaaataccagcaggaccagattgtcaaggaggacagcgtggaggcagtgggcgcccagcttaaggtctatcaccagcagtaccaggacaagagccgcgagtatgaccagctttatgaagagtacacacggacctcccaggagctgcagatgaagcgtactgcaattgaggccttcaatgagactatcaagatctttgaagagcagggccagactcaagagaaatgcagcaaggaatacctggagcgcttccggcgtgagggcaacgagaaagagatgcaaaggatcctgctgaactccgagcggctcaagtcccgcattgccgagatccatgagagccgcacgaagctggagcagcagctgcgggcccaggcctcggacaacagagagatcgacaagcgcatgaacagcctcaagccggacctcatgcagctgcgcaagatccgagaccagtacctcgtgtggctcacccagaaaggcgcccggcagaagaaaatcaacgagtggctggggattaaaaatgagactgaggaccagtacgcactcatggaggacgaggacgatctcccgcaccacgaggaacgcacttggtacgtgggcaagatcaaccgcacgcaggcagaggagatgctgagtggcaagcgggatggcaccttcctcatccgcgagagcagccagcggggctgctacgcctgctccgtggtagtggacggcgacaccaagcactgcgtcatctaccgcacggccaccggcttcggcttcgcggagccctacaacctgtacgggtcgctgaaggagctggtgctgcactaccagcacgcctcgctggtgcagcacaacgacgcgctcaccgtcaccctggcgcacccagtgcgcgccccgggccccggcccgccgcctgccgcccgctgagcaccgaggacccgccccaagcagagccgcccctgggcccgtctgcgccggaggctgcggcggcgggagccacggaccagaccagccacatccaggggtcctcatttctccggctctggctcttgtttggggttctctcaccctctttctctttccttccctcccccattctccagatctccctctgtctccttttctctgtctttcttggcccctgtctctctccatgttgggggtcctaactcccccaccccatatctacgtgtcctccgggcattgccctctccatggctctggtcaccctgaccctctgccctgcccaccgcaggtcccccggggtcccggaagccccttctggctgcacctgccatgtttacagagggcccctgggctgcgcggccccagcctgggcaccctgatttttaagccatagacctggggtcagggcaggaaggaacttcactctgctgcttccgagaacctcggccgtgacattcggggccgggcgggacccgccccacagactccaacttcccctccaaaccccgaagtgaaacccgccaccgggttacccccacaagggggccgctgcgagaagttcacccacccccgaaaaaataattaaactcgcaggccaggcacggtggctcatgcctgtaatcccagcactttgggaggccaagacgggcggatcttttgaggtcgggagttggaggccagcctggccaaaatggcaaaaccccgcatctactaaaatacaaaaattagccgggcgtggtggcggccgcctgtaatcccagctacttgggaggctgaggcgtgagaatctcttgaacccaggagatggaggttgcagtgagcagagatcgtgccactgcactccagcctgggtaacagagggagactcctccgtctcaaaaaaataaataaataaacttgtgagctggccccaacccctcctaggaatcacagctccccgtactggtgccgccgcagtggccaagttgcgacactgcccacggcccctccctctgatgcagattcagggcttctcttcgatcatgttgggttttgattctgtttttccttgactgcaaaaccctctttcctctcctcttttgggacaagagccctggttttctacgctgcccttggccaccacactgcctgccccacgagctgggaggcaggttttgtacggtacgttgttattgatatgatataaaacatcaaacgtc

SEQ ID NO: 5339 - DNA, 1028 bp, Homo sapiens
ggaccgccgcctggttaaaggcgcttatttcccaggcagccgctgcagtcgccacacctttgcccctgctgcgatgaccctgtcgccacttctgctgttcctgccaccgctgctgctgctgctggacgtccccacggcggcggtgcaggcgtcccctctgcaagcgttagacttctttgggaatgggccaccagttaactacaagacaggcaatctatacctgcgggggcccctgaagaagtccaatgcaccgcttgtcaatgtgaccctctactatgaagcactgtgcggtggctgccgagccttcctgatccgggagctcttcccaacatggctgttggtcatggagatcctcaatgtcacgctggtgccctacggaaacgcacaggaacaaaatgtcagtggcaggtgggagttcaagtgccagcatggagaagaggagtgcaaattcaacaaggtggaggcctgcgtgttggatgaacttgacatggagctagccttcctgaccattgtctgcatggaagagtttgaggacatggagagaagtctgccactatgcctgcagctctacgccccagggctgtcgccagacactatcatggagtgtgcaatgggggaccgcggcatgcagctcatgcacgccaacgcccagcggacagatgctctccagccaccacacgagtatgtgccctgggtcaccgtcaatgggaaacccttggaagatcagacccagctccttacccttgtctgccagttgtaccagggcaagaagccggatgtctgcccttcctcaaccagctccctcaggagtgtttgcttcaagtgatggccggtgagctgcggagagctcatggaaggcgagtgggaacccggctgcctgcctttttttctgatccagaccctcggcacctgctacttaccaactggaaaattttatgcatcccatgaagcccagatacacaaaattccaccccatgatcaagaatcctgctccactaagaatggtgctaaagtaaaactagtttaat

SEQ ID NO: 5340 - protein, 250 aa, Homo sapiens
MTLSPLLLFLPPLLLLLDVPTAAVQASPLQALDFFGNGPPVNYKTGNLYLRGPLKKSNAPLVNVTLYYEALCGGCRAFLIRELFPTWLLVMEILNVTLVPYGNAQEQNVSGRWEFKCQHGEEECKFNKVEACVLDELDMELAFLTIVCMEEFEDMERSLPLCLQLYAPGLSPDTIMECAMGDRGMQLMHANAQRTDALQPPHEYVPWVTVNGKPLEDQTQLLTLVCQLYQGKKPDVCPSSTSSLRSVCFK

SEQ ID NO: 5341 - DNA, 609 bp, Homo sapiens
atgtgcccagaaggatgtcagtacacggggaggggccacacgctgaggaccccgcagctaggcgaggcaggaggcctccaccagcctccaggcctctgcccgcgccgttccctccgcctggaatgcgcctcccgccccaacccaaccctgtgtttactgcgacttccctcccttcggcctggccctgacccctccggggcagggcgtgtccgtgtctggctgctagcaccaccctgccctcagtctgtcagcggggaaatggctcagtacctggaaaagccacgagtatgtggtcggatgcaggcaaaacccacacatcatgacactgccctgagaagtgggataacgtccctcaccactcgtggagctgctgctgagataaaggtgaaaatgcagagtcccggaccaagccctagtgttgccccaacctcatctgcaactttcattgccttggggactttcaggattaagcgattcctggacaagaaacaaaagcaaaatcgtcccattccccagtggatttggatgaaaactggaaataaaatcaggtacaactccaaaaggacactggagaagaaccaagctgggtctataaggaattgcacatga

SEQ ID NO: 5342 - protein, 202 aa, Homo sapiens [sequence omitted]

SEQ ID NO: 5343 - DNA, 1183 bp, Homo sapiens
gcaacctgcacagccatgcccgggcaagaactcaggacggtgaatggctctcagatgctcctggtgttgctggtgctctcgtggctgccgcatgggggcgccctgtctctggccgaggcgagccgcgcaagtttcccgggaccctcagagttgcactccgaagactccagattccgagagttgcggaaacgctacgaggacctgctaaccaggctgcgggccaaccagagctgggaagattcgaacaccgacctcgtcccggcccctgcagtccggatactcacgccagaagtgcggctgggatccggcggccacctgcacctgcgtatctctcgggccgcccttcccgaggggctccccgaggcctcccgccttcaccgggctctgttccggctgtccccgacggcgtcaaggtcgtgggacgtgacacgaccgctgcggcgtcagctcagccttgcaagaccccaggcgcccgcgctgcacctgcgactgtcgccgccgccgtcgcagtcggaccaactgctggcagaatcttcgtccgcacggccccagctggagttgcacttgcggccgcaagccgccagggggcgccgcagagcgcgtgcgcgcaacggggaccactgtccgctcgggcccgggcgttgctgccgtctgcacacggtccgcgcgtcgctggaagacctgggctgggccgattgggtgctgtcgccacgggaggtgcaagtgaccatgtgcatcggcgcgtgcccgagccagttccgggcggcaaacatgcacgcgcagatcaagacgagcctgcaccgcctgaagcccgacacggtgccagcgccctgctgcgtgcccgccagctacaatcccatggtgctcattcaaaagaccgacaccggggtgtcgctccagacctatgatgacttgttagccaaagactgccactgcatatgagcagtcctggtccttccactgtgcacctgcgcggaggacgcgacctcagttgtcctgccctgtggaatgggctcaaggttcctgagacacccgattcctgcccaaacagctgtatttatataagtctgttatttattattaatttattggggtgaccttcttggggactcgggggctggtctgatggaactgtgtatttatttaaaactctggtgataaaaataaagctgtctgaactgtt

SEQ ID NO: 5344 - protein, 308 aa, Homo sapiens
MPGQELRTVNGSQMLLVLLVLSWLPHGGALSLAEASRASFPGPSELHSEDSRFRELRKRYEDLLTRLRANQSWEDSNTDLVPAPAVRILTPEVRLGSGGHLHLRISRAALPEGLPEASRLHRALFRLSPTASRSWDVTRPLRRQLSLARPQAPALHLRLSPPPSQSDQLLAESSSARPQLELHLRPQAARGRRRARARNGDHCPLGPGRCCRLHTVRASLEDLGWADWVLSPREVQVTMCIGACPSQFRAANMHAQIKTSLHRLKPDTVPAPCCVPASYNPMVLIQKTDTGVSLQTYDDLLAKDCHCI

SEQ ID NO: 5345 - DNA, 1724 bp, Homo sapiens
gaggaaaaaaagccaccctgcggccggggccggagctggagccgccgctgccgccgccgccgcggccgtctggagctcccccgcgcggacgatgcctgccgtgcccgcctggggctcggggcggtgaggcccggggcgcggggtagctatggcgacggcaagcgcggcccgcggcgccgcctgacaggtgtgggccccggcggcggcggcgtggagcagcatgtacgccaaggggggcaagggttcggccgtgccctccgacagccaggcccgcgagaagttggcgctgtacgtttatgagtacctgctgcacatcggtgcccagaagtcagcccagaccttcctgtctgagatccgatgggagaagaacatcacgctgggggagccccctgggttcctgcactcctggtggtgcgtcttctgggacctgtactgcgcggcgcctgacagaagagaggcctgcgagcactccggcgaggccaaggccttccaggactatagtgctgcagccgcccccagccccgttatggggagtatggccccaggtgacacaatggccgcaggctccatggcggctggcttcttccagggcccccccggctcccagccgtccccccacaaccccaacgcccccatgatggggcctcacggtcagcccttcatgtcaccgcgcttcccagggggcccccggcccaccctgcggatgccgagtcagcctcccgcaggcctccctggctcccagcccctcctccctggcgccatggagccctccccacgagcccaggggcatccgagcatgggcggcccaatgcagagggtgacgcctcctcgtggcatggccagcgtggggccccagagctatggaggtggcatgcgacccccacccaactccctcgccggcccaggcctgcctgccatgaacatgggcccaggagttcgtggcccgtgggccagccccagtggaaactcgatcccctactcctcctcatcccccggcagctacaccggacccccaggaggaggtgggccccctggaacacccatcatgcctagccctggagattccaccaactccagcgaaaacatgtacactatcatgaaccccatcgggcagggcgccggcagggctaatttcccgctcggccctggcccggagggccccatggccgccatgagcgcgatggagcctcaccacgtgaacggatccctgggctcgggcgacatggacgggttgccgaagagttcccccggcgccgtggccggcctgagcaacgccccgggcaccccgcgggacgacggcgagatggcggccgccgggaccttcctgcacccgttcccgagcgaaagctactcgccagggatgaccatgagcgtgtgatggggcggcagccccgggcctctctgcgggcctaggcttctgcccagcgcccctgctcagggcgaggggctgaggtcacacctcgggcacctggactcctggccaatcaaggcttgcccagctgggaggccccacacgaaagactcttaccattttattaaaaacgcaaggacctcagagacgttcttttctgtatggacccttcctgccatttgtattttgtcccagagagaaaggctctttggggggcccctctccccaggacgtcagggggtggggcccataaataaatggaagctggttttggtttttggtaaaaaaaaaaaaaaaaaaaaaaaaaaaaaaa

SEQ ID NO: 5346 - protein, 385 aa, Homo sapiens
MYAKGGKGSAVPSDSQAREKLALYVYEYLLHIGAQKSAQTFLSEIRWEKNITLGEPPGFLHSWWCVFWDLYCAAPDRREACEHSGEAKAFQDYSAAAAPSPVMGSMAPGDTMAAGSMAAGFFQGPPGSQPSPHNPNAPMMGPHGQPFMSPRFPGGPRPTLRMPSQPPAGLPGSQPLLPGAMEPSPRAQGHPSMGGPMQRVTPPRGMASVGPQSYGGGMRPPPNSLAGPGLPAMNMGPGVRGPWASPSGNSIPYSSSSPGSYTGPPGGGGPPGTPIMPSPGDSTNSSENMYTIMNPIGQGAGRANFPLGPGPEGPMAAMSAMEPHHVNGSLGSGDMDGLPKSSPGAVAGLSNAPGTPRDDGEMAAAGTFLHPFPSESYSPGMTMSV

SEQ ID NO: 5347 - DNA, 1013 bp, Homo sapiens
cgcgcgctggatgagtatacctcggagctgatgctgggcggaaccaacacactggtgctgcacaacacgtgtgaggactcgctgctggccgcacccatcatgctggacctagcgctgctgaccgagctgtgccagcgcgtgagcttctgcactgacatggaccccgagccgcagaccttccaccccgtgctgtccctgctcagcttcctcttcaaggcgccactagtgccgcccggcagcccggtggtcaatgcgcttttccgccagcgcagctgcatcgagaacatcctcagggcctgcgtggggctcccgccacagaaccacatgctcctggaacacaaaatggagcgcccagggcccagcctcaagcgagttggacccgtggctgccacctaccctatgttgaacaagaaaggaccggtacccgctgccaccaatggctgcaccggtgatgccaatgggcatctgcaagaggggccccccaaagagcctttctctctgggacaaaatacaaatggcaggaagggtccatacagaaaagaacgtctctgaggtccttgcgtttttaataaaatggtaagagtctttcgtgtggggcctcccagctgggcaagccttgattggccaggagtccaggtgcccgaggtgtgacctcagcccctcgccctgagcaggggcgctgggcagaagcctaggcccgcagagaggcccggggctgccgccccatcacacgctcatggtcatccctggcgagtactgcggagagaggagggggcagcgcgcaggggccgagttcagctccggaagaggctgggacccgcccccagggacaatgggggacagggcagggctgggtcctgggcagacatggggtggggacaggagggaacgggggaggggcgatgcatgggaaggccgccctggggcgcgggtcccggggtgggggcggatgggatcgggacggtgaaataggagcgggaggtggtggggggtggggagaggttgaggagagg

SEQ ID NO: 5348 - protein, 173 aa, Homo sapiens
MLGGTNTLVLHNTCEDSLLAAPIMLDLALLTELCQRVSFCTDMDPEPQTFHPVLSLLSFLFKAPLVPPGSPVVNALFRQRSCIENILRACVGLPPQNHMLLEHKMERPGPSLKRVGPVAATYPMLNKKGPVPAATNGCTGDANGHLQEGPPKEPFSLGQNTNGRKGPYRKERL

SEQ ID NO: 5349 - DNA, 2380 bp, Homo sapiens
gactttgtcccccgagatggatgggggcggacatggggagccaggggatgggactgcctggtaggtgctgctgcccacgaagggggagtaggtggcagtgtggctccgaggagattctggctttggagttctggtcctctgcctgtttcccctgcagtgtctctgacccagaccccctacctacccccccggaggcccagcttccctgcccagctccaccccctggcttgtggctgggctcatgtgtagcctcattgtcctcttgtaaaggggggataggcagccatgagcccctgggggctgcggagcgagcgaggtgaacctatacgcgccgcgctcgtggacgcctggccacttccgccaggcggggacccgatggccacggtggctctgggttgtcgggcctcgaaccgggtctccagacgttgggcccctccctcccagcgcgggagaggcggggaagggggcggggcgggggaggggccgcagcgcttttctccggaggtcgcgcgcccgagagcccgcgctgtccgccgccgctgcctgagtcgactctgcgccgcccgccgcgatggaggccgccgcccagttcttcgtcgagagcccggacgtggtctacggccccgaggccatcgaggcgcaatacgagtaccggacgacgcgcgtcagccgcgagggtggcgttctcaaggtgcaccccacgtccacgcgcttcaccttccggaccgcccggcaggtgccccggctcggggtcatgcttgtcggctggggcgggaacaacggctccacactcaccgccgcggtgctggccaatcgactgcgtttgtcctggcccacgcgcagcggccgcaaggaggccaactactacggctcgctgactcaggcgggcaccgtgagcctgggcctggacgccgagggccaggaggtgttcgtacccttcagcgcggtgctgcccatggtggcgcccaacgacctcgtgttcgatggctgggacatctcgtcgctgaacctggccgaggcgatgcggcgcgcgaaggtgctggactgggggctgcaggagcaactgtggccgcacatggaggccctgcggccccggccttctgtttacatccccgaattcatcgcggccaaccagagcgcgcgcgcggacaacctcatcccaggctcgcgtgcgcagcagctggagcagatccgcagggacatccgagacttccggtctagcgcggggctggacaaagtcatagtgctgtggacggcgaacacggagcgcttctgtgaggtgattccaggcctcaacgacacagccgagaacctgctgcgcaccattgagctcggtctggaggtgtcgccctccacgctcttcgccgtggccagcatcctggagggctgtgccttcctcaatgggtctccgcagaacaccctggtgcccggagctcttgagctcgcgtggcagcaccgggtttttgtgggcggagatgacttcaagtcaggccagaccaaagtcaagtccgtgcttgtggacttcctcattggctccggcctcaagaccatgtccatcgtgagttacaaccacctgggcaacaacgatggggagaacctatcggcgccattgcagttccgctctaaggaggtgtccaagagcaacgtggtggacgacatggtgcagagcaacccagtgctctatacgcccggcgaagagcctgaccactgcgtggtcatcaagtatgtgccgtacgtgggtgacagcaagcgcgcgctggatgagtatacctcggagctgatgctgggcggaaccaacacactggtgctgcacaacacgtgtgaggactcgctgctggccgcacccatcatgctggacctagcgctgctgaccgagctgtgccagcgcgtgagcttctgcactgacatggaccccgagccgcagaccttccaccccgtgctgtccctgctcagcttcctcttcaaggcgccactagtgccgcccggcagcccggtggtcaatgcgcttttccgccagcgcagctgcatcgagaacatcctcagggcctgcgtggggctcccgccacagaaccacatgctcctggaacacaaaatggagcgcccagggcccagcctcaagcgagttggacccgtggctgccacctaccctatgttgaacaagaaaggaccggtacccgctgccaccaatggctgcaccggtgatgccaatgggcatctgcaagaggagcccccaatgcccaccacctgaggccccggtcacacagtttctcggctcttcctccccgctgccccccacgaccctaccttgaaggcccccacaaataaaggcgctgccactcagccctccttccacctggggttcttggggcctgtgacctga

SEQ ID NO: 5350 - DNA, 1567 bp, Homo sapiens
gggtgaggaggaagaggaggaggaagaggaggaagaggatgacctgagtgagctgccaccgctggaggacatgggacaacccccggcggaggaggctgagcagcctggggccctggcccgagagttccttgctgccatggagcccgagcccgccccagccccggccccagaagagtggctggacattctggggaacgggctgttgaggaagaagacgctggtcccagggccgccaggttcgagccgcccggtcaagggccaggtggtcaccgtacatctgcagacgtcgctggagaatggcacacgggtgcaggaggagccggagctggtgttcactctgggtgactgtgacgtcatccaggccctggatctcagtgtcccactcatggacgtgggggagacggccatggtcactgctgactccaagtactgctacggcccccaaggcagcaggagcccatacatccccccgcacgcggccctgtgcctggaggtgaccctgaagacggctgtggacgggcctgacctggagatgctcacggggcaggagcgcgtggccctggccaaccggaagcgggagtgcggcaacgcccactaccagcgggcggacttcgtcctggccgccaactcctacgacctcgccatcaaggctatcacctccagcgccaaagtggacatgacgttcgaggaggaggcacagctcctgcagttgaaggtgaagtgtctgaacaacctggcggcctcgcagctgaagctcgaccactaccgcgcagccctgcgctcctgcagccttgtgctggagcaccagccagacaacatcaaggctctcttccgcaagggcaaggtgctggcccagcagggggagtacagtgaggccatccccatcctgagggcagccctgaagctggaaccttccaacaagacgatccacgcagagctctcaaagctggtgaagaagcatgcggcgcagcggagcacggagaccgccttgtaccggaaaatgctgggcaaccccagccggctgcctgctaagtgccctggcaagggtgcctggtccatcccatggaagtggctgtttggggcgactgctgttgccttggggggtgtggcactctctgtggtcatcgctgccaggaactgaccacctaggtggctgccaccccctctgcacaccatggaccctgccctgcgctccccaactcccccaggctccctgtccactgccctccctggtctggccccctcctccgggttaggggagcaaggattgggggtcgtgcagcccagccagcaggagggactgaggccctctaggaggaaagcccagagggagggggccctcattccttcagacccagttttcccccaccctccttaccccgctgggctaggtctccgccagggctggcctcagtttctcctcaacaggcctgggggcagcccttcccctgcctagtccccgcctgagtgccagccccccaccccgcctgccgccccctgtccaggttccctccccgccacagtgaaataaagcatcccaccctgcaaaaaaaaaaaaaaaaaaaaa

SEQ ID NO: 5351 - protein, 356 aa, Homo sapiens
MGQPPAEEAEQPGALAREFLAAMEPEPAPAPAPEEWLDILGNGLLRKKTLVPGPPGSSRPVKGQVVTVHLQTSLENGTRVQEEPELVFTLGDCDVIQALDLSVPLMDVGETAMVTADSKYCYGPQGSRSPYIPPHAALCLEVTLKTAVDGPDLEMLTGQERVALANRKRECGNAHYQRADFVLAANSYDLAIKAITSSAKVDMTFEEEAQLLQLKVKCLNNLAASQLKLDHYRAALRSCSLVLEHQPDNIKALFRKGKVLAQQGEYSEAIPILRAALKLEPSNKTIHAELSKLVKKHAAQRSTETALYRKMLGNPSRLPAKCPGKGAWSIPWKWLFGATAVALGGVALSVVIAARN

SEQ ID NO: 5352 - DNA, 1130 bp, Homo sapiens
cttggcgcaggctggaagaggagctggtgagaagacagcgaaatggcgcctccggcccccggcccggcctccggcggctccggggaggtagacgagctgttcgacgtaaagaacgccttctacatcggcagctaccagcagtgcataaacgaggcgcagcgggtgaagctatcaagcccagagagagacgtggagagggacgtcttcctgtatagagcgtacctggcgcagaggaagttcggtgtggtcctggatgagatcaagccctcctcggcccctgagctccaggccgtgcgcatgtttgctgactacctcgcccacgagagtcggagggacagcatcgtggccgagctggaccgagagatgagcaggagcgtggacgtgaccaacatcaccttcctgctcatggccgcctccatctatctccacgaccagaacccggatgccgccctgcgtgcgctgcaccagggggacagcctggagtgcacagccatgacagtgcagatcctgctgaagctggaccgcctggacctcgcccggaaggagctgaagagaatgcaggacctggacgaggatgccaccctcacccagctcgccactgcctgggtcagcctggccacgggtggtgagaagctgcaggatgcctactacatcttccaggagatggctgacaagtgctcgcccaccctgctgctgctcaatgggcaggcggcctgccacatggcccagggccgctgggaggccgctgagggcctgctgcaggaggcgctagacaaggatagtggctacccagagacgctggtcaacctcatcgtcctgtcccagcacctgggcaagccccctgaggtgacaaaccgatacctgtcccagctgaaggatgcccacaggtcccatcccttcatcaaggagtaccaggccaaggagaacgactttgacaggctggtgctacagtacgctcccagcgcctgaggctggcccagagctgtcaggaccatgaagccaggacagaggccaggagccagccctgcagccctccccacccggcatccacctgcatcccctctgggggcaggagcccacccccagcacccccatctgttaataaatatctcaactccaaaaaaaaaaaa

SEQ ID NO: 5353 - protein, 308 aa, Homo sapiens
MAPPAPGPASGGSGEVDELFDVKNAFYIGSYQQCINEAQRVKLSSPERDVERDVFLYRAYLAQRKFGVVLDEIKPSSAPELQAVRMFADYLAHESRRDSIVAELDREMSRSVDVTNITFLLMAASIYLHDQNPDAALRALHQGDSLECTAMTVQILLKLDRLDLARKELKRMQDLDEDATLTQLATAWVSLATGGEKLQDAYYIFQEMADKCSPTLLLLNGQAACHMAQGRWEAAEGLLQEALDKDSGYPETLVNLIVLSQHLGKPPEVTNRYLSQLKDAHRSHPFIKEYQAKENDFDRLVLQYAPSA
